United States Patent Application Publication US 2020/0163878 A1 - sequence listing, part 29

SEQ ID NO: 105958 - RNA, 1701 nt, Artificial Sequence
  derived and/or modified CDS sequence (opt2) from hemagglutinin__InfluenzaA__AGG14021
augaagaccaucaucgcccucuccuacauccucugccucgucuucgcccaggagcuccccggcaacgacgacuccaccgccacccucugccucggccaccacgccguccccaacggcaccaucgucaagaccaucaccaacgaccagaucgaggucaccaacgccaccgagcucguccaguccuccuccaccggcgagaucugcaacuccccccaccagauccucgacggcgagaacugcacccucaucgacgcccuccucggcgacccccagugcgacggcuuccagaacaagaagugggaccucuucgucgagcgcuccaaggcccacuccaacugcuaccccuacgacguccccgacuacgccucccuccgcucccucgucgccuccuccggcacccucgaguucaacaacgaguccuucaacuggaccggcgucacccagaacggcaccuccuccgccugcauccgccgcuccaacaacuccuucuucucccgccucaacuggcucacccaccucaacuucaaguaccccgcccucaacgucaccaugcccaacaacgagcaguucgacaagcucuacaucuggggcguccaccaccccggcaccgacaaggaccagaucuuccucuacgcccaggccuccggccgcaucaccgucuccaccaagcgcucccagcaggccgucauccccaacaucggcucccgcccccgcguccgcaacauccccucccgcgucuccaucuacuggaccaucgucaagcccggcgacauccuccucaucaacuccaccggcaaccucaucgccccccgcggcuacuucaagauccgcuccggcaaguccuccaucaugcgcuccgacgcccccaucggcaagugcaacuccgccugcaucacccccaacggcuccauccccaacgacaagcccuuccagaacgucaaccgcaucaccuacggcgccugcccccgcuacgucaagcagaacacccucaagcucgccaccggcaugcgcaacguccccgagaagcagacccgcggcaucuucggcgccaucgccggcuucaucgagaacggcugggagggcauggucgacggcugguacggcuuccgccaccagaacuccgagggccgcggccaggccgccgaccucaaguccacccaggccgccaucgaccagaucaacggcaagcucaaccgccucaucggcaagaccaacgagaaguuccaccagaucgagaaggaguucuccgaggucgagggccgcauccaggaccucgagaaguacgucgaggacaccaagaucgaccucugguccuacaacgccgagcuccucgucgcccucgagaaccagcacaccaucgaccucaccgacuccgagaugaacaagcucuucgagaagaccaagaagcagcuccgcgagaacgccgaggacaugggcaacggcugcuucaagaucuaccacaagugcgacaacgccugcaucggcuccauccgcaacggcaccuacgaccacgacgucuaccgcgacgaggcccucaacaaccgcuuccagaucaagggcaucgagcucaaguccggcuacaaggacuggauccucuggaucuccuucgccaucuccugcuuccuccucugcgucgcccuccucggcuucaucaugugggccugccagaagggcaacauccgcugcaacaucugcaucuga

SEQ ID NO: 105959 - RNA, 1701 nt, Artificial Sequence; identical to SEQ ID NO: 105920
  derived and/or modified CDS sequence (opt2) from hemagglutinin__InfluenzaA__AGG14033

SEQ ID NO: 105960 - RNA, 1701 nt, Artificial Sequence; identical to SEQ ID NO: 105939
  derived and/or modified CDS sequence (opt2) from hemagglutinin__InfluenzaA__AGG14318

SEQ ID NO: 105961 - RNA, 1701 nt, Artificial Sequence
  derived and/or modified CDS sequence (opt2) from hemagglutinin__InfluenzaA__AGG14330
augaagaccaucaucgcccucuccuacauccucugccucgucuucgcccagaagcuccccggcaacgacaacuccaccgccacccucugccucggccaccacgccguccccaacggcaccaucgucaagaccaucaccaacgaccgcaucgaggucaccaacgccaccgagcucguccagaacuccuccaucggcgagaucugcgacuccccccaccagauccucgacggcgagaacugcacccucaucgacgcccuccucggcgacccccagugcgacggcuuccagaacaagaagugggaccucuucgucgagcgcuccaaggccuacuccaacugcuaccccuacgacguccccgacuacgccucccuccgcucccucgucgccuccuccggcacccucgaguucaacaacgaguccuucaacuggaccggcgucacccagaacggcaccuccuccgccugcauccgccgcuccaacuccuccuucuucucccgccucaacuggcucacccaccucaacuucaaguaccccgcccucaacgucaccaugcccaacaacgagcaguucgacaagcucuacaucuggggcguccaccaccccggcaccgacaaggaccagaucuuccucuacgcccaguccuccggccgcaucaccgucuccaccaagcgcucccagcaggccgucauccccaacaucggcucccgcccccgcauccgcaacauccccucccgcaucuccaucuacuggaccaucgucaagcccggcgacauccuccucaucaacuccaccggcaaccucaucgccccccgcggcuacuucaagauccgcuccggcaaguccuccaucauccgcuccgacgcccccaucggcaagugcaaguccgagugcaucacccccaacggcuccauccccaacgacaagcccuuccagaacgucaaccgcaucaccuacggcgccugcccccgcuacgucaagcaguccacccucaagcucgccaccggcaugcgcaacguccccgagaagcagacccgcggcaucuucggcgccaucgccggcuucaucgagaacggcugggagggcauggucgacggcugguacggcuuccgccaccagaacuccgagggccgcggccaggccgccgaccucaaguccacccaggccgccaucgaccagaucaacggcaagcucaaccgccucaucggcaagaccaacgagaaguuccaccagaucgagaaggaguucuccgaggucgagggccgcauccaggaccucgagaaguacgucgaggacaccaagaucgaccucugguccuacaacgccgagcuccucgucgcccucgagaaccagcacaccaucgaccucaccgacuccgagaugaacaagcucuucgagaagaccaagaagcagcuccgcgagaacgccgaggacaugggcaacggcugcuucaagaucuaccacaagugcgacaacgccugcaucggcuccauccgcaacggcaccuacgaccacgacgucuaccgcgacgaggcccucaacaaccgcuuccagaucaagggcgucgagcucaaguccggcuacaaggacuggauccucuggaucuccuucgccaucuccugcuuccuccucugcgucgcccuccucggcuucaucaugugggccugccagaagggcaacauccgcugcaacaucugcaucuga

SEQ ID NO: 105962 - RNA, 1701 nt, Artificial Sequence
  derived and/or modified CDS sequence (opt2) from hemagglutinin__InfluenzaA__AGG84179
augaagaccaucaucgcccucuccuacauccucugccucgucuucgcccagaagcuccccggcaacgacaacuccaccgccacccucugccucggccaccacgccguccccaacggcaccaucgucaagaccaucaccaacgaccagaucgaggucaccaacgccaccgagcucguccaguccuccuccgccuccgagaucugcgacuccccccaccacauccucgacggcgagaacugcacccucaucgacgcccuccucggcgacccccagugcgacggcuuccagaacaagaagugggaccucuucgucgagcgcucccgcgccuacuccaacugcuaccccuacgacguccccgacuacgccucccuccgcucccucgucgccuccuccggcacccucgaguucaacaacgaguccuucaacuggaccggcgucacccagaacggcaccuccuccgccugcauccgccgcuccaacaacuccuucuucucccgccucaacuggcucacccaccucaacuucaaguaccccgcccucaacgucaccaugcccaacaacgagcaguucgacaagcucuacaucuggggcguccaccaccccggcaccgacaaggaccagaucuuccucuacgcccaggccuccggccgcaucaccgucuccaccaagcgcucccagcaggccgucauccccaacaucggcucccgcccccgcguccgcaacauccccucccgcaucuccaucuacuggaccaucgucaagcccggcgacauccuccucaucaacuccaccggcaaccucaucgccccccgcggcuacuucaagauccgcuccggcaaguccuccaucaugcgcuccgacgcccccaucggcaagugcaacuccgagugcaucacccccaacggcuccauccccaacgacaagcccuuccagaacgucaaccgcaucaccuacggcgccugcccccgcuacgucaagcaguccacccucaagcucgccaccggcaugcgcaacguccccgagaagcagacccgcggcaucuucggcgccaucgccggcuucaucgagaacggcugggagggcaugauggacggcugguacggcuuccgccaccagaacuccgagggccgcggccaggccgccgaccucaaguccacccaggccgccaucgaccagaucaacggcaagcucaaccgccucaucggcaagaccaacgagaaguuccaccagaucgagaaggaguucuccgaggucgagggccgcauccaggaccucgagaaguacgucgaggacaccaagaucgaccucugguccuacaacgccgagcuccucgucgcccucgagaaccagcacaccaucgaccucaccgacuccgagaugaacaagcucuucgagaagaccaagaagcagcuccgcgagaacgccgaggacaugggcaacggcugcuucaagaucuaccacaagugcgacaacgccugcaucggcuccauccgcaacggcaccuacgaccacgacgucuaccgcgacgaggcccucaacaaccgcuuccagaucaagggcgucgagcucaaguccggcuacaaggacuggauccucuggaucuccuucgccaucuccugcuuccuccucugcgucgcccuccucggcuucaucaugugggccugccagaagggcaacauccgcugcaacaucugcaucuga

SEQ ID NO: 105963 - RNA, 1704 nt, Artificial Sequence
  derived and/or modified CDS sequence (opt2) from hemagglutinin__InfluenzaA__AGI02564
auggagaagaucguccuccuccucgccaucgucucccucgucaaguccgaccagaucugcaucggcuaccacgccaacaacuccaccgagcaggucgacaccaucauggagaagaacgucaccgucacccacgcccaggacauccucgagaagacccacaacggcaagcucugcgaccucgacggcgucaagccccucauccuccgcgacugcuccgucgccggcuggcuccucggcaaccccaugugcgacgaguucaucaacguccccgagugguccuacaucgucgagaaggccaaccccaccaacgaccucugcuaccccggcaacuucaacgacuacgaggagcucaagcaccuccucucccgcaucaaccacuucgagaagauccagaucauccccaaguccuccugguccggccacgaggccuccuccggcgucuccuccgccugccccuaccagggcacccccuccuucuuccgcaacgucgucuggcucaucaagaagaacaacaccuaccccaccaucaagcgcuccuacaacaacaccaaccaggaggaccuccucauccucuggggcauccaccacuccaacgacgccgccgagcagaccaagcucuaccagaaccccaccaccuacaucuccgucggcaccuccacccucaaccagcgccucguccccaagaucgccacccgcuccaaggucaacggccaguccggccgcauggacuucuucuggaccauccucaagcccaacgacgccaucaacuucgaguccaacggcaacuucaucgcccccgaguacgccuacaagaucgucaagaagggcgacuccgccaucaugaaguccgaggucgaguacggcaacugcaacaccaagugccagacccccaucggcgccaucaacuccuccaugcccuuccacaacauccacccccucaccaucggcgagugccccaaguacgucaaguccaacaagcucguccucgccaccggccuccgcaacuccccccuccgcgagcgccgccgcaagcgcggccucuucggcgccaucgccggcuucaucgagggcggcuggcagggcauggucgacggcugguacggcuaccaccacuccaacgagcagggcuccggcuacgccgccgacaaggaguccacccagaaggccaucgacggcgucaccaacaaggucaacuccaucaucgacaagaugaacacccaguucgaggccgucggccgcgaguucaacaaccucgagcgccgcaucgagaaccucaacaagaagauggaggacggcuuccucgacgucuggaccuacaacgccgagcuccucguccucauggagaacgagcgcacccucgacuuccacgacuccaacgucaagaaccucuacgacaagguccgccuccagcuccgcaacaacgccaaggagcucggcaacggcugcuucgaguucuaccacaagugcgacaacgagugcauggaguccguccgcaacggcaccuacgacuacccccaguacuccgaggaggcccgccucaagcgcgaggagaucuccggcgucaagcucgaguccaucggcaccuaccagauccucuccaucuacuccaccgucgccuccucccucgcccucgccaucauggucgccggccucucccucuggaugugcuccaacggcucccuccagugccgcaucugcaucuga

SEQ ID NO: 105964 - RNA, 1707 nt, Artificial Sequence
  derived and/or modified CDS sequence (opt2) from hemagglutinin__InfluenzaA__AGI02565
auggagaagaucguccuccuccucgccaucgucucccucgucaaguccgaccagaucugcaucggcuaccacgccaacaacuccaccgagcaggucgacaccaucauggagaagaacgucaccgucacccacgcccaggacauccucgagaagacccacaacggcaagcucugcgaccucgacggcgucaagccccucauccuccgcgacugcuccgucgccggcuggcuccucggcaaccccaugugcgacgaguucaucaacguccccgagugguccuacaucgucgagaaggccauccccgccaacgaccucugcuaccccggcgacuucaacgacuacgaggagcucaagcaccuccucucccgcaucaaccacuucgagaagauccagaucauccccaaguccuccugguccaaccacgaggccucccucggcgucuccuccgccugccccuaccucggcaagcccuccuucuuccgcaacgucgucuggcucaucaagaagaacuccaccuaccccaccaucaagcgcuccuacaacaacaccaaccaggaggaccuccucguccucuggggcauccaccaccccaacgacgccgccgagcagaccaagcucuaccagaaccccaccaccuacaucuccgucggcaccuccacccucaaccagcgccucguccccaagaucgccacccgcuccaaggucaacggccaguccggccgcauggaguucuucuggaccauccucaagcccaacgacgccaucaacuucgaguccaacggcaacuucaucgcccccgaguacgccuacaagaucgucaagaagggcgacuccgccaucaugaaguccgagcucgaguacggcaacugcaacaccaagugccagacccccaugggcgccaucaacuccuccaugcccuuccacaacauccacccccucaccaucggcgagugccccaaguacgucaaguccaaccgccucguccucgccaccggccuccgcaacuccccccagggcgagcgccgccgcaagaagcgcggccucuucggcgccaucgccggcuucaucgagggcggcuggcagggcauggucgacggcugguacggcuaccaccacuccaacgagcagggcuccggcuacgccgccgacaaggaguccacccagaaggccaucgacggcgucaccaacaaggucaacuccaucaucgacaagaugaacacccaguucgaggccgucggccgcgaguucaacaaccucgagcgccgcaucgagaaccucaacaagaagauggaggacggcuuccucgacgucuggaccuacaacgccgagcuccucguccucauggagaacgagcgcacccucgacuuccacgacuccaacgucaagaaccucuacgacaagguccgccuccagcuccgcgacaacgccaaggagcucggcaacggcugcuucgaguucuaccacaagugcgacaacgagugcauggaguccguccgcaacggcaccuacgacuacccccaguacuccgaggaggcccgccucaagcgcgaggagaucuccggcgucaagcucgaguccaucggcaccuaccagauccucuccaucuacuccaccgucgccuccucccucgcccucgccaucauggucgccggccucucccucuggaugugcuccaacggcucccuccagugccgcaucugcaucuga

SEQ ID NO: 105965 - RNA, 1704 nt, Artificial Sequence
  derived and/or modified CDS sequence (opt2) from hemagglutinin__InfluenzaA__AGI02566
auggagaagaucguccuccuccucgccaucgucucccucgucaaguccgaccagaucugcaucggcuaccacgccaacaacuccaccgagcaggucgacaccaucauggagaagaacgucaccgucacccacgcccaggacauccucgagaagacccacaacggcaagcucugcgaccucgacggcgucaagccccucauccuccgcgacugcuccgucgccggcuggcuccucggcaaccccaugugcgacgaguucaucaacguccccgagugguccuacaucgucgagaaggccaaccccgccaacgaccucugcuaccccggcaacuucaacgacuacgaggagcucaagcaccuccucucccgcaucaaccacuucgagaagauccagaucauccccaaguccuccugguccgaccacgaggccuccuccggcgucuccuccgccugccccuaccagggcacccccuccuucuuccgcaacgucgucuggcucaucaagaagaacaacaccuaccccaccaucaagcgcuccuacaacaacaccaaccaggagaaccuccucauccucuggggcauccaccacuccaacgacgccgccgagcagaucaagcucuaccagaaccccaccaccuacaucuccgucggcaccuccacccucaaccagcgccucguccccaagaucgccacccgcuccaaggucaacggccaguccggccgcauggacuucuucuggaccauccucaagcccaacgacgccaucaacuucgaguccaacggcaacuucaucgcccccgaguacgccuacaagaucgucaaggagggcgacuccgccaucaugaaguccgaggucgaguacggcaacugcaacaccaagugccagacccccaucggcgccaucaacuccuccaugcccuuccacaacauccacccccucaccaucggcgagugccccaaguacgucaaguccaacaagcucguccucgccaccggccuccgcaacuccccccuccgcgagcgccgccgcaagcgcggccucuucggcgccaucgccggcuucaucgagggcggcuggcagggcauggucgacggcugguacggcuaccaccacuccaacgagcagggcuccggcuacgccgccgacaaggaguccacccagaaggccaucgacggcgucaccaacaaggucaacuccaucaucgacaagaugaacacccaguucgaggccgucggccgcgaguucaacaaccucgagcgccgcaucgagaaccucaacaagaagauggaggacggcuuccucgacgucuggaccuacaacgccgagcuccucguccucauggagaacgagcgcacccucgacuuccacgacuccaacgucaagaaccucuacgacaagguccgccuccagcuccgcgacaacgccaaggagcucggcaacggcugcuucgaguucuaccacaagugcgacaacgagugcauggaguccguccgcaacggcaccuacgacuacccccaguacuccgaggaggcccgccucaagcgcgaggagaucuccggcgucaagcucgaguccaucggcaccuaccagauccucuccaucuacuccaccgucgccuccucccucgcccucgccaucauggucgccggccucucccucuggaugugcuccaacggcucccuccagugccgcaucugcaucuga

SEQ ID NO: 105966 - RNA, 1707 nt, Artificial Sequence
  derived and/or modified CDS sequence (opt2) from hemagglutinin__InfluenzaA__AGI02567
auggagaagaucguccuccuccucgccaucgucucccucgucaaguccgaccagaucugcaucggcuaccacgccaacaacuccaccgagcaggucgacaccaucauggagaagaacgucaccgucacccacgcccaggacauccucgagaagacccacaacggcaagcucugcgaccucgacggcgucaagccccucauccuccgcgacugcuccgucgccggcuggcuccucggcaaccccaugugcgacgaguuccucaacguccccgagugguccuacaucgucgagaaggccaaccccgccaacgaccucugcuaccccggcaacuucaacgacuacgaggagcucaagcaccuccucucccgcaucaaccacuucgagaagauccagaucauccccaaguccuccugguccgaccacgaggccuccuccggcgucuccuccgccugccccuaccagggccgcuccuccuucuuccgcaacgucgucuggcucaucaagaagaacaacgccuaccccaccaucaagcgcuccuacaacaacaccaaccaggaggaccuccucguccucuggggcauccaccaccccaacgacgccgccgagcagacccgccucuaccagaaccccaccaccuacaucuccgucggcaccuccacccucaaccagcgccucguccccaagaucgccacccgcuccaaggucaacggccaguccggccgcauggaguucuucuggaccauccucaagcccaacgacgccaucaacuucgaguccaacggcaacuucaucgcccccgaguacgccuacaagaucgucaagaagggcgacuccaccaucaugaaguccgagcucgaguacggcaacugcaacaccaagugccagacccccaucggcgccaucaacuccuccaugcccuuccacaacauccacccccucaccaucggcgagugccccaaguacgucaaguccaaccgccucguccucgccaccggccuccgcaacuccccccagggcgagcgccgccgcaagaagcgcggccucuucggcgccaucgccggcuucaucgagggcggcuggcagggcauggucgacggcugguacggcuaccaccacuccaacgagcagggcuccggcuacgccgccgacaaggaguccacccagaaggccaucgacggcgucaccaacaaggucaacuccaucaucgacaagaugaacacccaguucgaggccgucggccgcgaguucaacaaccucgagcgccgcaucgagaaccucaacaagaagauggaggacggcuuccucgacgucuggaccuacaacgccgagcuccucguccucauggagaacgagcgcacccucgacuuccacgacuccaacgucaagaaccucuacgacaagguccgccuccagcuccgcgacaacgccaaggagcucggcaacggcugcuucgaguucuaccaccgcugcgacaacgagugcauggaguccguccgcaacggcaccuacgacuacccccaguacuccgaggaggcccgccucaagcgcgaggagaucuccggcgucaagcucgaguccaucggcaccuaccagauccucuccaucuacuccaccgucgccuccucccucgcccucgccaucauggucgccggccucucccucuggaugugcuccaacggcucccuccagugccgcaucugcaucuga

SEQ ID NO: 105967 - RNA, 1704 nt, Artificial Sequence
  derived and/or modified CDS sequence (opt2) from hemagglutinin__InfluenzaA__AGI02568
auggagaagaucguccuccuccucgccaucgucucccucgucaaguccgaccagaucugcaucggcuaccacgccaacaacuccaccgagcaggucgacaccaucauggagaagaacgucaccgucacccacgcccaggacauccucgagaagacccacaacggcaagcucugcgaccucgacggcgucaagccccucauccuccgcgacugcuccgucgccggcuggcuccucggcaaccccaugugcgacgaguucaucaacguccccgagugguccuacaucgucgagaaggccaaccccgccaacgaccucugcuaccccggcaacuucaacgacuacgaggagcucaagcaccuccucucccgcaucaaccacuucgagaagauccagaucauccccaaguccuccugguccgaccacgaggccuccuccggcgucuccuccgccugccccuaccagggcacccccuccuucuuccgcaacgucgucuggcucaucaagaagaacaacaccuaccccaccaucaagcgcuccuacaacaacaccaaccaggagaaccuccucauccucuggggcauccaccacuccaacgacgccaccgagcagaucaagcucuaccagaaccccaccaccuacaucuccgucggcaccuccacccucaaccagcgccucguccccaagaucggcacccgcuccaaggucaacggccaguccggccgcauggacuucuucuggaccauccucaagcccaacgacgccaucaacuucgaguccaacggcaacuucaucgcccccgaguacgccuacaagaucgucaaggagggcgacuccgccaucaugaaguccgaggucgaguacggcaacugcaacaccaagugccagacccccaucggcgccaucaacuccuccaugcccuuccacaacauccacccccucaccaucggcgagugccccaaguacgucaaguccaacaagcucguccucgccaccggccuccgcaacuccccccuccgcgagcgccgccgcaagcgcggccucuucggcgccaucgccggcuucaucgagggcggcuggcagggcauggucgacggcugguacggcuaccaccacuccaacgagcagggcuccggcuacgccgccgacaaggaguccacccagaaggccaucgacggcgucaccaacaaggucaacuccaucaucgacaagaugaacacccaguucgaggccgucggccgcgaguucaacaaccucgagcgccgcaucgagaaccucaacaagaagauggaggacggcuuccucgacgucuggaccuacaacgccgagcuccucguccucauggagaacgagcgcacccucgacuuccacgacuccaacgucaagaaccucuacgacaagguccgccuccagcuccgcgacaacgccaaggagcucggcaacggcugcuucgaguucuaccacaagugcgacaacgagugcauggaguccguccgcaacggcaccuacgacuacccccaguacuccgaggaggcccgccucaagcgcgaggagaucuccggcgucaagcucgaguccaugggcaucuaccagauccucuccaucuacuccaccgucgccuccucccucgcccucgccaucauggucgccggccucucccucuggaugugcuccaacggcucccuccagugccgcaucugcaucuga

SEQ ID NO: 105968 - RNA, 1683 nt, Artificial Sequence
  derived and/or modified CDS sequence (opt2) from hemagglutinin__InfluenzaA__AGI60301
augaacacccagauccucgucuucgcccucaucgccaucauccccaccaacgccgacaagaucugccucggccaccacgccgucuccaacggcaccaaggucaacacccucaccgagcgcggcgucgaggucgucaacgccaccgagaccgucgagcgcaccaacaucccccgcaucugcuccaagggcaagcgcaccgucgaccucggccagugcggccuccucggcaccaucaccggccccccccagugcgaccaguuccucgaguucuccgccgaccucaucaucgagcgccgcgagggcuccgacgucugcuaccccggcaaguucgucaacgaggaggcccuccgccagauccuccgcgaguccggcggcaucgacaaggaggccaugggcuucaccuacuccggcauccgcaccaacggcgccaccuccgccugccgccgcuccggcuccuccuucuacgccgagaugaaguggcuccucuccaacaccgacaacgccgccuucccccagaugaccaaguccuacaagaacacccgcaagucccccgcccucaucgucuggggcauccaccacuccgucuccaccgccgagcagaccaagcucuacggcuccggcaacaagcucgucaccgucggcuccuccaacuaccagcaguccuucguccccucccccggcgcccgcccccaggucaacggcaucuccggccgcaucgacuuccacuggcucaugcucaaccccaacgacaccgucaccuucuccuucaacggcgccuucaucgcccccgaccgcgccuccuuccuccgcggcaaguccaugggcauccaguccggcguccaggucgacgccaacugcgagggcgacugcuaccacuccggcggcaccaucaucuccaaccuccccuuccagaacaucgacucccgcgccgucggcaagugcccccgcuacgucaagcagcgcucccuccuccucgccaccggcaugaagaacguccccgagauccccaagggccgcggccucuucggcgccaucgccggcuucaucgagaacggcugggagggccucaucgacggcugguacggcuuccgccaccagaacgcccagggcgagggcaccgccgccgacuacaaguccacccaguccgccaucgaccagaucaccggcaagcucaaccgccucaucgagaagaccaaccagcaguucgagcucaucgacaacgaguucaacgaggucgagaagcagaucggcaacgucaucaacuggacccgcgacuccaucaccgaggucugguccuacaacgccgagcuccucgucgccauggagaaccagcacaccaucgaccucgccgacuccgagauggacaagcucuacgagcgcgucaagcgccagcuccgcgagaacgccgaggaggacggcaccggcugcuucgagaucuuccacaagugcgacgacgacugcauggccuccauccgcaacaacaccuacgaccacuccaaguaccgcgaggaggccaugcagaaccgcauccagaucgaccccgucaagcucuccuccggcuacaaggacgucauccucugguucuccuucggcgccuccugcuucauccuccucgccaucgucaugggccucgucuucaucugcgucaagaacggcaacaugcgcugcaccaucugcaucuga

SEQ ID NO: 105969 - RNA, 1683 nt, Artificial Sequence
  derived and/or modified CDS sequence (opt2) from hemagglutinin__InfluenzaA__AGJ72861
augaacacccagauccucgucuucgcccucaucgccaucauccccaccaacgccgacaagaucugccucggccaccacgccgucuccaacggcaccaaggucaacacccucaccgagcgcggcggcgaggucgucaacgccaccgagaccgucgagcgcaccaacaucccccgcaucugcuccaagggcaagaagaccgucgaccucggccagggcggcccccgcggcaccaucaccggccccccccagugcgaccaguuccucgaguucuccgccgaccucaucauggagcgccgcgagggcuccgacgucugcuaccccggcaaguucgucaacgaggaggcccuccgccagauccuccgcgaguccggcggcaucgacaaggaggccaugggcuucaccuacuccggcauccgcaccaacggcgccaccuccgccugccgccgcuccggcuccuccuucuacgccgagaugaaguggcuccucuccaacaccgacaacgccgccuucccccagaugaccaaguccuacaagaacacccgcaagucccccgcccucaucgucuggggcauccaccacuccgucuccaccgccgagcagaccaagcucuacggcuccggcaacaagcucgucaccgucggcuccuccaacuaccagcaguccuucguccccucccccggcgcccgcccccaggucaacggccaguccggccgcaucgacuuccacuggcucaugcucaaccccaacgacaccgucaccuucuccuucaacggcgccuucaucgcccccgaccgcgccuccuuccuccgcggcaaguccaugggcauccaguccggcguccaggucgacgccaacugcgagggcgacugcuaccacuccggcggcaccaucaucuccaaccuccccuuccagaacaucgacucccgcgccgucggcaagugcccccgcuacgucaagcagcgcucccuccuccucgccaccggcaugaagaacguccccgagauccccaagggccgcggccucuucggcgccaucgccggcuucaucgagaacggcugggagggccucaucgacggcugguacggcuuccgccaccagaacgcccagggcgagggcaccgccgccgacuacaaguccacccaguccgccaucgaccagaucaccggcaagcucaaccgccucaucgagaagaccaaccagcaguucgagcucaucgacaacgaguucaacgaggucgagaagcagaucggcaacgucaucaacuggacccgcgacuccaucaccgaggucugguccuacaacgccgagcuccucgucgccauggagaaccagcacaccaucgaccucgccgacuccgagauggacaagcucuacgagcgcgucaagcgccagcuccgcgagaacgccgaggaggacggcaccggcugcuucgagaucuuccacaagugcgacgacgacugcauggccuccauccgcaacaacaccuacgaccacuccaaguaccgcgaggaggccaugcagaaccgcauccagaucgaccccgucaagcucuccuccggcuacaaggacgucauccucugguucuccuucggcgccuccugcuucauccuccucgccaucgucaugggccucgucuucaucugcgucaagaacggcaacaugcgcugcaccaucugcaucuga

SEQ ID NO: 105970 - RNA, 1701 nt, Artificial Sequence
  derived and/or modified CDS sequence (opt2) from hemagglutinin__InfluenzaA__AGJ73327
augaaggccauccucgucguccuccucuacaccuucgccaccgccaacgccgacacccucugcaucggcuaccacgccaacaacuccaccgacaccgucgacaccguccucgagaagaacgucaccgucacccacuccgucaaccuccucgaggacaagcacaacggcaagcucugcaagcuccgcggcgucgccccccuccaccucggcaagugcaacaucgccggcuggauccucggcaaccccgagugcgagucccucuccaccgccuccuccugguccuacaucgucgagaccuccuccuccgacaacggcaccugcuaccccggcgacuucaucaacuacgaggagcuccgcgagcagcucuccuccgucuccuccuucgagcgcuucgagaucuuccccaagaccuccuccuggcccaaccacgacuccaacaagggcgucaccgccgccugcccccacgccggcgccaaguccuucuacaagaaccucaucuggcucgucaagaagggcaacuccuaccccaagcucuccaaguccuacaucaacgacaagggcaaggagguccucguccucuggggcauccaccaccccuccaccaccgccgaccaccagucccucuaccagaacgccgacgccuacgucuucgucggcaccucccgcuacuccaagaaguucaagcccgagaucgccauccgccccaagguccgcgaccaggagggccgcaugaacuacuacuggacccucaucgagcccggcgacaagaucaccuucgaggccaccggcaaccucgucgucccccgcuacgccuucgccauggagcgcaacgccggcuccggcaucaucauccccgacacccccguccacgacugcaacaccaccugccagacccccaagggcgccaucaacaccucccuccccuuccagaacauccaccccaucaccaucggcaagugccccaaguacgucaaguccaccaagcuccgccucgccaccggccuccgcaacguccccuccauccagucccgcggccucuucggcgccaucgccggcuucaucgagggcggcuggaccggcauggucgacggcugguacggcuaccaccaccagaacgagcagggcuccggcuacgccgccgaccucaaguccacccagaacgccaucgacaagaucaccaacaaggucaacuccgucaucgagaagaugaacacccaguucaccgccgucggcaaggaguucaaccaccucgagaagcgcaucgagaaccucaacaagaagcucgacgacggcuuccucgacaucuggaccuacaacgccgagcuccucguccuccucgagaacgagcgcacccucgacuaccacgacuccaacgucaagaaccucuacgagaagguccgcaaccagcucaagaacaacgccaaggagaucggcaacggcugcuucgaguucuaccacaagugcgacaacaccugcauggaguccgucaagaacggcaccuacgacuaccccaaguacuccgaggaggccaagcucaaccgcgagaagaucgacggcgucaagcucgaguccacccgcaucuaccagauccucgccaucuacuccaccgucgccuccucccucguccucgucgucucccucggcgagaucuccuucuggaugugcuccaacggcucccuccagugccgcaucugcaucuga

SEQ ID NO: 105971 - RNA, 1701 nt, Artificial Sequence
  derived and/or modified CDS sequence (opt2) from hemagglutinin__InfluenzaA__AGJ73329
augaaggccauccucgucguccuccucuacaccuucgccaccgccaacgccgacacccucugcaucggcuaccacgccaacaacuccaccgacaccgucgacaccguccucgagaagaacgucaccgucacccacuccgucaaccuccucgaggacaagcacaacggcaagcucugcaagcuccgcggcgucgccccccuccaccucggcaagugcaacaucgccggcuggauccucggcaaccccgagugcgagucccucuccaccgccuccuccugguccuacaucgucgagaccuccuccuccgacaacggcaccugcuaccccggcgacuucaucgacuacgaggagcuccgcgagcagcucuccuccgucuccuccuucgagcgcuucgagaucuuccccaagaccuccuccuggcccaaccacgacuccaacaagggcgucaccgccgccugcccccacgccggcgccaagggcuucuacaagaaccucaucuggcucgucaagaagggcaacuccuaccccaagcucuccaaguccuacaucaacgacaagggcaaggagguccucguccucuggggcauccaccaccccuccaccaccgccgaccagcagucccucuaccagaacgccgacaccuacgucuucgucggcaccucccgcuacuccaagaaguucaagcccgagaucgccauccgccccaagguccgcgaccaggagggccgcaugaacuacuacuggacccucgucgagcccggcgacaagaucaccuucgaggccaccggcaaccucgucgucccccgcuacgccuucgccauggagcgcaacgccggcuccggcaucaucaucuccgacgcccccguccacgacugcaacaccaccugccagacccccaagggcgccaucaacaccucccuccccuuccagaacauccaccccaucaccaucggcaagugccccaaguacgucaaguccaccaagcuccgccucgccaccggccuccgcaacguccccuccauccagucccgcggccucuucggcgccaucgccggcuucaucgagggcggcuggaccggcauggucgacggcugguacggcuaccaccaccagaacgagcagggcuccggcuacgccgccgaccucaaguccacccagaacgccaucgacaagaucaccaacaaggucaacuccgucaucgagaagaugaacacccaguucaccgccgucggcaaggaguucaaccaccucgagaagcgcaucgagaaccucaacaagaaggucgacgacggcuuccucgacaucuggaccuacaacgccgagcuccucguccuccucgagaacgagcgcacccucgacuaccacgacuccaacgucaagaaccucuacgagaagguccgcaaccagcucaagaacaacgccaaggagaucggcaacggcugcuucgaguucuaccacaagugcgacaacaccugcauggaguccgucaagaacggcaccuacgacuaccccaaguacuccgaggaggccaagcucaaccgcgaggagaucgacggcgucaagcucgaguccacccgcaucuaccagauccucgccaucuacuccaccgucgccuccucccucguccucgucgucucccucggcgccaucuccuucuggaugugcuccaacggcucccuccagugccgcaucugcaucuga

SEQ ID NO: 105972 - RNA, 1701 nt, Artificial Sequence
  derived and/or modified CDS sequence (opt2) from hemagglutinin__InfluenzaA__AGJ73331
augaaggccauccucgucguccuccucuacaccuucgccaccgccaacgccgacacccucugcaucggcuaccacgccaacaacuccaccgacaccgucgacaccguccucgagaagaacgucaccgucacccacuccgucaaccuccucgaggacaagcacaacggcaagcucugcaagcuccgcggcgucgccccccuccaccucggcaagugcaacaucgccggcuggauccucggcaaccccgagugcgagucccucuccaccgccuccuccugguccuacaucgucgagaccuccuccuccgacaacggcaccugcuaccccggcgacuucaucgacuacgaggagcuccgcgagcagcucuccuccgucuccuccuucgagcgcuucgagaucuuccccaagaccuccuccuggcccaaccacgacuccaacaagggcgucaccaccgccugcccccacgccggcgccaaguccuucuacaagaaccucaucuggcucgucaagaagggcaacuccuaccccaagcucuccaaguccuacaucaacgacaagggcaaggagguccucguccucuggggcauccaccacccccccaccuccgccgaccagcagucccucuaccagaacgccgacgccuacgucuucgucggcaccucccgcuacuccaagaaguucaagcccgagaucgccauccgccccaagguccgcggccaggagggccgcaugaacuacuacuggacccucgucgagcccggcgacaagaucaccuucgaggccaccggcaaccucgucgucccccgcuacgccuucgccauggagcgcaacgccggcuccggcaucaucaucuccgacacccccguccacgacugcaacaccaccugccagacccccaagggcgccaucaacaccucccuccccuuccagaacauccaccccaucaccaucggcaagugccccaaguacgucaaguccaccaagcuccgccucgccaccggccuccgcaacguccccuccauccagucccgcggccucuucggcgccaucgccggcuucaucgagggcggcuggaccggcauggucgacggcugguacggcuaccaccaccagaacgagcagggcuccggcuacgccgccgaccucaaguccacccagaacgccaucgacgagaucaccaacaaggucaacuccgucaucgagaagaugaacacccaguucaccgccgucggcaaggaguucaaccaccucgagaagcgcaucgagaaccucaacaagaaggucgacgacggcuuccucgacaucuggaccuacaacgccgagcuccucguccuccucgagaacgagcgcacccucgacuaccacgacuccaaggucaagaaccucuacgagaagguccgcucccagcucaagaacaacgccaaggagaucggcaacggcugcuucgaguucuaccacaagugcgacaacaccugcauggaguccgucaagaacggcaccuacgacuaccccaaguacuccgaggaggccaagcucaaccgcgaggagaucgacggcgucaagcucgaguccacccgcaucuaccagauccucgccaucuacuccaccgucgccuccucccucguccucgucgucucccucggcgccaucuccuucuggaugugcuccaacggcucccuccagugccgcaucugcaucuga

SEQ ID NO: 105973 - RNA, 1701 nt, Artificial Sequence
  derived and/or modified CDS sequence (opt2) from hemagglutinin__InfluenzaA__AGJ73333
augaaggccauccucgucguccuccucuacaccuucgccaccgccaacgccgacacccucugcaucggcuaccacgccaacaacuccaccgacaccgucgacaccguccucgagaagaacgucaccgucacccacuccgucaaccuccucgaggacaagcacaacggcaagcucugcaagcuccgcggcgucgccccccuccaccucggcaagugcaacaucgccggcuggauccucggcaaccccgagugcgagucccucuccaccgccuccuccugguccuacaucgucgagaccuccuccuccgacaacggcaccugcuaccccggcgacuucaucgacuacgaggagcuccgcgagcagcucuccuccgucuccuccuucgagcgcuucgagaucuuccccaagaccuccuccuggcccaaccacgacuccaacaagggcgucaccgccgccugcccccacgccggcgccaagggcuucuacaagaaccucaucuggcucgucaagaagggcaacuccuaccccaagcucuccaaguccuacaucaacgacaagggcaaggagguccucguccucuggggcauccaccaccccuccaccuccgccgaccagcagucccucuaccagaacgccgacaccuacgucuucgucggcaccucccgcuacuccaagaaguucaagcccgagaucgccauccgccccaagguccgcgaccaggagggccgcaugaacuacuacuggacccucgucgagcccggcgacaagaucaccuucgaggccaccggcaaccucgucgucccccgcuacgccuucgccauggagcgcaacgccggcuccggcaucaucaucuccgacacccccguccacgacugcaacaccaccugccagacccccaagggcgccaucaacaccucccuccccuuccagaacauccaccccaucaccaucggcaagugccccaaguacgucaaguccaccaagcuccgccucgccaccggccuccgcaacguccccuccauccagucccgcggccucuucggcgccaucgccggcuucaucgagggcggcuggaccggcauggucgacggcugguacggcuaccaccaccagaacgagcagggcuccggcuacgccgccgaccucaaguccacccagaacgccaucgacaagaucaccaacaaggucaacuccgucaucgagaagaugaacacccaguucaccgccgucggcaaggaguucaaccaccucgagaagcgcaucgagaaccucaacaagaaggucgacgacggcuuccucgacaucuggaccuacaacgccgagcuccucguccuccucgagaacgagcgcacccucgacuaccacgacuccaacgucaagaaccucuacgagaagguccgcaaccagcucaagaacaacgccaaggagaucggcaacggcugcuucgaguucuaccacaagugcgacaacaccugcauggaguccgucaagaacggcaccuacgacuaccccaaguacuccgaggaggccaagcucaaccgcgaggagaucgacggcgucaagcucgaguccacccgcaucuaccagauccucgccaucuacuccaccgucgccuccucccucguccucgucgucucccucggcgccaucuccuucuggaugugcuccaacggcucccuccagugccgcaucugcaucuga

SEQ ID NO: 105974 - RNA, 1701 nt, Artificial Sequence
  derived and/or modified CDS sequence (opt2) from hemagglutinin__InfluenzaA__AGJ73335
augaaggccauccucgucguccuccucuacaccuucgccaccgccaacgccgacacccucugcaucggcuaccacgccaacaacuccaccgacaccgucgacaccguccucgagaagaacgucaccgucacccacuccgucaaccuccucgaggacaagcacaacggcaagcucugcaagcuccgcggcgucgccccccuccaccucggcaagugcaacaucgccggcuggauccucggcaaccccgagugcgagucccucuccaccgccuccuccugguccuacaucgucgagaccuccuccuccgacaacggcaccugcuaccccggcgacuucaucgacuacgaggagcuccgcgagcagcucuccuccgucuccuccuucgagcgcuucgagaucuuccccaagaccuccuccuggcccaaccacgacuccaacaagggcgucaccgccgccugcccccacgccggcgccaaguccuucuacaagaaccucaucuggcucgucaagaagggcaacuccuaccccaagcucuccaaguccuacaucaacgacaagggcaaggagguccucguccucuggggcauccaccaccccuccaccaccgccgaccagcagucccucuaccagaacgccgacaccuacgucuucgucggcaccucccgcuacuccaagaaguucaagcccgagaucgccauccgccccaagguccgcgaccaggagggccgcaugaacuacuacuggacccucgucgagccccgcgacaagaucaccuucgaggccaccggcaaccucgucgucccccgcuacgccuucgccauggagcgcaacgccggcuccggcaucaucaucuccgacacccccguccacgacugcaacaccaccugccagacccccaagggcgccaucaacaccucccuccccuuccagaacauccaccccaucaccaucggcaagugccccaaguacgucaaguccaccaagcuccgccucgccaccggccuccgcaacguccccuccauccagucccgcggccucuucggcgccaucgccggcuucaucgagggcggcuggaccggcauggucgacggcugguacggcuaccaccaccagaacgagcagggcuccggcuacgccgccgaccucaaguccacccagaacgccaucgacaagaucaccaacaaggucaacuccgucaucgagaagaugaacacccaguucaccgccgucggcaaggaguucaaccaccucgagaagcgcaucgagaaccucaacaagaaggucgacgacggcuuccucgacaucuggaccuacaacgccgagcuccucguccuccucgagaacgagcgcacccucgacuaccacgacuccaacgucaagaaccucuacgagaagguccgcaaccagcucaagaacaacgccaaggagaucggcaacggcugcuucgaguucuaccacaagugcgacaacaccugcauggaguccgucaagaacggcaccuacgacuaccccaaguacuccgaggaggccaagcucaaccgcgaggagaucgacggcgucaagcucgaguccacccgcaucuaccagauccucgccaucuacuccaccgucgccuccucccucguccucgucgucucccucggcgccaucuccuucuggaugugcuccaacggcucccuccagugccgcaucugcaucuga

SEQ ID NO: 105975 - RNA, 1701 nt, Artificial Sequence; identical to SEQ ID NO: 102490
  derived and/or modified CDS sequence (opt2) from hemagglutinin__InfluenzaA__AGJ73337

SEQ ID NO: 105976 - RNA, 1701 nt, Artificial Sequence; identical to SEQ ID NO: 102490
  derived and/or modified CDS sequence (opt2) from hemagglutinin__InfluenzaA__AGJ73339

SEQ ID NO: 105977 - RNA, 1701 nt, Artificial Sequence; identical to SEQ ID NO: 102490
  derived and/or modified CDS sequence (opt2) from hemagglutinin__InfluenzaA__AGJ73341

SEQ ID NO: 105978 - RNA, 1701 nt, Artificial Sequence
  derived and/or modified CDS sequence (opt2) from hemagglutinin__InfluenzaA__AGJ73343
augaaggccauccucgucguccuccucuacaccuucgccaccgccaacgccgacacccucugcaucggcuaccacgccaacaacuccaccgacaccgucgacaccguccucgagaagaacgucaccgucacccacuccgucaaccuccucgaggacaagcagaacggcaagcucugcaagcuccgcggcgucgccccccuccaccucggcaagugcaacaucgccggcuggauccucggcaaccccgagugcgagucccucuccaccgccuccuccugguccuacaucgucgagaccuccuccuccgacaacggcaccugcuaccccggcgacuucaucaacuacgaggagcuccgcgagcagcucuccuccgucuccuccuucgagcgcuucgagaucuuccccaagaccuccuccuggcccaaccacgacuccaacaagggcgucaccgccgccugcccccacgccggcgccaaguccuucuacaagaaccucaucuggcucgucaagaagggcaacuccuaccccaagcucuccaaguccuacaucaacgacaagggcaaggagguccucguccucuggggcauccaccaccccuccaccuccgccgaccagcagucccucuaccagaacgccgacgccuacgucuucgucggcaccuccaaguacuccaagaaguucaagcccgagaucgccguccgccccaagguccgcgaccaggagggccgcaugaacuacuacuggacccucgucgagcccggcgacaagaucaccuucgaggccaccggcaaccuccucgucccccgcuacgccuucgccauggagcgcaacgccggcuccggcaucaucaucuccgacacccccguccacgacugcaacaccaccugccagacccccaagggcgccaucaacaccucccuccccuuccagaacauccaccccaucaccaucggcaagugccccaaguacgucaaguccaccaagcuccgccucgccaccggccuccgcaacguccccuccauccagucccgcggccucuucggcgccaucgccggcuucaucgagggcggcuggaccggcauggucgacggcugguacggcuaccaccaccagaacgagcagggcuccggcuacgccgccgaccucaaguccacccagaacgccaucgacaagaucaccaacaaggucaacuccgucaucgagaagaugaacacccaguucaccgccgucggcaaggaguucaaccaccucgagaagcgcaucgagaaccucaacaagaaggucgacgacggcuuccucgacaucuggaccuacaacgccgagcuccucguccuccucgagaacgagcgcacccucgacuaccacgacuccaacgucaagaaccucuacgagaagguccgcucccagcucaagaacaacgccaaggagaucggcaacggcugcuucgaguucuaccacaagugcgacaacaccugcauggaguccgucaagaacggcaccuacgacuaccccaaguacuccgaggaggccaagcucaaccgcgaggagaucgacggcgucaagcucgaguccacccgcaucuaccagauccucgccaucuacuccaccgucgccuccucccucguccucgucgucucccucggcgccaucuccuucuggaugugcuccaacggcucccuccagugccgcaucugcaucuga

SEQ ID NO: 105979 - RNA, 1701 nt, Artificial Sequence
  derived and/or modified CDS sequence (opt2) from hemagglutinin__InfluenzaA__AGJ73345
augaaggccauccucgucguccuccucuacaccuucgccaccgccaacgccgacacccucugcaucggcuaccacgccaacaacuccaccgacaccgucgacaccguccucgagaagaacgucaccgucacccacuccgucaaccuccucgaggacaagcacaacggcaagcucugcaagcuccgcggcgucgccccccuccaccucggcaagugcaacaucgccggcuggauccucggcaaccccgagugcgagucccucuccaccgccuccuccugguccuacaucgucgagaccuccuccuccgacaacggcaccugcuaccccggcgacuucaucaacuacgaggagcuccgcgagcagcucuccuccgucuccuccuucgagcgcuucgagaucuuccccaagaccuccuccuggcccaaccacgacuccaacaagggcgucaccgccgccugcccccacgccggcgccaaguccuucuacaagaaccucaucuggcucgucaagaagggcaacuccuaccccaagcucuccaaguccuacaucaacgacaagggcaaggagguccucguccucuggggcauccaccaccccuccaccuccgccgaccagcagucccucuaccagaacgaggacgccuacgucuucgucggcaccuccaaguacuccaagaaguucaagcccgagaucgccguccgccccaagguccgcgaccaggagggccgcaugaacuacuacuggacccucgucgagcccggcaacaagaucaccuucgaggccaccggcaaccuccucgucccccgcuacgccuucgccauggagcgcaacgccggcuccggcaucaucaucuccgacacccccguccacgacugcaacaccaccugccagacccccaagggcgccaucaacaccucccuccccuuccagaacauccaccccaucaccaucggcaagugccccaaguacgucaaguccaccaagcuccgccucgccaccggccuccgcaacguccccuccauccagucccgcggccucuucggcgccaucgccggcuucaucgagggcggcuggaccggcauggucgacggcugguacggcuaccaccaccagaacgagcagggcuccggcuacgccgccgaccucaaguccacccagaacgccaucgacaagaucaccaacaaggucaacuccgucaucgagaagaugaacacccaguucaccgccgucggcaaggaguucaaccaccucgagaagcgcaucgagaaccucaacaagaaggucgacgacggcuuccucgacaucuggaccuacaacgccgagcuccucguccuccucgagaacgagcgcacccucgacuaccacgacuccaacgucaagaaccucuacgagaagguccgcucccagcucaagaacaacgccaaggagaucggcaacggcugcuucgaguucuaccacaagugcgacaacaccugcauggaguccgucaagaacggcaccuacgacuaccccaaguacuccgaggaggccaagcucaaccgcgaggagaucgacggcgucaagcucgaguccacccgcaucuaccagauccucgccaucuacuccaccgucgccuccucccucguccucgucgucucccucggcgccaucuccuucuggaugugcuccaacggcucccuccagugccgcaucugcaucuga

SEQ ID NO: 105980 - RNA, 1701 nt, Artificial Sequence; identical to SEQ ID NO: 103086
  derived and/or modified CDS sequence (opt2) from hemagglutinin__InfluenzaA__AGJ73347

SEQ ID NO: 105981 - RNA, 1701 nt, Artificial Sequence; identical to SEQ ID NO: 103086
  derived and/or modified CDS sequence (opt2) from hemagglutinin__InfluenzaA__AGJ73349

SEQ ID NO: 105982 - RNA, 1701 nt, Artificial Sequence
  derived and/or modified CDS sequence (opt2) from hemagglutinin__InfluenzaA__AGJ73351
augaaggccauccucgucguccuccucuacaccuucgccaccgccaacgccgacacccucugcaucggcuaccacgccaacaacuccaccgacaccgucgacaccguccucgagaagaacgucaccgucacccacuccgucaaccuccucgaggacaagcacaacggcaagcucugcaagcuccgcggcgucgccccccuccaccucggcaagugcaacaucgccggcuggauccucggcaaccccgagugcgagucccucuccaccgccuccuccugguccuacaucgucgagaccuccuccuccgacaacggcaccugcuaccccggcgacuucaucgacuacgaggagcuccgcgagcagcucuccuccgucuccuccuucgagcgcuucgagaucuuccccaagaccuccuccuggcccaaccacgacuccaacaagggcgucaccgccgccugcccccacgccggcgccaagggcuucuacaagaaccucaucuggcucgucaagaagggcaacuccuaccccaagcucuccaaguccuacaucaacgacaagggcaaggagguccucguccucuggggcauccaccaccccuccaccaccgccgaccagcagucccucuaccagaacgccgacaccuacgucuucgucggcaccucccgcuacuccaagaaguucaagcccgagaucgccauccgccccaagaugcgcgaccaggagggccgcaugaacuacuacuggacccucgucgagcccggcgacaagaucaccuucgaggccaccggcaaccucgucgucccccgcuacgccuucgccauggagcgcaacgccggcuccggcaucaucaucuccgacacccccguccacgacugcaacaccaccugccagacccccaagggcgccaucaacaccucccuccccuuccagaacauccaccccaucaccaucggcaagugccccaaguacgucaaguccaccaagcuccgccucgccaccggccuccgcaacguccccuccauccagucccgcggccucuucggcgccaucgccggcuucaucgagggcggcuggaccggcauggucgacggcugguacggcuaccaccaccagaacgagcagggcuccggcuacgccgccgaccucaaguccacccagaacgccaucgacaagaucaccaacaaggucaacuccgucaucgagaagaugaacacccaguucaccgccgucggcaaggaguucaaccaccucgagaagcgcaucgagaaccucaacaagaaggucgacgacggcuuccucgacaucuggaccuacaacgccgagcuccucguccuccucgagaacgagcgcacccucgacuaccacgacuccaacgucaagaaccucuacgagaagguccgcaaccagcucaagaacaacgccaaggagaucggcaacggcugcuucgaguucuaccacaagugcgacaacaccugcauggaguccgucaagaacggcaccuacgacuaccccaaguacuccgaggaggccaagcucaaccgcgaggagaucgacggcgucaagcucgaguccacccgcaucuaccagauccucgccaucuacuccaccgucgccuccucccucguccucgucgucucccucggcgccaucuccuucuggaugugcuccaacggcucccuccagugccgcaucugcaucuga

SEQ ID NO: 105983 - RNA, 1701 nt, Artificial Sequence
  derived and/or modified CDS sequence (opt2) from hemagglutinin__InfluenzaA__AGJ73353
augaaggccauccucgucguccuccucuacaccuucgccaccgccaacgccgacacccucugcaucggcuaccacgccaacaacuccaccgacaccgucgacaccguccucgagaagaacgucaccgucacccacuccgucaaccuccucgaggacaagcacaacggcaagcucugcaagcuccgcggcgucgccccccuccaccucggcaagugcaacaucgccggcuggauccucggcaaccccgagugcgagucccucuccaccgccuccuccugguccuacaucgucgagaccuccuccuccgacaacggcaccugcuaccccggcgacuucaucaacuacgaggagcuccgcgagcagcucuccuccgucuccuccuucgagcgcuucgagaucuuccccaagaccuccuccuggcccaaccacgacuccaacaagggcgucaccgccgccugcccccacgccggcgccaaguccuucuacaagaaccucaucuggcucgucaagaagggcaacuccuaccccaagcucuccaaguccuacaucaacgacaagggcaaggagguccucguccucuggggcauccaccaccccuccaccuccgccgaccagcagucccucuaccagaacgccgacgccuacgucuucgucggcaccuccaaguacuccaagaaguucaagcccgagaucgccguccgccccaagguccgcgaccaggagggccgcaugaacuacuacuggacccucgucgagcccggcgacaagaucaccuucgaggccaccggcaaccuccucgucccccgcuacgccuucgccauggagcgcaacgccggcuccggcaucaucaucuccgacacccccguccacgacugcaacaccaccugccagacccccaagggcgccaucaacaccucccuccccuuccaguccauccaccccaucaccaucggcaagugccccaaguacgucaaguccaccaagcuccgccucgccaccggccuccgcaacguccccuccauccagucccgcggccucuucggcgccaucgccggcuucaucgagggcggcuggaccggcauggucgacggcugguacggcuaccaccaccagaacgagcagggcuccggcuacgccgccgaccucaaguccacccagaacgccaucgacaagaucaccaacaaggucaacuccgucaucgagaagaugaacacccaguucaccgccgucggcaaggaguucaaccaccucgagaagcgcaucgagaaccucaacaagaaggucgacgacggcuuccucgacaucuggaccuacaacgccgagcuccucguccuccucgagaacgagcgcacccucgacuaccacgacuccaacgucaagaaccucuacgagaagguccgcucccagcucaagaacaacgccaaggagaucggcaacggcugcuucgaguucuaccacaagugcgacaacaccugcauggaguccgucaagaacggcaccuacgacuaccccaaguacuccgaggaggccaagcucaaccgcgaggagaucgacggcgucaagcucgaguccacccgcaucuaccagauccucgccaucuacuccaccgucgccuccucccucguccucgucgucucccucggcgccaucuccuucuggaugugcuccaacggcucccuccagugccgcaucugcaucuga

SEQ ID NO: 105984 - RNA, 1701 nt, Artificial Sequence
  derived and/or modified CDS sequence (opt2) from hemagglutinin__InfluenzaA__AGJ73355
augaaggccauccucgucguccuccucuacaccuucgccaccgccaacgccgacacccucugcaucggcuaccacgccaacaacuccaccgacaccgucgacaccguccucgagaagaacgucaccgucacccacuccgucaaccuccucgaggacaagcacaacggcaagcucugcaagcuccgcggcgucgccccccuccaccucggcaagugcaacaucgccggcuggauccucggcaaccccgagugcgagucccucuccaccgccuccuccugguccuacaucgucgagaccuccuccuccgacaacggcaccugcuaccccggcgacuucaucgacuacgaggagcuccgcgagcagcucuccuccgucuccuccuucgagcgcuucgagaucuuccccaagaccuccuccuggcccaaccacgacuccaacaagggcgucaccgccgccugcccccacgccggcgccaagggcuucuacaagaaccucaucuggcucgucaagaagggcaacuccuaccccaagcucuccaaguccuacaucaacgacaagggcaaggagguccucguccucuggggcauccaccaccccuccaccaccgccgaccagcagucccucuaccagaacgccgacaccuacgucuucgucggcaccucccgcuacuccaagaaguucaagcccgagaucgccauccgccccaagguccgcgaccaggagggccgcaugaacuacuacuggacccucgucgagcccggcgacaagaucaccuucgaggccaccggcaaccucgucgucccccgcuacgccuucgccauggagcgcaacgccggcuccggcaucaucaucuccgacacccccguccacgacugcaacaccaccugccagacccccaagggcgccaucaacaccucccuccccuuccagaacauccaccccaucaccaucggcaagugccccaaguacgucaaguccaccaagcuccgccucgccaccggccuccgcaacguccccuccauccagucccgcggccucuucggcgccaucgccggcuucaucgagggcggcuggaccggcauggucgacggcugguacggcuaccaccaccagaacgagcagggcuccggcuacgccgccgaccucaaguccacccagaacgccaucgacaagaucaccaacaaggucaacuccgucaucgagaagaugaacacccaguucaccgccgucggcaaggaguucaaccaccucgagaagcgcaucgagaaccucaacaagaaggucgacgacggcuuccucgacaucuggaccuacaacgccgagcuccucguccuccucgagaacgagcgcacccucgacuaccacgacuccaacgucaagaaccucuacgagaagguccgcaaccagcucaagaacaacgccaaggagaucggcaacggcugcuucgaguucuaccacaagugcgacaacaccugcauggaguccgucaagaacggcaccuacgacuaccccaaguacuccgaggaggccaagcucaaccgcgaggagaucgacggcgucaagcucgaguccacccgcaucuaccagauccucgccaucuacuccaccgucgccuccucccucguccucgucgucucccucggcgccaccuccuucuggaugugcuccaacggcucccuccagugccgcaucugcaucuga

SEQ ID NO: 105985 - RNA, 1701 nt, Artificial Sequence; identical to SEQ ID NO: 102903
  derived and/or modified CDS sequence (opt2) from hemagglutinin__InfluenzaA__AGJ73357

SEQ ID NO: 105986 - RNA, 1701 nt, Artificial Sequence
  derived and/or modified CDS sequence (opt2) from hemagglutinin__InfluenzaA__AGJ73361
augaaggccauccucgucguccuccucuacaccuucgccaccgccaacgccgacacccucugcaucggcuaccacgccaacaacuccaccgacaccgucgacaccguccucgagaagaacgucaccgucacccacuccgucaaccuccucgaggacaagcacaacggcaagcucugcaagcuccgcggcgucgccccccuccaccucggcaagugcaacaucgccggcuggauccucggcaaccccgagugcgagucccucuccaccuccuccuccugguccuacaucgucgagaccuccuccuccgacaacggcaccugcuaccccggcgacuucaucgacuacgaggagcuccgcgagcagcucuccuccgucuccuccuucgagcgcuucgagaucuuccccaagaccuccuccuggcccaaccacgacuccaacaagggcgucaccgccgccugcccccacgccggcgccaagggcuucuacaagaaccucaucuggcucgucaagaagggcaacuccuaccccaagcucuccaaguccuacaucaacgacaagggcaaggagguccucguccucuggggcauccaccaccccuccaccaccgccgaccagcagucccucuaccagaacgccgacaccuacgucuucgucggcaccucccgcuacuccaagaaguucaagcccgagaucgccauccgccccaagguccgcgaccaggagggccgcaugaacuacuacuggacccucgucgagcccggcgacaagaucaccuucgaggccaccggcaaccucgucgucccccgcuacgccuucgccauggagcgcaacgccggcuccggcaucuucaucuccgacacccccguccacgacugcaacaccaccugccagacccccaagggcgccaucaacaccucccuccccuuccagaacauccaccccaucaccaucggcaagugccccaaguacgucaaguccaccaagcuccgccucgccaccggccuccgcaacguccccuccauccagucccgcggccucuucggcgccaucgccggcuucaucgagggcggcuggaccggcauggucgacggcugguacggcuaccaccaccagaacgagcagggcuccggcuacgccgccgaccucaaguccacccagaacgccaucgacaagaucaccaacaaggucaacuccgucaucgagaagaugaacacccaguucaccgccgucggcaaggaguucaaccaccucgagaagcgcaucgagaaccucaacaagaaggucgacgacggcuuccucgacaucuggaccuacaacgccgagcuccucguccuccucgagaacgagcgcacccucgacuaccacgacuccaacgucaagaaccucuacgagaagguccgcaaccagcucaagaacaacgccaaggagaucggcaacggcugcuucgaguucuaccacaagugcgacaacaccugcauggaguccgucaagaacggcaccuacgacuaccccaaguacuccgaggaggccaagcucaaccgcgaggagaucgacggcgucaagcucgaguccacccgcaucuaccagauccucgccaucuacuccaccgucgccuccucccucguccucgucgucucccucggcgccaucuccuucuggaugugcuccaacggcucccuccagugccgcaucugcaucuga

SEQ ID NO: 105987 - RNA, 1701 nt, Artificial Sequence; identical to SEQ ID NO: 103086
  derived and/or modified CDS sequence (opt2) from hemagglutinin__InfluenzaA__AGJ73363

SEQ ID NO: 105988 - RNA, 1701 nt, Artificial Sequence; identical to SEQ ID NO: 102903
  derived and/or modified CDS sequence (opt2) from hemagglutinin__InfluenzaA__AGJ73365

SEQ ID NO: 105989 - RNA, 1701 nt, Artificial Sequence
  derived and/or modified CDS sequence (opt2) from hemagglutinin__InfluenzaA__AGJ73367
augaaggccauccucgucguccuccucuacaccuucgccaccgccaacgccgacacccucugcaucggcuaccacgccaacaacuccaccgacaccgucgacaccguccucgagaagaacgucaccgucacccacuccgucaaccuccucgaggacaagcacaacggcaagcucugcaagcuccgcggcgucgccccccuccaccucggcaagugcaacaucgccggcuggauccucggcaaccccgagugcgagucccucuccaccgccuccuccuggcccuacaucgucgagaccuccuccuccgacaacggcaccugcuaccccggcgacuucaucaacuacgaggagcuccgcgagcagcucuccuccgucuccuccuucgagcgcuucgagaucuuccccaagaccuccuccuggcccaaccacgacuccaacaagggcgucgccgccgccugcccccacgccggcgccaaguccuucuacaagaaccucaucuggcucgucaagaagggcaacuccuaccccaagcucuccaaguccuacaucaacgacaagggcaaggagguccucguccucuggggcauccaccaccccuccaccuccgccgaccagcagucccucuaccagaacgccgacgccuacgucuucgucggcaccuccaaguacuccaagaaguucaagcccgagaucgccguccgccccaagguccgcgaccaggagggccgcaugaacuacuacuggacccucgucgagcccggcgacaagaucaccuucgaggccaccggcaaccuccucgucccccgcuacgccuucgccauggagcgcaacgccggcuccggcaucaucaucuccgacacccccguccaggacugcaacaccaccugccagacccccaagggcgccaucaacaccucccuccccuuccagaacauccaccccaucaccaucggcaagugccccaaguacgucaaguccaccaagcuccgccucgccaccggccuccgcaacguccccuccauccagucccgcggccucuucggcgccaucgccggcuucaucgagggcggcuggaccggcauggucgacggcugguacggcuaccaccaccagaacgagcagggcuccggcuacgccgccgaccucaaguccacccagaacgccaucgacaagaucaccaacaaggucaacuccgucaucgagaagaugaacacccaguucaccgccgucggcaaggaguucaaccaccucgagaagcgcaucgagaaccucaacaagaaggucgacgacggcuuccucgacaucuggaccuacaacgccgagcuccucguccuccucgagaacgagcgcacccucgacuaccacgacuccaacgucaagaaccucuacgagaagguccgcaaccagcucaagaacaacgccaaggagaucggcaacggcugcuucgaguucuaccacaagugcgacaacaccugcauggaguccgucaagaacggcaccuacgacuaccccaaguacuccgaggaggccaagcucaaccgcgaggagaucgacggcgucaagcucgaguccacccgcaucuaccagauccucgccaucuacuccaccgucgccuccucccucguccucgucgucucccucggcgccaucuccuucuggaugugcuccaacggcucccuccagugccgcaucugcaucuga

SEQ ID NO: 105990 - RNA, 1701 nt, Artificial Sequence
  derived and/or modified CDS sequence (opt2) from hemagglutinin__InfluenzaA__AGJ73369
augaaggccauccucgucguccuccucuacaccuucgccaccgccaacgccgacacccucugcaucggcuaccacgccaacaacuccaccgacaccgucgacaccguccucgagaagaacgucaccgucacccacuccgucaaccuccucgaggacaagcacaacggcaagcucugcaagcuccgcggcgucgccccccuccaccucggcaagugcaacaucgccggcuggauccucggcaaccccgagugcgagucccucuccaccgccuccuccugguccuacaucgucgagaccuccuccuccgacaacggcaccugcuaccccggcgacuucaucgacuacgaggagcuccgcgagcagcucuccuccgucuccuccuucgagcgcuucgagaucuuccccaagaccuccuccuggcccaaccacgacuccaacaagggcgucaccgccgccugcccccacgccggcgccaagggcuucuacaagaaccucaucuggcucgucaagaagggcaacuccuaccccaagcucuccaaguccuacaucaacgacaagggcaaggagguccucguccucuggggcauccaccaccccuccaccaccgccgaccagcagucccucuaccagaacgccgacaccuacgucuucgucggcaccucccgcuacuccaagaaguucaagcccgagaucgccauccgccccaagguccgcgaccaggagggccgcaugaacuacuacuggacccucgucgagcccggcgacaagaucaccuucgaggccaccggcaaccucgucgucccccgcuacgccuucgccauggagcgcaacgccggcuccggcaucaucaucuccgacacccccguccacgacugcaacaccaccugccagacccccaagggcgccaucaacaccucccuccccuuccagaacauccaccccaucaccaucggcaagugccccaaguacgucaaguccaccaagcuccgccucgccaccggccuccgcaacguccccuccauccagucccgcggccucuucggcgccaucgccggcuucaucgagggcggcuggaccggcauggucgacggcugguacggcuaccaccaccagaacgagcagggcuccggcuacgccgccgaccucaaguccacccagaacgccaucgacaagaucaccaacaaggucaacuccgucaucgagaagaugaacacccaguucaccgccgucggcaaggaguucaaccaccucgagaagcgcaucgagaaccucaacaagaaggucgacgacggcuuccucgacaucuggaccuacaacgccgagcuccucguccuccucgagaacgagcgcacccucgacuaccacgacuccaacgucaagaaccucuacgagaagguccgcaaccagcucaagaacaacgccaaggagaucggcaacggcugcuucgaguucuaccacaagugcgacaacaccugcauggaguccgucaagaacggcaccuacgacuaccccaaguacuccgccgaggccaagcucaaccgcgaggagaucgacggcgucaagcucgaguccacccgcaucuaccagauccucgccaucuacuccaccgucgccuccucccucguccucgucgucucccucggcgccaucuccuucuggaugugcuccaacggcucccuccagugccgcaucugcaucuga

SEQ ID NO: 105991 - RNA, 1701 nt, Artificial Sequence; identical to SEQ ID NO: 102490
  derived and/or modified CDS sequence (opt2) from hemagglutinin__InfluenzaA__AGJ73371

SEQ ID NO: 105992 - RNA, 1701 nt, Artificial Sequence
  derived and/or modified CDS sequence (opt2) from hemagglutinin__InfluenzaA__AGJ73373
augaaggccauccucgucguccuccucuacaccuucgccaccgccaacgccgacacccucugcaucggcuaccacgccaacaacuccaccgacaccgucgacaccguccucgagaagaacgucaccgucacccacuccgucaaccuccucgaggacaagcacaacggcaagcucugcaagcuccgcggcgucgccccccuccaccucggcaagugcaacaucgccggcuggauccucggcaaccccgagugcgagucccucuccaccgccuccuccugguccuacaucgucgagaccuccuccuccgacaacggcaccugcuaccccggcgacuucaucgacuacgaggagcuccgcgagcagcucuccuccgucuccuccuucgagcgcuucgagaucuuccccaagaccuccuccuggcccaaccacgacuccaacaagggcgucaccgccgccugcccccacgccggcgccaagggcuucuacaagaaccucaucuggcucgucaagaagggcaacuccuaccccaagcucuccaaguccuacaucaacgacaagggcaaggagguccucguccucuggggcauccaccaccccuccaccaccgccgaccagcagucccucuaccagaacgccgacaccuacgucuucgucggcaccucccgcuacuccaagaaguucaagcccgagaucgccauccgccccaagguccgcgaccaggagggccgcaugaacuacuacuggacccucgucgagcccggcgacaagaucaccuucgaggccaccggcaaccucgucgucccccgcuacgccuucgccauggagcgcaacgccggcuccggcaucaucaucuccgacacccccguccacgacugcaacaccaccugccagacccccaagggcgccaucaacaccucccaccccuuccagaacauccaccccaucaccaucggcaagugccccaaguacgucaaguccaccaagcuccgccucgccaccggccuccgcaacguccccuccauccagucccgcggccucuucggcgccaucgccggcuucaucgagggcggcuggaccggcauggucgacggcugguacggcuaccaccaccagaacgagcagggcuccggcuacgccgccgaccucaaguccacccagaacgccaucgacaagaucaccaacaaggucaacuccgucaucgagaagaugaacacccaguucaccgccgucggcaaggaguucaaccaccucgagaagcgcaucgagaaccucaacaagaaggucgacgacggcuuccucgacaucuggaccuacaacgccgagcuccucguccuccucgagaacgagcgcacccucgacuaccacgacuccaacgucaagaaccucuacgagaagguccgcaaccagcucaagaacaacgccaaggagaucggcaacggcugcuucgaguucuaccacaagugcgacaacaccugcauggaguccgucaagaacggcaccuacgacuaccccaaguacuccgaggaggccaagcucaaccgcgaggagaucgacggcgucaagcucgaguccacccgcaucuaccagauccucgccaucuacuccaccgucgccuccucccucguccucgucgucucccucggcgccaucuccuucuggaugugcuccaacggcucccuccagugccgcaucugcaucuga

SEQ ID NO: 105993 - RNA, 1701 nt, Artificial Sequence
  derived and/or modified CDS sequence (opt2) from hemagglutinin__InfluenzaA__AGJ73375
augaaggccauccucgucguccuccucuacaccuucgccaccgccaacgccgacacccucugcaucggcuaccacgccaacaacuccaccgacaccgucgacaccguccucgagaagaacgucaccgucacccacuccgucaaccuccucgaggacaagcacaacggcaagcucugcaagcuccgcggcgucgccccccuccaccucggcaagugcaacaucgccggcuggauccucggcaaccccgagugcgagucccucuccaccgccuccuccugguccuacaucgucgagaccuccuccuccgacaacggcaccugcuaccccggcgacuucaucaacuacgaggagcuccgcgagcagcucuccuccgucuccuccuucgagcgcuucgagaucuuccccgagaccuccuccuggcccaaccacgacuccaacaagggcgucaccgccgccugcccccacgccggcgccaaguccuucuacaagaaccucaucuggcucgucaagaagggcaacuccuaccccaagcucuccaaguccuacaucaacgacaagggcaaggagguccucguccucuggggcauccaccaccccuccaccaccgccgaccagcagucccucuaccagaacgccgacgccuacgucuucgucggcaccucccgcuacuccaagaaguucaagcccgagaucgccauccgccccaagguccgcgaccaggagggccgcaugaacuacuacuggacccucaucgagcccggcgacaagaucaccuucgaggccaccggcaaccucgucgucccccgcuacgccuucgccauggagcgcaacgccggcuccggcaucaucaucuccgacacccccguccacgacugcaacaccaccugccagacccccgagggcgccaucaacaccucccuccccuuccagaacauccaccccaucaccaucggcaagugccccaaguacgucaaguccaccaagcuccgccucgccaccggccuccgcaacguccccuccauccagucccgcggccucuucggcgccaucgccggcuucaucgagggcggcuggaccggcauggucgacggcugguacggcuaccaccaccagaacgagcagggcuccggcuacgccgccgaccucaaguccacccagaacgccaucgacaagaucaccaacaaggucaacuccgucaucgagaagaugaacacccaguucaccgccgucggcaaggaguucaaccaccucgagaagcgcaucgagaaccucaacaagaaggucgacgacggcuuccucgacaucuggaccuacaacgccgagcuccucguccuccucgagaacgagcgcacccucgacuaccacgacuccaacgucaagaaccucuacgagaagguccgcaaccagcucaagaacaacgccaaggagaucggcaacggcugcuucgaguucuaccacaagugcgacaacaccugcauggaguccgucaagaacggcaccuacgacuaccccaaguacuccgaggaggccaagcucaaccgcgaggagaucgacggcgucaagcucgaguccacccgcaucuaccagauccucgccaucuacuccaccgucgccuccucccucguccucgucgucucccucggcgccaucuccuucuggaugugcuccaacggcucccuccagugccgcaucugcaucuga

SEQ ID NO: 105994 - RNA, 1701 nt, Artificial Sequence
  derived and/or modified CDS sequence (opt2) from hemagglutinin__InfluenzaA__AGJ73377
augaaggccauccucgucguccuccucuacaccuucgccaccgccaacgccgacacccucugcaucggcuaccacgccaacaacuccaccgacaccgucgacaccguccucgagaagaacgucaccgucacccacuccgucaaccuccucgaggacaagcacaacggcaagcucugcaagcuccgcggcgucgccccccuccaccucggcaagugcaacaucgccggcuggauccucggcaaccccgagugcgagucccucuccaccgccuccuccugguccuacaucgucgagaccuccuccuccgacaacggcaccugcuaccccggcgacuucaucaacuacgaggagcuccgcgagcagcucuccuccgucuccuccuucgagcgcuucgagaucuuccccaagaccuccuccuggcccaaccacgacuccaacaagggcgucaccgccuccugcccccgcgccggcgccaaguccuucuacaagaaccucaucuggcucgucaagaagggcaacuccuaccccaagcucuccaaguccuacaucaacgacaagggcaaggagguccucguccucuggggcauccaccaccccuccaccaccgccgaccagcagucccucuaccagaacgccgacgccuacgucuucgucggcaccucccgcuacuccaagaaguucaagcccgagaucgccauccgccccaagguccgcgaccaggagggccgcaugaacuacuacuggacccucgucgagcccggcgacaagaucaccuucgaggccaccggcaaccuccucgucccccgcuacgccuucgccauggagcgcaacgccggcuccggcaucaucaucuccgacacccccguccacgacugcaacaccaccugccagacccccaagggcgccaucaacaccucccuccccuuccagaacauccaccccaucaccaucggcaagugccccaaguacgucaaguccaccaagcuccgccucgccaccggccuccgcaacguccccuccauccagucccgcggccucuucggcgccaucgccggcuucaucgagggcggcuggaccggcauggucgacggcugguacggcuaccaccaccagaacgagcagggcuccggcuacgccgccgaccucaaguccacccagaacgccaucgacaagaucaccaacaaggucaacuccgucaucgagaagaugaacacccaguucaccgccgucggcaaggaguucaaccaccucgagaagcgcaucgagaaccucaacaagaaggucgacgacggcuuccucgacaucuggaccuacaacgccgagcuccucguccuccucgagaacgagcgcacccucgacuaccacgacuccaacgucaagaaccucuacgagaagguccgcaaccagcucaagaacaacgccaaggagaucggcaacggcugcuucgaguucaaccacaagugcgacaacaccugcauggaguccgucaagaacggcaccuacgacuaccccaaguacuccgaggaggccaagcucaacaaggaggagaucgacggcgucaagcucgaguccacccgcaucuaccagauccucgccaucuacuccaccgucgccuccucccucguccucgucgucucccucggcgccaucuccuucuggaugugcuccaacggcucccuccagugccgcaucugcaucuga

SEQ ID NO: 105995 - RNA, 1701 nt, Artificial Sequence
  derived and/or modified CDS sequence (opt2) from hemagglutinin__InfluenzaA__AGJ73380
augaaggccauccucgucguccuccucuacaccuucgccaccgccaacgccgacacccucugcaucggcuaccacgccaacaacuccaccgacaccgucgacaccguccucgagaagaacgucaccgucacccacuccgucaaccuccucgaggacaagcacaacggcaagcucugcaagcuccgcggcgucgccccccuccaccucggcaagugcaacaucgccggcuggauccucggcaaccccgagugcgagucccucuccaccgccuccuccugguccuacaucgucgagaccuccuccuccgacaacggcaccugcuaccccggcgacuucaucaacuacgaggagcuccgcgagcagcucuccuccgucuccuccuucgagcgcuucgagaucuuccccaagaccuccuccuggcccaaccacgacuccaacaagggcgucaccgccgccugcccccacgccggcgccaaguccuucuacaagaaccucaucuggcucgucaagaagggcaacuccuaccccaagcucuccaaguccuacaucaacgacaagggcaaggagguccucguccucuggggcauccaccaccccuccaccaccgccgaccagcagucccucuaccagaacgccgacgccuacgucuucgucggcaccucccgcuacuccaagaaguucaagcccgagaucgccauccgccccaagguccgcggccaggagggccgcaugaacuacuacuggacccucaucgagcccggcgacaagaucaccuucgaggccaccggcaaccucgucgucccccgcuacgccuucgccauggagcgcaacgccggcuccggcaucaucaucuccgacacccccguccacgacugcaacuccaccugccagacccccaagggcgccaucaacaccucccuccccuuccagaacauccaccccaucaccaucggcaagugccccaaguacgucaaguccaccaagcuccgccucgccaccggccuccgcaacguccccuccauccagucccgcggccucuucggcgccaucgccggcuucaucgagggcggcuggaccggcauggucgacggcugguacggcuaccaccaccagaacgagcagggcuccggcuacgccgccgaccucaaguccacccagaacgccaucgacaagaucaccaacaaggucaacuccgucaucgagaagaugaacacccaguucaccgccgucggcaaggaguucaaccaccucgagaagcgcaucgagaaccucaacaagaaggucgacgacggcuuccucgacaucuggaccuacaacgccgagcucuucguccuccucgagaacgagcgcacccucgacuaccacgacuccaacgucaaggaccucuacgagaagguccgcaaccagcucaagaacaacgccaaggagaucggcaacggcugcuucgaguucuaccacaagugcgacaacaccugcauggaguccgucaagaacggcaccuacgacuaccccaaguacuccgaggaggccaagcucaaccgcgagaagaucgacggcgucaagcucgaguccacccgcaucuaccagauccucgccaucuacuccaccgucgccuccucccucguccucgucgucucccucggcgccaucuccuucuggaugugcuccaacggcucccuccagugccgcaucugcaucuga

SEQ ID NO: 105996 - RNA, 1701 nt, Artificial Sequence
  derived and/or modified CDS sequence (opt2) from hemagglutinin__InfluenzaA__AGK62991
augaagaccaucaucgcccucuccuacauccucugccucgucuucgcccagaagcuccccggcaacgacaacuccaccgccacccucugccucggccaccacgccguccccaacggcaccaucgucaagaccaucaccaacgaccagaucgaggucaccaacgccaccgagcucguccaguccuccuccaccggcgagaucugcgacuccccccaccagauccucgacggcgagaacugcacccucaucgacgcccuccucggcgacccccagugcgacggcuuccagaacaagaagugggaccucuucgucgagcgcuccaaggccuacuccaacugcuaccccuacgacguccccgacuacgccucccuccgcucccucgucgccuccuccggcacccucgaguucaacaacgaguccuucaacuggaccggcgucacccagaacggcaccuccuccgccugcauccgccgcuccaacuccuccuucuucucccgccucaacuggcucacccaccucaacuucaaguaccccgcccucaacgucaccaugcccaacaacgagcaguucgacaagcucuacaucuggggcguccaccaccccggcaccgacaaggaccagaucuuccucuacgcccaggccuccggccgcaucaccgucuccaccaagcgcucccagcaggccgucauccccaacaucggcucccgcccccgcauccgcaacauccccucccgcaucuccaucuacuggaccaucgucaagcccggcgacauccuccucaucaacuccaccggcaaccucaucgccccccgcggcuacuucaagauccgcuccggcaaguccuccaucaugcgcuccgacgcccccaucggcaagugcaacuccgagugcaucacccccaacggcuccauccccaacgacaagcccuuccagaacgucaaccgcaucaccuacggcgccugcccccgcuacgucaagcaguccacccucaagcucgccaccggcaugcgcaacguccccgagaagcagacccgcggcaucuucggcgccaucgccggcuucaucgagaacggcugggagggcauggucgacggcugguacggcuuccgccaccagaacuccgagggccgcggccaggccgccgaccucaaguccacccaggccgccaucgaccagaucaacggcaagcucaaccgccucaucggcaagaccaacgagaaguuccaccagaucgagaaggaguucuccgaggucgagggccgcauccaggaccucgagaaguacgucgaggacaccaagaucgaccucugguccuacaacgccgagcuccucgucgcccucgagaaccagcacaccaucgaccucaccgacuccgagaugaacaagcucuucgagaagaccaagaagcagcuccgcgagaacgccgaggacaugggcaacggcugcuucaagaucuaccacaagugcgacaacgccugcaucggcuccauccgcaacggcaccuacaaccacgacgucuaccgcgacgaggcccucaacaaccgcuuccagaucaagggcgucgagcucaaguccggcuacaaggacuggauccucuggaucuccuucgccaucuccugcuuccuccucugcgucgcccuccucggcuucaucaugugggccugccagaagggcaacauccgcugcaacaucugcaucuga

SEQ ID NO: 105997 - RNA, 1701 nt, Artificial Sequence
  derived and/or modified CDS sequence (opt2) from hemagglutinin__InfluenzaA__AGK62993
augaagaccaucaucgcccucuccuacauccucugccucgucuucgcccagaagcuccccggcaacgacaacuccaccgccacccucugccucggccaccacgccguccccaacggcaccaucgucaagaccaucaccaacgaccagaucgaggucaccaacgccaccgagcucguccaguccuccuccaccggcgagaucugcaacuccccccaccagauccucgacggcgagaacugcacccucaucgacgcccuccucggcgacccccagugcgacggcuuccagaacaagaagugggaccucuucgucgagcgcuccaaggcccacuccaacugcuaccccuacgacguccccgacuacgccucccuccgcucccucgucgccuccuccggcacccucgaguucaacaacgaguccuucaacuggaccggcgucacccagaacggcaccuccuccgccugcauccgccgcuccaacaacuccuucuucucccgccucaacuggcucacccaccucaacuucaaguaccccgcccucaacgucaccaugcccaacaacgagcaguucgacaagcucuacaucuggggcguccaccaccccggcaccgacaaggaccagaucuuccucuacgcccaggccuccggccgcaucaccgucuccaccaagcgcucccagcaggccgucauccccaacaucggcucccgcccccgcguccgcaacauccccucccgcgucuccaucuacuggaccaucgucaagcccggcgacauccuccucaucaacuccaccggcaaccucaucgccccccgcggcuacuucaagauccgcuccggcaaguccuccaucaugcgcuccgacgcccccaucuccaagugcaacuccgccugcaucaccaccaacggcuccauccccaacgacaagcccuuccagaacgucaaccgcaucaccuacggcgccugcccccgcuacgucaagcagaacacccucaagcucgccaccggcaugcgcaacguccccgagaagcagacccgcggcaucuucggcgccaucgccggcuucaucgagaacggcugggagggcauggucgacggcugguacggcuuccgccaccagaacuccgagggccgcggccaggccgccgaccucaaguccacccaggccgccaucgaccagaucaacggcaagcucaaccgccucaucggcaagaccaacgagaaguuccaccagaucgagaaggaguucuccgaggucgagggccgcauccaggaccucgagaaguacgucgaggacaccaagaucgaccucugguccuacaacgccgagcuccucgucgcccucgagaaccagcacaccaucgaccucaccgacuccgagaugaacaagcucuucgagaagaccaagaagcagcuccgcgagaacgccgaggacaugggcaacggcugcuucaagaucuaccacaagugcgacaacgccugcaucggcuccauccgcaacggcaccuacgaccacgacgucuaccgcgacgaggcccucaacaaccgcuuccagaucaagggcgucgagcucaaguccggcuacaaggacuggauccucuggaucuccuucgccaucuccugcuuccuccucugcgucgcccuccucggcuucaucaugugguccugccagaagggcaacauccgcugcaacaucugcaucuga

SEQ ID NO: 105998 - RNA, 1701 nt, Artificial Sequence
  derived and/or modified CDS sequence (opt2) from hemagglutinin__InfluenzaA__AGK62995
augaagaccaucaucgcccucuccuacauccucugccucgucuucgcccagaagcuccccggcaacgacaacuccaccgccacccucugccucggccaccacgccggccccaacggcaccaucgucaagaccaucaccaacgaccagaucgaggucaccaacgccaccgagcucguccaguccuccuccaccggcgagaucugcgacuccccccaccagauccucgacggcgagaacugcacccucaucgacgcccuccucggcgacccccagugcgacggcuuccagaacaagaagugggaccucuucgucgagcgcuccaaggccuacuccaacugcuaccccuacgacguccccgacuacgccucccuccgcucccucgucgccuccuccggcacccucgaguucaacaacgaguccuucaacuggaccggcgucacccagaacggcaccuccuccgccugcauccgccgcuccaacaacuccuucuucucccgccucaacuggcucacccaccucaacuucaaguaccccgcccucaacgucaccaugcccaacaacgagcaguucgacaagcucuacaucuggggcguccaccaccccggcaccgacaaggaccagaucuuccucuacgcccaguccuccggccgcaucaccgucuccaccaagcgcucccagcaggccgucauccccaacaucggcucccgcccccgcauccgcaacauccccucccgcaucuccaucuacuggaccaucgucaagcccggcgacauccuccucaucaacuccaccggcaaccucaucgccccccgcggcuacuucaagauccgcuccggcaaguccuccaucaugcgcuccgacgcccccaucggcaagugcaacuccgagugcaucacccccaacggcuccauccccaacgacaagcccuuccagaacgucaaccgcaucaccuacggcgccugcccccgcuacgucaagcaguccacccucaagcucgccaccggcaugcgcaacguccccgagaagcagacccgcggcaucuucggcgccaucgccggcuucaucgagaacggcugggagggcauggucgacggcugguacggcuuccgccaccagaacuccgagggccgcggccaggccgccgaccucaaguccacccaggccgccaucgaccagaucaacggcaagcucaaccgccucaucggcaagaccaacgagaaguuccaccagaucgagaaggaguucuccgaggucgagggccgcauccaggaccucgagaaguacgucgaggacaccaagaucgaccucugguccuacaacgccgagcuccucgucgcccucgagaaccagcacaccaucgaccucaccgacuccgagaugaacaagcucuucgagaagaccaagaagcagcuccgcgagaacgccgaggacaugggcaacggcugcuucaagaucuaccacaagugcgacaacgccugcaucggcuccauccgcaacggcaccuacaaccacgacgucuaccgcgacgaggcccucaacaaccgcuuccagaucaagggcgucgagcucaaguccggcuacaaggacuggauccucuggaucuccuucgccaucuccugcuuccuccucugcgucgcccuccucggcuucaucaugugggccugccagaagggcaacauccgcugcaacaucugcaucuga

SEQ ID NO: 105999 - RNA, 1701 nt, Artificial Sequence
  derived and/or modified CDS sequence (opt2) from hemagglutinin__InfluenzaA__AGK62997
augaagaccaucaucgcccucuccuacauccucugccucgucuucgcccagaagcuccccggcaacgacaacuccaccgccacccucugccucggccaccacgccguccccaacggcaccaucgucaagaccaucaccaacgaccagaucgaggucaccaacgccaccgagcucguccaguccuccuccaccggcgagaucugcaacuccccccaccagauccucgacggcgagaacugcacccucaucgacgcccuccucggcgacccccagugcgacggcuuccagaacaagaagugggaccucuucgucgagcgcuccaaggcccacuccaacugcuaccccuacgacguccccgacuacgccucccuccgcucccucgucgccuccuccggcacccucgaguucaacaacgaguccuucaacuggaccggcgucacccagaacggcaccuccuccgccugcauccgccgcuccaacaacuccuucuucucccgccucaacuggcucacccaccucaacuucaaguaccccgcccucaacgucaccaugcccaacaacgacaaguucgacaagcucuacaucuggggcguccaccaccccggcaccgacaaggaccagaucuuccucuacgcccaggccuccggccgcaucaccgucuccaccaagcgcucccagcaggccgucauccccaacaucggcucccgcccccgcguccgcaacauccccucccgcgucuccaucuacuggaccaucgucaagcccggcgacauccuccucaucaacuccaccggcaaccucaucgccccccgcggcuacuucaagauccgcuccggcaaguccuccaucaugcgcuccgacgcccccaucggcaagugcaacuccgccugcaucacccccaacggcuccauccccaacgacaagcccuuccagaacgucaaccgcaucaccugcggcgccugcgcccgcuacgucaagcagaacacccucaagcucgccaccggcaugcgcaacguccccgagaagcagacccgcggcaucuucggcgccaucgccgucuucaucgagaacggcugggagggcauggucgacggcugguacggcuuccgccaccagaacuccgagggccgcgagcaggccgccgccuuccaguccacccaggccgccaucgaccagaucaucggcaagcucaaccgccucaucggcgagaccaacgagaaguuccaccagaucgagaaggaguucuccgaggucgagcgccgcauccaggcccucgagaaguacgucgaggacaccaagaucgaccucugguccuacaacgccgagcuccucgucgcccucgagaaccagcacaccaucgaccucaccgacuccgagaugaacaagcucuucgagaagaccaagaagcagcuccgcgagaacgccgaggacaugggcaacggcugcuucaagaucuaccacaagugcgacaacgccugcaucggcuccauccgcaacggcaccuacgaccacgacgucuaccgcgacgaggcccucaacaaccgcuuccagaucaagggcgucgagcucaaguccggcuacaaggacuggauccucuggaucuccuucgccaucuccugcuuccuccucugcgucgcccuccucggcuucaucaugugguccugccagaagggcaacauccgcugcaacaucugcaucuga

SEQ ID NO: 106000 - RNA, 1701 nt, Artificial Sequence
  derived and/or modified CDS sequence (opt2) from hemagglutinin__InfluenzaA__AGK62999
augaagaccaucaucgcccucuccuacauccucugccucgucuucgcccagaagcuccccggcaacgacaacuccaccgccacccucugccucggccaccacgccguccccaacggcaccaucgucaagaccaucaccaacgaccagaucgaggucaccaacgccaccgagcucguccaguccuccuccaccggcgagaucugcaacuccccccaccagauccucgacggcgagaacugcacccucaucgacgcccuccucggcgacccccagugcgacggcuuccagaacaagaagugggaccucuucgucgagcgcuccaaggccuacuccaacugcuaccccuacgacguccccgacuacgccucccuccgcucccucgucgccuccuccggcacccucgaguucaacaacgaguccuucaacuggaccggcgucacccagaacggcaccuccuccgccugcauccgccgcuccaacaacuccuucuucucccgccucaacuggcucacccaccucaacuucaaguaccccgcccucaacgucaccaugcccaacaacgagcaguucgacaagcucuacaucuggggcguccaccaccccggcaccgacaaggaccagaucuuccucuacgcccaggccuccggccgcaucaccgucuccaccaagcgcucccagcaggccgucauccccaacaucggcucccgcccccgcguccgcaacauccccucccgcgucuccaucuacuggaccaucgucaagcccggcgacauccuccucaucaacuccaccggcaaccucaucgccccccgcggcuacuucaagauccgcuccggcaaguccuccaucaugcgcuccgacgcccccaucggcaagugcaacuccgccugcaucacccccaacggcuccauccccaacgacaagcccuuccagaacgucaaccgcaucaccuacggcgccugcccccgcuacgucaagcagaacacccucaagcucgccaccggcaugcgcaacguccccgagaagcagacccgcggcaucuucggcgccaucgccggcuucaucgagaacggcugggagggcauggucgacggcugguacggcuuccgccaccagaacuccgagggccgcggccaggccgccgaccucaaguccacccaggccgccaucgaccagaucaacggcaagcucaaccgccucaucggcaagaccaacgagaaguuccaccagaucgagaaggaguucuccgaggucgagggccgcauccaggaccucgagaaguacgucgaggacaccaagaucgaccucugguccuacaacgccgagcuccucgucgcccucgagaaccagcacaccaucgaccucaccgacuccgagaugaacaagcucuucgagaagaccaagaagcagcuccgcgagaacgccgaggacaugggcaacggcugcuucaagaucuaccacaagugcgacaacgccugcaucggcuccauccgcaacggcaccuacgaccacgacgucuaccgcgacgaggcccucaacaaccgcuuccagaucaagggcgucgagcucaaguccggcuacaaggacuggauccucuggaucuccuucgccaucuccugcuuccuccucugcgucgcccuccucggcuucaucaugugggccugccagaagggcaacauccgcugcaacaucugcaucuga

SEQ ID NO: 106001 - RNA, 1701 nt, Artificial Sequence
  derived and/or modified CDS sequence (opt2) from hemagglutinin__InfluenzaA__AGK63001
augaagaccaucaucgcccucuccuacauccucugccucgucuucgcccagaagcuccccggcaacgacaacuccaccgccacccucugccucguccaccacgccguccccaacggcaccaucgucaagaccaucaccaacgaccagaucgaggucaccaacgccaccgagcucguccaguccuccuccaccggcgagaucugcgacuccccccaccagauccucgacggcgagaacugcacccucaucgacgcccuccucggcgacccccagugcgacggcuuccagaacaaggagugggaccucuucgucgagcgcuccaaggccuacuccaacugcuaccccuacgacguccccgacuacgccucccuccgcucccucgucgccuccuccggcacccucgaguucaacaacgaguccuucaacuggaccggcgucacccagaacggcaccuccuccgccugcauccgccgcuccaacuccuccuucuucucccgccucaacggccucacccaccucaacuucaaguaccccgcccucaacgucaccaugcccaacaacgagcaguucgacaagcucuacaucuggggcguccaccaccccggcaccgacaaggaccagaucuuccucuacgcccaguccuccggccgcaucaccgucuccaccaagcgcucccagcaggccgucauccccaacaucggcucccgcccccgcauccgcaacauccccucccgcaucuccaucuacuggaccaucgucaagcccggcgacauccuccucaucaacuccaccggcaaccucaucgccccccgcggcuacuucaagauccgcuccggcaaguccuccaucaugcgcuccgacgcccccaucggcaagugcaacuccgagugcaucacccccaacggcuccauccccaacgacaagcccuuccagaacgucaaccgcaucaccuacggcgccugcccccgcuacgucaagcaguccacccucaagcucgccaccggcaugcgcaacguccccgagaagcagacccgcggcaucuucggcgccaucgccggcuucaucgagaacggcugggagggcauggucgacggcugguacggcuuccgccaccagaacuccgagggccgcgagcaggccgccgacuuccaguccacccaggccgccaucgaccagaucaucggcaagcucaaccgccucaucggcaagaccaacgagaaguuccaccagaucgagaaggaguucuccgaggucgagcgccgcauccaggaccucgagaaguacgucgaggacaccaagaucgaccucugguccuacaacgccgagcuccucgucgcccucgagaaccagcacaccaucgaccucaccgacuccgagaugaacaagcucuucgagaagaccaagaagcagcuccgcgagaacgccgaggacaugggcaacggcugcuucaagaucuaccacaagugcgacaacgccugcaucggcuccauccgcaacggcaccuacaaccacgacgucuaccgcgacgaggcccucaacaaccgcuuccagaucaagggcgucgagcucaaguccggcuacaaggacuggauccucuggaucuccuucgccaucuccugcuuccuccucugcgucgcccuccucggcuucaucaugugguccugccagaagggcaacauccgcugcaacaucugcaucuga

SEQ ID NO: 106002 - RNA, 1701 nt, Artificial Sequence
  derived and/or modified CDS sequence (opt2) from hemagglutinin__InfluenzaA__AGK63003
augaagaccaucaucgcccucuccuacauccucugccucgucuucgcccagaagcuccccggcaacgacaacuccaccgccacccucugccucggccaccacgccggccccaacggcaccaucgucaagaccaucaccaacgaccagaucgaggucaccaacgccaccgagcucguccaguccuccuccaccggcgagaucugcgacuccccccaccagauccucgacggcgagaacugcacccucaucgacgcccuccucggcgacccccagugcgacggcuuccagaacaagaagugggaccucuucaucgagcgcuccaaggccuacuccaacugcuaccccuacgacguccccgacuacgccucccuccgcucccucgucgccuccuccggcacccucgaguucaacaacgaguccuucaacuggaccggcgucacccagaacggcaccuccuccgccugcauccgccgcuccaacuccuccuucuucucccgccucaacuggcucacccaccucaacuucaaguaccccgcccucaacgucaccaugcccaacaacgagcaguucgacaagcucuacaucuggggcguccaccaccccggcaccgacaaggaccagaucuuccucuacgcccaguccuccggccgcaucaccgucuccaccaagcgcucccagcaggccgucauccccaacaucggcucccgcccccgcauccgcaacauccccucccgcaucuccaucuacuggaccaucgucaagcccggcgacauccuccucaucaacuccaccggcaaccucaucgccccccgcggcuacuucaagauccgcuccggcaaguccuccaucaugcgcuccgacgcccccaucggcaagugcaacuccgccugcaucacccccaacggcuccauccccaacgacaagcccuuccagaacgucaaccgcaucaccuacggcgccugcccccgcuacgucaagcaguccacccucaagcucgccaccggcaugcgcaacguccccgagaagcagacccgcggcaucuucggcgccaucgccggcuucaucgagaacggcugggagggcauggucgacggcugguacggcuuccgccaccagaacuccgagggccgcggccaggccgccgaccucaaguccacccaggccgccaucgaccagaucaacggcaagcucaaccgccucaucggcaagaccaacgagaaguuccaccagaucgagaaggaguucuccgaggucgagggccgcauccaggaccucgagaaguacgucgaggacaccaagaucgaccucugguccuacaacgccgagcuccucgucgcccucgagaaccagcacaccaucgaccucaccgacuccgagaugaacaagcucuucgagaagaccaagaagcagcuccgcgagaacgccgaggacaugggcaacggcugcuucaagaucuaccacaagugcgacaacgccugcaucggcuccauccgcaacggcaccuacaaccacgacgucuaccgcgacgaggcccucaacaaccgcuuccagaucaagggcgucgagcucaaguccggcuacaaggacuggauccucuggaucuccuucgccaucuccugcuuccuccucugcgucgcccuccucggcuucaucaugugggccugccagaagggcaacauccgcugcaacaucugcaucuga

SEQ ID NO: 106003 - RNA, 1701 nt, Artificial Sequence
  derived and/or modified CDS sequence (opt2) from hemagglutinin__InfluenzaA__AGK63005
augaagaccaucaucgcccucuccuacauccucugccucgucuucgcccagaagcuccccggcaacgacaacuccaccgccacccucugccucguccaccacgccguccccaacggcaccaucgucaagaccaucaccaacgaccagaucgaggucaccaacgccaccgagcucguccaguccuccuccaccggcgagaucugcgacuccccccaccagauccucgacggcgagaacugcacccucaucgacgcccuccucggcgacccccagugcgacggcuuccagaacaagaagugggaccucuucgucgagcgcuccaaggccuacuccaacugcuaccccuacgacguccccgacuacgccucccuccgcucccucgucgccuccuccggcacccucgaguucaacaacgaguccuucaacuggaccggcgucacccagaacggcaccuccuccgccugcauccgccgcuccaacuccuccuucuucucccgccucaacggccucacccaccucaacuucaaguaccccgcccucgacgucaccaugcccaacaacgacaaguucgacaagcucuacaucuggggcguccaccaccccggcaccgacaaggaccagaucuuccucuacgcccaguccuccggccgcaucaccgucuccaccaagcgcucccagcaggccgucauccccaacaucggcucccgcccccgcauccgcaacauccccucccgcaucuccaucuacuggaccaucgucaagcccggcgacauccuccucaucaacuccaccggcaaccucaucgccccccgcggcuacuucaagauccgcuccggcaaguccuccaucaugcgcuccgacgcccccaucggcaagugcaacuccgagugcaucacccccaacggcuccauccccaacgacaagcccuuccagaacgucaaccgcaucaccuacggcgccugcccccgcuacgucaagcaguccacccucaagcucgccaccggcaugcgcaacguccccgagaagcagacccgcggcaucuucggcgccaucgccgucuucaucgagaacggcugggagggcauggucgacggcugguacggcuuccgccaccagaacuccgagggccgcgagcaggccgccgacuuccaguccacccaggccgccaucgaccagaucaacggcaagcucaaccgccucaucggcaagaccaacgagaaguuccaccagaucgagaaggaguucuccgaggucgagggccgcauccaggaccucgagaaguacgucgaggacaccaagaucgaccucugguccuacaacgccgagcuccucgucgcccucgagaaccagcacaccaucgaccucaccgacuccgagaugaacaagcucuucgagaagaccaagaagcagcuccgcgagaacgccgaggacaugggcaacggcugcuucaagaucuaccacaagugcgacaacgccugcaucggcuccauccgcaacggcaccuacaaccacgacgucuaccgcgacgaggcccucaacaaccgcuuccagaucaagggcgucgagcucaaguccggcuacaaggacuggauccucuggaucuccuucgccaucuccugcuuccuccucugcgucgcccuccucggcuucaucaugugggccugccagaagggcaacauccgcugcaacaucugcaucuga

SEQ ID NO: 106004 - RNA, 1701 nt, Artificial Sequence
  derived and/or modified CDS sequence (opt2) from hemagglutinin__InfluenzaA__AGK63007
augaagaccaucaucgcccucuccuacauccucugccucgucuucgcccagaagcuccccggcaacgacaacuccaccgccacccucugccucggccaccacgccguccccaacggcaccaucgucaagaccaucaccaacgaccagaucgaggucaccaacgccaccgagcucguccaguccuccuccaccggcgagaucugcgacuccccccaccagauccucgacggcgagaacugcacccucaucgacgcccuccucggcgacccccagugcgacggcuuccagaacaagaagugggaccucuucgucgagcgcuccaaggcccacuccaacugcuaccccuacgacguccccgacuacgccucccuccgcucccucgucgccuccuccggcacccucgaguucaacaacgaguccuucaacuggaccggcgucacccagaacggcaccuccuccgccugcauccgccgcuccaacaacuccuucuucucccgccucaacuggcucacccaccucaacuucaaguaccccgcccucaacgucaccaugcccaacaacgagcaguucgacaagcucuacaucuggggcguccaccaccccggcaccgacaaggaccagaucuuccucuacgcccaggccuccggccgcaucaccgucuccaccaagcgcucccagcaggccgucauccccaacaucggcucccgcccccgcguccgcaacauccccucccgcgucuccaucuacuggaccaucgucaagcccggcgacauccuccucaucaacuccaccggcaaccucaucgccccccgcggcuacuucaagauccgcuccggcaaguccuccaucaugcgcuccgacgcccccaucggcaagugcaacuccgagugcaucacccccaacggcuccauccccaacgacaagcccuuccagaacgucaaccgcaucaccuacggcgccugcccccgcuacgucaagcagaacacccucaagcucgccaccggcaugcgcaacguccccgagaagcagacccgcggcaucuucggcgccaucgccggcuucaucgagaacggcugggagggcauggucgacggcugguacggcuuccgccaccagaacuccgagggccgcggccaggccgccgaccucaaguccacccaggccgccaucgaccagaucaacggcaagcucaaccgccucaucggcaagaccaacgagaaguuccaccagaucgagaaggaguucuccgaggucgagggccgcauccaggaccucgagaaguacgucgaggacaccaagaucgaccucugguccuacaacgccgagcuccucgucgcccucgagaaccagcacaccaucgaccucaccgacuccgagaugaacaagcucuucgagaagaccaagaagcagcuccgcgagaacgccgaggacaugggcaacggcugcuucaagaucuaccacaagugcgacaacgccugcaucggcuccauccgcaacggcaccuacgaccacgacgucuaccgcgacgaggcccucaacaaccgcuuccagaucaagggcgucgagcucaaguccggcuacaaggacuggauccucuggaucuccuucgccaucuccugcuuccuccucugcgucgcccuccucggcuucaucaugugggccugccagaagggcaacauccgcugcaacaucugcaucuga

SEQ ID NO: 106005 - RNA, 1701 nt, Artificial Sequence
  derived and/or modified CDS sequence (opt2) from hemagglutinin__InfluenzaA__AGK63009
augaagaccaucaucgcccucuccuacauccucugccucgucuucgcccagaagcuccccggcaacgacaacuccaccgccacccucugccucggccaccacgccguccccaacggcaccaucgucaagaccaucaccaacgaccagaucgaggucaccaacgccaccgagcucguccaguccuccuccaccggcgagaucugcaacuccccccaccagauccucgacggcgagaacugcacccucaucgacgcccuccucggcgacccccagugcgacggccuccagaacaagaagugggaccucuucgucgagcgcuccaaggcccacuccaacugcuaccccuacgacguccccgacuacgccucccuccgcucccucgucgccuccuccggcacccucgaguucaacaacgaguccuucaacuggaccggcgucacccagaacggcaccuccuccgccugcauccgccgcuccaacaacuccuucuucucccgccucaacuggcucacccaccucaacuucaaguaccccgcccucaacgucaccaugcccaacaacgagcaguucgacaagcucuacaucuggggcguccaccaccccggcaccgacaaggaccagaucuuccucuacgcccaggccuccggccgcaucaccgucuccaccaagcgcucccagcaggccgucauccccaacaucggcucccgcccccgcguccgcaacauccccucccgcgucuccaucuacuggaccaucgucaagcccggcgacauccuccucaucaacuccaccggcaaccucaucgccccccgcggcuacuucaagauccgcuccggcaaguccuccaucaugcgcuccgacgcccccaucggcaagugcaacuccgccugcaucacccccaacggcuccauccccaacgacaagcccuuccagaacgucaaccgcaucaccuacggcgccugcccccgcuacgucaagcagaacacccucaagcucgccaccggcaugcgcaacguccccgagaagcagacccgcggcaucuucggcgccaucgccggcuucaucgagaacggcugggagggcauggucgacggcugguacggcuuccgccaccagaacuccgagggccgcggccaggccgccgaccucaaguccacccaggccgccaucgaccagaucaacggcaagcucaaccgccucaucggcaagaccaacgagaaguuccaccagaucgagaaggaguucuccgaggucgagggccgcauccaggaccucgagaaguacgucgaggacaccaagaucgaccucugguccuacaacgccgagcuccucgucgcccucgagaaccagcacaccaucgaccucaccgacuccgagaugaacaagcucuucgagaagaccaagaagcagcuccgcgagaacgccgaggacaugggcaacggcugcuucaagaucuaccacaagugcgacaacgccugcaucggcuccauccgcaacggcaccuacgaccacgacgucuaccgcgacgaggcccucaacaaccgcuuccagaucaagggcgucgagcucaaguccggcuacaaggacuggauccucuggaucuccuucgccaucuccugcuuccuccucugcgucgcccuccucggcuucaucaugugggccugccagaagggcaacauccgcugcaacaucugcaucuga

SEQ ID NO: 106006 - RNA, 1701 nt, Artificial Sequence
  derived and/or modified CDS sequence (opt2) from hemagglutinin__InfluenzaA__AGK63011
augaagaccaucaucgcccucuccuacauccucugccucgucuucgcccagaagcuccccggcaacgacaacuccaccgccacccucugccucggccaccacgccguccccaacggcaccaucgucaagaccaucaccaacgaccagaucgaggucaccaacgccaccgagcucguccaguccuccuccaccggcgagaucugcgacuccccccaccagauccucgacggcgagaacugcacccucaucgacgcccuccucggcgacccccagugcgacggcuuccagaacaagaagugggaccucuucgucgagcgcuccaaggccuacuccaacugcuaccccuacgacguccccgacuacgccucccuccgcucccucgucgccuccuccggcacccucgaguucaacaacgaguccuucaacuggaccggcgucacccagaacggcaccuccuccgccugcauccgccgcuccaacaacuccuucuucucccgccucaacuggcucacccaccucaacuucaaguaccccgcccucaacgucaccaugcccaacaacgagcaguucgacaagcucuacaucuggggcguccaccaccccggcaccgacaaggaccagaucuuccucuacgcccaggccuccggccgcaucaccgucuccaccaagcgcucccagcaggccgucauccccaacaucggcucccgcccccgcguccgcaacauccccucccgcaucuccaucuacuggaccaucgucaagcccggcgacauccuccucaucaacuccaccggcaaccucaucgccccccgcggcuacuucaagauccgcuccggcaaguccuccaucaugcgcuccgacgcccccaucggcaagugcaacuccgagugcaucacccccaacggcuccauccccaacgacaagcccuuccagaacgucaaccgcaucaccuacggcgccugcccccgcuacgucaagcaguccacccucaagcucgccaccggcaugcgcaacguccccgagaagcagacccgcggcaucuucggcgccaucgccggcuucaucgagaacggcugggagggcauggucgacggcugguacggcuuccgccaccagaacuccgagggccgcggccaggccgccgaccucaaguccacccaggccgccaucgaccagaucaacggcaagcucaaccgccucaucggcaagaccaacgagaaguuccaccagaucgagaaggaguucuccgaggucgagggccgcauccaggaccucgagaaguacgucgaggacaccaagaucgaccucugguccuacaacgccgagcuccucgucgcccucgagaaccagcacaccaucgaccucaccgacuccgagaugaacaagcucuucgagaagaccaagaagcagcuccgcgagaacgccgaggacaugggcaacggcugcuucaagaucuaccacaagugcgacaacgccugcaucggcuccauccgcaacggcaccuacgaccacgacgucuaccgcgacgaggcccucaacaaccgcuuccagaucaagggcgucgagcucaaguccggcuacaaggacuggauccucuggaucuccuucgccaucuccugcuuccuccucugcgucgcccuccucggcuucaucaugugggccugccagaagggcaacauccgcugcaacaucugcaucuga

SEQ ID NO: 106007 - RNA, 1701 nt, Artificial Sequence
  derived and/or modified CDS sequence (opt2) from hemagglutinin__InfluenzaA__AGK63013
augaagaccaucaucgcccucuccuacauccucugccucgucuucgcccagaagcuccccggcaacgacaacuccaccgccacccucugccucggccaccacgccguccccaacggcaccaucgucaagaccaucaccaacgaccagaucgaggucaccaacgccaccgagcucguccaguccuccuccaccggcgagaucugcaacuccccccaccagauccucgacggcgagaacugcacccucaucgacgcccuccucggcgacccccagugcgacggcuuccagaacaagaagugggaccucuucgucgagcgcuccaaggcccacuccaacugcuaccccuacgacguccccgacuacgccucccuccgcucccucgucgccuccuccggcacccucgaguucaacaacgaguccuucaacuggaccggcgucacccagaacggcaccuccuccgccugcauccgccgcuccaacaacuccuucuucucccgccucaacuggcucacccaccucaacuucaaguaccccgcccucgacgucaccaugcccaacaacgagcaguucgacaagcucuacaucuggggcguccaccaccccggcaccgacaaggaccagaucuuccucuacgcccaggccuccggccgcaucaccgucuccaccaagcgcucccagcaggccgucauccccaacaucggcucccgcccccgcguccgcaacauccccucccgcgucuccaucuacuggaccaucgucaagcccggcgacauccuccucaucaacuccaccggcaaccucaucgccccccgcggcuacuucaagauccgcuccggcaaguccuccaucaugcgcuccgacgcccccaucggcaagugcaacuccgccugcaucacccccaacggcuccauccccaacgacaagcccuuccagaacgucaaccgcaucaccuacggcgccugcgcccgcuacgucaagcagaacacccucaagcucgccaccggcaugcgcaacguccccgagaagcagacccgcggcaucuucggcgccaucgccgucuucaucgagaacggcugggagggcauggucgacggcugguacggcuuccgccaccagaacuccgagggccgcggccaggccgccgcccuccaguccacccaggccgccaucgaccagaucaccggcaagcucaaccgccucaucggcgagaccaacgagaaguuccaccagaucgagaaggaguucuccgaggucgagggccgcauccaggcccucgagaaguacgucgaggacaccaagaucgaccucugguccuacaacgccgagcuccucgucgcccucgagaaccagcacaccaucgaccucaccgacuccgagaugaacaagcucuucgagaagaccaagaagcagcuccgcgagaacgccgaggacaugggcaacggcugcuucaagaucuaccacaagugcgacaacgccugcaucggcuccauccgcaacggcaccuacgaccacgacgucuaccgcgacgaggcccucaacaaccgcuuccagaucaagggcgucgagcucaaguccggcuacaaggacuggauccucuggaucuccuucgccaucuccugcuuccuccucugcgucgcccuccucggcuucaucaugugguccugccagaagggcaacauccgcugcaacaucugcaucuga

SEQ ID NO: 106008 - RNA, 1701 nt, Artificial Sequence
  derived and/or modified CDS sequence (opt2) from hemagglutinin__InfluenzaA__AGK63015
augaagaccaucaucgcccucuccuacauccucugccucgucuucgcccagaagcuccccggcaacgacaacuccaccgccacccucugccucggccaccacgccguccccaacggcaccaucgucaagaccaucaccaacgaccagaucgaggucaccaacgccaccgagcucguccaguccuccuccaccggcgagaucugcgacuccccccaccagauccucgacggcgagaacugcacccucaucgacgcccuccucggcgacccccagugcgacggcuuccagaacaagaagugggaccucuucgucgagcgcuccaaggccuacuccaacugcuaccccuacgacguccccgacuacgccucccuccgcucccucgucgccuccuccggcacccucgaguucaacaacgaguccuucaacuggaccggcgucacccagaacggcaccuccuccgccugcauccgcaaguccaacuccuccuucuucucccgccucaacuggcucacccaccucaacuucaaguaccccgcccucaacgucaccaugcccaacaacgagcaguucgacaagcucuacaucuggggcguccaccaccccggcaccgacaaggaccagaucuuccucuacgcccaguccuccggccgcaucaccgucuccaccaagcgcucccagcaggccgucauccccaacaucggcucccgcccccgcauccgcaacauccccucccgcaucuccaucuacuggaccaucgucaagcccggcgacauccuccucaucaacuccaccggcaaccucaucgccccccgcggcuacuucaagauccgcuccggcaaguccuccaucaugcgcuccgacgcccccaucggcaagugcaacuccgagugcaucacccccaacggcuccauccccaacgacaagcccuuccagaacgucaaccgcaucaccuacggcgccugcccccgcuacgucaagcaguccacccucaagcucgccaccggcaugcgcaacguccccgagaagcagacccgcggcaucuucggcgccaucgccggcuucaucgagaacggcugggagggcauggucgacggcugguacggcuuccgccaccagaacuccgagggccgcggccaggccgccgaccucaaguccacccaggccgccaucgaccagaucaacggcaagcucaaccgccucaucggcaagaccaacgagaaguuccaccagaucgagaaggaguucuccgaggucgagggccgcauccaggaccucgagaaguacgucgaggacaccaagaucgaccucugguccuacaacgccgagcuccucgucgcccucgagaaccagcacaccaucgaccucaccgacuccgagaugaacaagcucuucgagaagaccaagaagcagcuccgcgagaacgccgaggacaugggcaacggcugcuucaagaucuaccacaagugcgacaacgccugcaucggcuccauccgcaacggcaccuacaaccacgacgucuaccgcgacgaggcccucaacaaccgcuuccagaucaagggcgucgagcucaaguccggcuacaaggacuggauccucuggaucuccuucgccaucuccugcuuccuccucugcgucgcccuccucggcuucaucaugugggccugccagaagggcaacauccgcugcaacaucugcaucuga

SEQ ID NO: 106009 - RNA, 1701 nt, Artificial Sequence; identical to SEQ ID NO: 103018
  derived and/or modified CDS sequence (opt2) from hemagglutinin__InfluenzaA__AGK63017

SEQ ID NO: 106010 - RNA, 1701 nt, Artificial Sequence
  derived and/or modified CDS sequence (opt2) from hemagglutinin__InfluenzaA__AGK63019
augaagaccaucaucgcccucuccuacauccucugccucgucuucgcccagaagcuccccggcaacgacaacuccaccgccacccucugccucggccaccacgccguccccaacggcaccaucgucaagaccaucaccaacgaccagaucgaggucaccaacgccaccgagcucguccaguccuccuccaccggcgagaucugcgacuccccccaccagauccucgacggcgagaacugcacccucaucgacgcccuccucggcgacccccagugcgacggcuuccagaacaagaagugggaccucuucgucgagcgcuccaaggccuacuccaacugcuaccccuacgacguccccgacuacgccucccuccgcucccucgucgccuccuccggcacccucgaguucaacaacgaguccuucaacuggaccggcgucacccagaacggcaccuccuccgccugcauccgccgcuccaacuccuccuucuucucccgccucaacuggcucacccaccucaacuucaaguaccccgcccucaacgucaccaugcccaacaacgagcaguucgacaagcucuacaucuggggcguccaccaccccggcaccgacaaggaccagaucuuccucuacgcccaguccuccggccgcaucaccgucuccaccaagcgcucccagcaggccgucauccccaacaucggcucccgcccccgcauccgcaacauccccucccgcaucuccaucuacuggaccaucgucaagcccggcgacauccuccucaucaacuccaccggcaaccucaucgccccccgcggcuacuucaagauccgcuccggcaaguccuccaucaugcgcuccgacgcccccaucggcaagugcaacuccgagugcaucacccccaacggcuccauccccaacgacaagcccuuccagaacgucaaccgcaucaccuacggcgccugcccccgcuacgucaagcaguccacccucaagcucgccaccggcaugcgcaacguccccgagaagcagacccgcggcaucuucggcgccaucgccggcuucaucgagaacggcugggagggcauggucgacggcugguacggcuuccgccaccagaacuccgagggccgcggccaggccgccgaccucaaguccacccaggccgccaucgaccagaucaacggcaagcucaaccgccucaucggcaagaccaacgagaaguuccaccagaucgagaaggaguucuccgaggucgagggccgcauccaggaccucgagaaguacgucgaggacaccaagaucgaccucugguccuacaacgccgagcuccucgucgcccucgagaaccagcacaccaucgaccucaccgacuccgagaugaacaagcucuucgagaagaccaagaagcagcuccgcgagaacgccgaggacaugggcaacggcugcuucaagaucuaccacaagugcgacaacgccugcaucggcuccauccgcaacggcaccuacgaccacgacgucuaccgcgacgaggcccucaacaaccgcuuccagaucaagggcgucgagcucaaguccggcuacaaggacuggauccucuggaucuccuucgccaucuccugcuuccuccucugcgucgcccuccucggcuucaucaugugggccugccagaagggcaacauccgcugcaacaucugcaucuga

SEQ ID NO: 106011 - RNA, 1701 nt, Artificial Sequence; identical to SEQ ID NO: 105885
  derived and/or modified CDS sequence (opt2) from hemagglutinin__InfluenzaA__AGK63021

SEQ ID NO: 106012 - RNA, 1701 nt, Artificial Sequence
  derived and/or modified CDS sequence (opt2) from hemagglutinin__InfluenzaA__AGK63025
augaagaccaucaucgcccucuccuacauccucugccucgucuucgcccagaagcuccccggcaacgacaacuccaccgccacccucugccucggccaccacgccguccccaacggcaccaucgucaagaccaucaccaacgaccagaucgaggucaccaacgccaccgagcucguccaguccuccuccaccggcgagaucugcgacuccccccaccagauccucgacggcgagaacugcacccucaucgacgcccuccucggcgacccccagugcgacggcuuccagaacaagaagugggaccucuucaucgagcgcuccaaggccuacuccaacugcuaccccuacgacguccccgacuacgccucccuccgcucccucgucgccuccuccggcacccucgaguucaacaacgaguccuucaacuggaccggcgucacccagaacggcaccuccuccgccugcauccgcaaguccaacuccuccuucuucucccgccucaacuggcucacccaccucaacuucaaguaccccgcccucaacgucaccaugcccaacaacgagcaguucgacaagcucuacaucuggggcguccaccaccccggcaccgacaaggaccagaucuuccucuacgcccaguccuccggccgcaucaccgucuccaccaagcgcucccagcaggccgucauccccaacaucggcucccgcccccgcauccgcaacauccccucccgcaucuccaucuacuggaccaucgucaagcccggcgacauccuccucaucaacuccaccggcaaccucaucgccccccgcggcuacuucaagauccgcuccggcaaguccuccaucaugcgcuccgacgcccccaucggcaagugcaacuccgagugcaucacccccaacggcuccauccccaacgacaagcccuuccagaacgucaaccgcaucaccuacggcgccugcccccgcuacgucaagcaguccacccucaagcucgccaccggcaugcgcaacguccccgagaagcagacccgcggcaucuucggcgccaucgccggcuucaucgagaacggcugggagggcauggucgacggcugguacggcuuccgccaccagaacuccgagggccgcggccaggccgccgaccucaaguccacccaggccgccaucgaccagaucaacggcaagcucaaccgccucaucggcaagaccaacgagaaguuccaccagaucgagaaggaguucuccgaggucgagggccgcauccaggaccucgagaaguacgucgaggacaccaagaucgaccucugguccuacaacgccgagcuccucgucgcccucgagaaccagcacaccaucgaccucaccgacuccgagaugaacaagcucuucgagaagaccaagaagcagcuccgcgagaacgccgaggacaugggcaacggcugcuucaagaucuaccacaagugcgacaacgccugcaucggcuccauccgcaacggcaccuacaaccacgacgucuaccgcgacgaggcccucaacaaccgcuuccagaucaagggcgucgagcucaaguccggcuacaaggacuggauccucuggaucuccuucgccaucuccugcuuccuccucugcgucgcccuccucggcuucaucaugugggccugccagaagggcaacauccgcugcaacaucugcaucuga

SEQ ID NO: 106013 - RNA, 1701 nt, Artificial Sequence; identical to SEQ ID NO: 105110
  derived and/or modified CDS sequence (opt2) from hemagglutinin__InfluenzaA__AGK63027

SEQ ID NO: 106014 - RNA, 1701 nt, Artificial Sequence
  derived and/or modified CDS sequence (opt2) from hemagglutinin__InfluenzaA__AGK63029
augaagaccaucaucgcccucuccuacauccucugccucgucuucgcccagaagcuccccggcaacgacaacuccaccgccacccucugccucggccaccacgccguccccaacggcaccaucgucaagaccaucaccaacgaccagaucgaggucaccaacgccaccgagcucguccaguccuccuccaccggcgagaucugcaacuccccccaccagauccucgacggcgagaacugcacccucaucgacgcccuccucggcgacccccagugcgacggcuuccagaacaagaagugggaccucuucgucgagcgcuccaaggcccacuccaacugcuaccccuacgacguccccgacuacgccucccuccgcucccucgucgccuccuccggcacccucgaguucaacaacgaguccuucaacuggaccggcgucacccagaacggcaccuccuccgccugcauccgccgcuccaacaacuccuucuucucccgccucaacuggcucacccaccucaacuucaaguaccccgcccucaacgucaccaugcccaacaacgagcaguucgacaagcucuacaucuggggcguccaccaccccggcaccgacaaggaccagaucuuccucuacgcccaggccuccggccgcaucaccgucuccaccaagcgcucccagcaggccgucauccccaacaucggcucccgcccccgcguccgcaacauccccucccgcgucuccaucuacuggaccaucgucaagcccggcgacauccuccucaucaacuccaccggcaaccucaucgccccccgcggcuacuucaagauccgcuccggcaaguccuccaucaugcgcuccgacgcccccaucggcaagugcaacuccgccugcaucaccaccaacggcuccauccccaacgacaagcccuuccagaacgucaaccgcaucaccuacggcgccugcccccgcuacgucaagcagaacacccucaagcucgccaccggcaugcgcaacguccccgagaagcagacccgcggcaucuucggcgccaucgccggcuucaucgagaacggcugggagggcauggucgacggcugguacggcuuccgccaccagaacuccgagggccgcggccaggccgccgaccucaaguccacccaggccgccaucgaccagaucaacggcaagcucaaccgccucaucggcaagaccaacgagaaguuccaccagaucgagaaggaguucuccgaggucgagggccgcauccaggaccucgagaaguacgucgaggacaccaagaucgaccucugguccuacaacgccgagcuccucgucgcccucgagaaccagcacaccaucgaccucaccgacuccgagaugaacaagcucuucgagaagaccaagaagcagcuccgcgagaacgccgaggacaugggcaacggcugcuucaagaucuaccacaagugcgacaacgccugcaucggcuccauccgcaacggcaccuacgaccacgacgucuaccgcgacgaggcccucaacaaccgcuuccagaucaagggcgucgagcucaaguccggcuacaaggacuggauccucuggaucuccuucgccaucuccugcuuccuccucugcgucgcccuccucggcuucaucaugugggccugccagaagggcaacauccgcugcaacaucugcaucuga

SEQ ID NO: 106015 - RNA, 1701 nt, Artificial Sequence
  derived and/or modified CDS sequence (opt2) from hemagglutinin__InfluenzaA__AGK63031
augaagaccaucaucgcccucuccuacauccucugccucgucuucgcccagaagcuccccggcaacgacaacuccaccgccacccucugccucggccaccacgccguccccaacggcaccaucgucaagaccaucaccaacgaccagaucgaggucaccaacgccaccgagcucguccaguccuccuccaccggcgagaucugcgacuccccccaccagauccucgacggcgagaacugcacccucaucgacgcccuccucggcgacccccagugcgacggcuuccagaagaagaagugggaccucuucgucgagcgcuccaaggcccacuccaacugcuaccccuacgacguccccgacuacgccucccuccgcucccucgucgccuccuccggcacccucgaguucaacaacgaguccuucaacuggaccggcgucacccagaacggcaccuccuccgccugcauccgccgcuccaacaacuccuucuucucccgccucaacuggcucacccaccucaacuucaaguaccccgcccucaacgucaucaugcccaacaacgagcaguucgacaagcucuacaucuggggcguccaccaccccggcaccgacaaggaccagaucuuccucuacgcccaggccuccggccgcaucaccgucuccaccaagcgcucccagcaggccgucauccccaacaucggcucccgcccccgcguccgcaacauccccucccgcgucuccaucuacuggaccaucgucaagcccggcgacauccuccucaucaacuccaccggcaaccucaucgccccccgcggcuacuucaagauccgcuccggcaaguccuccaucaugcgcuccgacgcccccaucggcaagugcaacuccgccugcaucacccccaacggcuccauccccaacgacaagcccuuccagaacgucaaccgcaucaccuacggcgccugcccccgcuacgucaagcagaacacccucaagcucgccaccggcaugcgcaacguccccgagaagcagacccgcggcaucuucggcgccaucgccggcuucaucgagaacggcugggagggcauggucgacggcugguacggcuuccgccaccagaacuccgagggccgcggccaggccgccgaccucaaguccacccaggccgccaucgaccagaucaacggcaagcucaaccgccucaucggcaagaccaacgagaagcuccaccagaucgagaaggaguucuccgaggucgagggccgcauccucgaccucgagaaguacgucgaggacaccaagaucgaccucugguccuacaacgccgagcuccucgucgcccucgagaaccagcacaccaucgaccucaccgacuccgagaugaacaagcucuucgagaagaccaagaagcagcuccgcgagaacgccgaggacaugggcaacggcugcuucaagaucuaccacaagugcgacaacgccugcaucggcuccauccgcaacggcaccuacgaccacgacgucuaccgcgacgaggcccucaacaaccgcuuccagaucaagggcgucgagcucaaguccggcuacaaggacuggauccucuggaucuccuucgccaucuccugcuuccuccucugcgucgcccuccucggcuucaucaugugggccugccagaagggcaacauccgcugcaacaucugcaucuga

SEQ ID NO: 106016 - RNA, 1701 nt, Artificial Sequence
  derived and/or modified CDS sequence (opt2) from hemagglutinin__InfluenzaA__AGK63033
augaagaccaucaucgcccucuccuacauccucugccucgucuucgcccagaagcuccccggcaacgacaacuccaccgccacccucugccucggccaccacgccguccccaacggcaccaucgucaagaccaucaccaacgaccagaucgaggucaccaacgccaccgagcucguccaguccuccuccaccggcgagaucugcgacuccccccaccagauccucgacggcgagaacugcacccucaucgacgcccuccucggcgacccccagugcgacggcuuccagaacaagaagugggaccucaucgucgagcgcuccaaggccuacuccaacugcuaccccuacgacguccccgacuacgccucccuccgcucccucgucgccuccuccggcacccucgaguucaacaacgaguccuucaacuggaccggcgucacccagaacggcaccuccuccgccugcauccgcaaguccaacuccuccuucuucucccgccucaacuggcucacccaccucaacuucaaguaccccgcccucaacgucaccaugcccaacaacgagcaguucgacaagcucuacaucuggggcguccaccaccccggcaccgacaaggaccagaucuuccucuacgcccaggccuccggccgcaucaccgucuccaccaagcgcucccagcaggccgucauccccaacaucggcucccgcccccgcauccgcaacauccccucccgcaucuccaucuacuggaccaucgucaagcccggcgacauccuccucaucaacuccaccggcaaccucaucgccccccgcggcuacuucaagauccgcuccggcaaguccuccaucaugcgcuccgacgcccccaucggcaagugcaacuccgagugcaucacccccaacggcuccauccccaacgacaagcccuuccagaacgucaaccgcaucaccuacggcgccugcccccgcuacgucaagcaguccacccucaagcucgccaccggcaugcgcaacguccccgagaagcagacccgcggcaucuucggcgccaucgccggcuucaucgagaacggcugggagggcauggucgacggcugguacggcuuccgccaccagaacuccgagggccgcggccaggccgccgaccucaaguccacccaggccgccaucgaccagaucaacggcaagcucaaccgccucaucggcaagaccaacgagaaguuccaccagaucgagaaggaguucuccgaggucgagggccgcauccaggaccucgagaaguacgucgaggacaccaagaucgaccucugguccuacaacgccgagcuccucgucgcccucgagaaccagcacaccaucgaccucaccgacuccgagaugaacaagcucuucgagaagaccaagaagcagcuccgcgagaacgccgaggacaugggcaacggcugcuucaagaucuaccacaagugcgacaacgccugcaucggcuccauccgcaacggcaccuacgaccacgacgucuaccgcgacgaggcccucaacaaccgcuuccagaucaagggcgucgagcucaaguccggcuacaaggacuggauccucuggaucuccuucgccaucuccugcuuccuccucugcgucgcccuccucggcuucaucaugugggccugccagaagggcaacauccgcugcaacaucugcaucuga

SEQ ID NO: 106017 - RNA, 1701 nt, Artificial Sequence
  derived and/or modified CDS sequence (opt2) from hemagglutinin__InfluenzaA__AGK63035
augaagaccaucaucgcccucuccuacauccucugccucgucuucgcccagaagcuccccggcaacgacaacuccaccgccacccucugccucggccaccacgccguccccaacggcaccaucgucaagaccaucaccaacgaccagaucgaggucaccaacgccaccgagcucguccaguccuccuccaccggcgagaucugcgacuccccccaccagauccucgacggcgagaacugcacccucaucgacgcccuccucggcgacccccagugcgacggcuuccagaacaagaagugggaccucuucgucgagcgcuccaaggccuacuccaacugcuaccccuacgacguccccgacuacgccucccuccgcucccucgucgccuccuccggcacccucgaguucaacaacgaguccuucaacuggaccggcgucacccagaacggcaccuccuccgccugcauccgccgcuccaacaacuccuucuucucccgccucaacuggcucacccaccucaacuucaaguaccccgcccucaacgucaccaugcccaacaacgagcaguucgacaagcucuacaucuggggcguccaccaccccggcaccgacaaggaccagaucuuccucuacgcccaggccuccggccgcaucaccgucuccaccaagcgcucccagcaggccgucauccccaacaucggcucccgcccccgcauccgcaacauccccucccgcaucuccaucuacuggaccaucgucaagcccggcgacauccuccucaucaacuccaccggcaaccucaucgccccccgcggcuacuucaagauccgcuccggcaaguccuccaucaugcgcuccgacgcccccaucggcaagugcaacuccgagugcaucacccccaacggcuccauccccaacgacaagcccuuccagaacgucaaccgcaucaccuacggcgccugcccccgcuacgucaagcaguccacccucaagcucgccaccggcaugcgcaacguccccgagaagcagacccgcggcaucuucggcgccaucgccggcuucaucgagaacggcugggagggcauggucgacggcugguacggcuuccgccaccagaacuccgagggccgcggccaggccgccgaccucaaguccacccaggccgccaucgaccagaucaacggcaagcucaaccgccucaucggcaagaccaacgagaaguuccaccagaucgagaaggaguucuccgaggucgagggccgcauccaggaccucgagaaguacgucgaggacaccaagaucgaccucugguccuacaacgccgagcuccucgucgcccucgagaaccagcacaccaucgaccucaccgacuccgagaugaacaagcucuucgagaagaccaagaagcagcuccgcgagaacgccgaggacaugggcaacggcugcuucaagaucuaccacaagugcgacaacgccugcaucggcuccauccgcaacggcaccuacgaccacgacgucuaccgcgacgaggcccucaacaaccgcuuccagaucaagggcgucgagcucaaguccggcuacaaggacuggauccucuggaucuccuucgccaucuccugcuuccuccucugcgucgcccuccucggcuucaucaugugggccugccagaagggcaacauccgcugcaacaucugcaucuga

SEQ ID NO: 106018 - RNA, 1701 nt, Artificial Sequence
  derived and/or modified CDS sequence (opt2) from hemagglutinin__InfluenzaA__AGK63037
augaagaccaucaucgcccucuccuacauccucugccucgucuucgcccaggagcuccccggcaacgacaacuccaccgccacccucugccucggccaccacgccguccccaacggcaccaucgucaagaccaucaccaacgaccagaucgaggucaccaacgccaccgagcucguccaguccuccuccaccggcgagaucugcaacuccccccaccagauccucgacggcgagaacugcacccucaucgacgcccuccucggcgacccccagugcgacggcuuccagaacaagaagugggaccucuucgucgagcgcuccaaggcccacuccaacugcaaccccuacgacguccccgacuacgccucccuccgcucccucgucgccuccuccggcacccucgaguucaacaacgaguccuucaacuggaccggcgucacccagaacggcaccuccuccgccugcauccgccgcuccaacaacuccuucuucucccgccucaacuggcucacccaccucaacuucaaguaccccgcccucaacgucaccaugcccaacaacgagcaguucgacaagcucuacaucuggggcguccaccaccccggcaccgacaaggaccagaucuuccucuacgcccaggccuccggccgcaucaccgucuccaccaagcgcucccagcaggccgucauccccaacaucggcucccgcccccgcguccgcaacauccccucccgcgucuccaucuacuggaccaucgucaagcccggcgacauccuccucaucaacuccaccggcaaccucaucgccccccgcggcuacuucaagauccgcuccggcaaguccuccaucaugcgcuccgacgcccccaucggcaagugcaacuccgccugcaucacccccaacggcuccauccccaacgacaagcccuuccagaacgucaaccgcaucaccuacggcgccugcccccgcuacgucaagcagaacacccucaagcucgccaccggcaugcgcaacguccccgagaagcagacccgcggcaucuucggcgccaucgccggcuucaucgagaacggcugggagggcauggucgacggcugguacggcuuccgccaccagaacuccgagggccgcggccaggccgccgaccucaaguccacccaggccgccaucgaccagaucaacggcaagcucaaccgccucaucggcaagaccaacgagaaguuccaccagaucgagaaggaguucuccgaggucgagggccgcauccaggaccucgagaaguacgucgaggacaccaagaucgaccucugguccuacaacgcccagcuccucgucgcccucgagaaccagcacaccaucgaccucaccgacuccgagaugaacaagcucuucgagaagaccaagaagcagcuccgcgagaacgccgaggacaugggcaacggcugcuucaagaucuaccacaagugcgacaacgccugcaucggcuccauccgcaacggcaccuacgaccacgacgucuaccgcgacgaggcccucaacaaccgcuuccagaucaagggcgucgagcucaaguccggcuacaaggacuggauccucuggaucuccuucgccaucuccugcuuccuccucugcgucgcccuccucggcuucaucaugugggccugccagaagggcaacauccgcugcaacaucugcaucuga

SEQ ID NO: 106019 - RNA, 1701 nt, Artificial Sequence
  derived and/or modified CDS sequence (opt2) from hemagglutinin__InfluenzaA__AGK63039
augaagaccaucaucgcccucuccuacauccucugccucgucuucgcccagaagcuccccggcaacgacaacuccaccgccacccucugccucggccaccacgccguccccaacggcaccaucgucaagaccaucaccaacgaccagaucgaggucaccaacgccaccgagcucguccaguccuccuccaccggcgagaucugcaacuccccccaccagauccucgacggcgagaacugcacccucaucgacgcccuccucggcgacccccagugcgacggcuuccagaagaagaagugggaccucuucgucgagcgcuccaaggcccacuccaacugcuaccccuacgacguccccgacuacgccucccuccgcucccucgucgccuccuccggcacccucgaguucaacaacgaguccuucaacuggaccggcgucacccagaacggcaccuccuccgccugcauccgccgcuccaacaacuccuucuucucccgccucaacuggcucacccaccucaacuucaaguaccccgcccucaacgucacccuccccaacaacgagcaguucgacaagcucuacaucuggggcguccaccaccccggcaccgacaaggaccagaucuuccucuacgcccaggccuccggccgcaucaccgucuccaccaagcgcucccagcaggccgucauccccaacaucggcucccgcccccgcguccgcaacauccccucccgcgucuccaucuacuggaccaucgucaagcccggcgacauccuccucaucaacuccaccggcaaccucaucgccccccgcggcuacuucaagauccgcuccggcaaguccuccaucaugcgcuccgacgcccccaucuccaagugcaacuccgccugcaucacccccaacggcuccauccccaacgacaagcccuuccagaacgucaaccgcaucaccuacggcgccugcccccgcuacgucaagcagaacacccucaagcucgccaccggcaugcgcaacguccccgagaagcagacccgcggcaucuucggcgccaucgccggcuucaucgagaacggcugggagggcauggucgacggcugguacggcuuccgccaccagaacuccgagggccgcggccaggccgccgaccucaaguccacccaggccgccaucgaccagaucaacggcaagcucaaccgccucaucggcaagaccaacgagaaguuccaccagaucgagaaggaguucuccgaggucgagggccgcauccaggaccucgagaaguacgucgaggacaccaagaucgaccucugguccuacaacgccgagcuccucgucgcccucgagaaccagcacaccaucgaccucaccgacuccgagaugaacaagcucuucgagaagaccaagaagcagcuccgcgagaacgccgaggacaugggcaacggcugcuucaagaucuaccacaagugcgacaacgccugcaucggcuccauccgcaacggcaccuacgaccacgacgucuaccgcgacgaggcccucaacaaccgcuuccagaucaagggcgucgagcucaaguccggcuacaaggacuggauccucuggaucuccuucgccaucuccugcuuccuccucugcgucgcccuccucggcuucaucaugugguccugccagaagggcaacauccgcugcaacaucugcaucuga

SEQ ID NO: 106020 - RNA, 1701 nt, Artificial Sequence
  derived and/or modified CDS sequence (opt2) from hemagglutinin__InfluenzaA__AGK63041
augaagaccaucaucgcccucuccuacauccucugccucgucuucgcccagaagcuccccggcaacgacaacuccaccgccacccucugccucggccaccacgccguccccaacggcaccaucgucaagaccaucaccaacgaccagaucgaggucaccaacgccaccgagcucguccaguccuccuccaccggcgagaucugcgacuccccccaccagauccucgacggcgagaacugcacccucaucgacgcccuccucggcgacccccagugcgacggccuccagaacaagaagugggaccucaucgucgagcgcuccaaggcccacuccuacugcuaccccuacgacguccccgacuacgccucccuccgcucccucgucgccuccuccggcacccucgaguucaacaacgaguccuucaacuggaccgaggucacccagaacggcaccuccuccgccugcauccgccgcuccaacaacuccuucuucucccgccucaacuggcucacccaccucaacuucaaguaccccgcccucaacgucaccaugcccaacaacgagcaguucgacaagcucuacaucuggggcguccaccaccccggcaccgacaaggaccagaucuuccucuacgcccaggccuccggccgcaucaccgucuccaccaagcgcucccagcaggccgucauccccaacaucggcucccgcccccgcguccgcaacauccccucccgcgucuccaucuacuggaccaucgucaagcccggcgacauccuccucaucaacuccaccggcaaccucaucgccccccgcggcuacuucaagauccgcuccggcaaguccuccaucaugcgcuccgacgcccccaucggcaagugcaacuccgccugcaucacccccaacggcuccauccccaacgacaagcccuuccagaacgucaaccgcaucaccuacggcgccugcccccgcuacgucaagcagaacacccucaagcucgccaccggcaugcgcaacguccccgagaagcagacccgcggcaucuucggcgccaucgccggcuucaucgagaacggcugggagggcauggucgacggcugguacggcuuccgccaccagaacuccgagggccgcggccaggccgccgaccucaaguccacccaggccgccaucgaccagaucaacggcaagcucaaccgccucaucggcaagaccaacgagaaguuccaccagaucgagaaggaguucuccgaggucgagggccgcauccaggaccucgagaaguacgucgaggacaccaagaucgaccucugguccuacaacgccgagcuccucgucgcccucgagaaccagcacaccaucgaccucaccgacuccgagaugaacaagcucuucgagaagaccaagaagcagcuccgcgagaacgccgaggacaugggcaacggcugcuucaagaucuaccacaagugcgacaacgccugcaucggcuccauccgcaacggcaccuacgaccacgacgucuaccgcgacgaggcccucaacaaccgcuuccagaucaagggcgucgagcucaaguccggcuacaaggacuggauccucuggaucuccuucgccaucuccugcuuccuccucugcgucgcccuccucggcuucaucaugugggccugccagaagggcaacauccgcugcaacaucugcaucuga

SEQ ID NO: 106021 - RNA, 1701 nt, Artificial Sequence
  derived and/or modified CDS sequence (opt2) from hemagglutinin__InfluenzaA__AGK63043
augaagaccaucaucgcccucuccuacauccucugccucgucuucgcccagaagcuccccggcaacgacaacuccaccgccacccucugccucggccaccacgccguccccaacggcaccaucgucaagaccaucaccaacgaccagaucgaggucaccaacgccaccgagcucguccaguccuccuccaccggcgagaucugcgacuccccccaccagauccucgacggcgagaacugcacccucaucgacgcccuccucggcgacccccagugcgacggcuuccagaacaagaagugggaccucuucgucgagcgcuccaaggccuacuccaacugcuaccccuacgacguccccgacuacgccucccuccgcucccucgucgccuccuccggcacccucgaguucaacaacgaguccuucaacuggaccggcgucacccagaacggcaccuccuccgccugcauccgccgcuccaacaacuccuucuucucccgccucaacuggcucacccaccucaacuucaaguaccccgcccucaacgucaccaugcccaacaacgagcaguucgacaagcucuacaucuggggcguccaccaccccggcaccgacaaggaccagaucuuccucuacgcccaggccuccggccgcaucaccgucuccaccaagcgcucccagcaggccgucauccccaacaucggcucccgcccccgcguccgcaacauccccucccgcgucuccaucuacuggaccaucgucaagcccggcgacauccuccucaucaacuccaccggcaaccucaucgccccccgcggcuacuucaagauccgcuccggcaaguccuccaucaugcgcuccgacgcccccaucggcaagugcaacuccgccugcaucacccccaacggcuccauccccaacgacaagcccuuccagaacgucaaccgcaucaccuacggcgccugcccccgcuacgucaagcaguccacccucaagcucgccaccggcaugcgcaacguccccgagaagcagacccgcggcaucuucggcgccaucgccggcuucaucgagaacggcugggagggcauggucgacggcugguacggcuuccgccaccagaacuccgagggccgcggccaggccgccgaccucaaguccacccaggccgccaucgaccagaucaacggcaagcucaaccgccucaucggcaagaccaacgagaaguuccaccagaucgagaaggaguucuccgaggucgagggccgcauccaggaccucgagaaguacgucgaggacaccaagaucgaccucugguccuacaacgccgagcuccucgucgcccucgagaaccagcacaccaucgaccucaccgacuccgagaugaacaagcucuucgagaagaccaagaagcagcuccgcgagaacgccgaggacaugggcaacggcugcuucaagaucuaccacaagugcgacaacgccugcaucggcuccauccgcaacggcaccuacgaccacgacgucuaccgcgacgaggcccucaacaaccgcuuccagaucaagggcgucgagcucaaguccggcuacaaggacuggauccucuggaucuccuucgccaucuccugcuuccuccucugcgucgcccuccucggcuucaucaugugggccugccagaagggcaacauccgcugcaacaucugcaucuga

SEQ ID NO: 106022 - RNA, 1701 nt, Artificial Sequence
  derived and/or modified CDS sequence (opt2) from hemagglutinin__InfluenzaA__AGK63045
augaagaccaucaucgcccucuccuacauccucugccucgucuucgcccagaagcuccccggcaacgacaacuccaccgccacccucugccucggccaccacgccguccccaacggcaccaucgucaagaccaucaccaacgaccagaucgaggucaccaacgccaccgagcucguccaguccuccuccaccggcgagaucugcaacuccccccaccagauccucgacggcgagaacugcacccucaucgacgcccuccucggcgacccccagugcgacggcuuccagaagaagaagugggaccucuucgucgagcgcuccaaggccuacuccaacugcuaccccuacgacguccccgacuacgccucccuccgcucccucgucgccuccuccggcacccucgaguucaacaacgaguccuucaacuggaccggcgucacccagaacggcaccuccuccgccugcauccgcaaguccaacuccuccuucuucucccgccucaacuggcucacccaccucaacuucaaguaccccgcccucaacgucaccaugcccaacaacgagcaguucgacaagcucuacaucuggggcguccaccaccccggcaccgacaaggaccagaucuuccucuacgcccaggccuccggccgcaucaccgucuccaccaagcgcucccagcaggccgucauccccaacaucggcucccgcccccgcauccgcaacauccccucccgcaucuccaucuacuggaccaucgucaagcccggcgacauccuccucaucaacuccaccggcaaccucaucgccccccgcggcuacuucaagauccgcuccggcaaguccuccaucaugcgcuccgacgcccccaucggcaagugcaacuccgagugcaucacccccaacggcuccauccccaacgacaagcccuuccagaacgucaaccgcaucaccuacggcgccugcccccgcuacgucaagcaguccacccucaagcucgccaccggcaugcgcaacguccccgagaagcagacccgcggcaucuucggcgccaucgccggcuucaucgagaacggcugggagggcauggucgacggcugguacggcuuccgccaccagaacuccgagggccgcggccaggccgccgaccucaaguccacccaggccgccaucgaccagaucaacggcaagcucaaccgccucaucggcaagaccaacgagaaguuccaccagaucgagaaggaguucuccgaggucgagggccgcauccaggaccucgagaaguacgucgaggacaccaagaucgaccucugguccuacaacgcccagcuccucgucgcccucgagaaccagcacaccaucgaccucaccgacuccgagaugaacaagcucuucgagaagaccaagaagcagcuccgcgagaacgccgaggacaugggcaacggcugcuucaagaucuaccacaagugcgacaacgccugcaucggcuccauccgcaacggcaccuacgaccacgacgucuaccgcgacgaggcccucaacaaccgcuuccagaucaagggcgucgagcucaaguccggcuacaaggacuggauccucuggaucuccuucgccaucuccugcuuccuccucugcgucgcccuccucggcuucaucaugugggccugccagaagggcaacauccgcugcaacaucugcaucuga

SEQ ID NO: 106023 - RNA, 1701 nt, Artificial Sequence
  derived and/or modified CDS sequence (opt2) from hemagglutinin__InfluenzaA__AGK63047
augaaggccauccucgucguccuccucuacaccuucgccaccgccaacgccgacacccucugcaucggcuaccacgccaacaacuccaccgacaccgucgacaccguccucgagaagaacgucaccgucacccacuccgucaaccuccucgaggacaagcacaacggcaagcucugcaagcuccgcggcgucgccccccuccaccucggcaagugcaacaucgccggcuggauccucggcaaccccgagugcgagucccucuccaccgccuccuccugguccuacaucgucgagaccuccuccuccgacaacggcaccugcuaccccggcgacuucaucaacuacgaggagcuccgcgagcagcucuccuccgucuccuccuucgagcgcuucgagaucuuccccaagaccuccuccuggcccaaccacgacuccaacaagggcgucaccgccgccugcccccacgccggcgccaaguccuucuacaagaaccucaucuggcucgucaagaagggcaacuccuaccccaagcucuccaaguccuacaucaacgacaagggcaaggagguccucguccucuggggcauccaccaccccuccaccaccgccgaccagcagucccucuaccagaacgccgacgccuacgucuucgucggcaccucccgcuacuccaagaaguucaagcccgagaucgccauccgccccaagguccgcgaccgcgagggccgcaugaacuacuacuggacccucaucgagcccggcgacaagaucaccuucgaggccaccggcaaccucgucgucccccgcuacgccuucgccauggagcgcaacgccggcuccggcaucaucaucuccgacacccccguccacgacugcaacaccgccugccagacccccgagggcgccaucaacaccucccuccccuuccagaacauccaccccaucaccaucggcaagugccccaaguacgucaaguccaccaagcuccgccucgccaccggccuccgcaacguccccuccauccagucccgcggccucuucggcgccaucgccggcuucaucgagggcggcuggaccggcauggucgacggcugguacggcuaccaccaccagaacgagcagggcuccggcuacgccgccgaccucaaguccacccagaacgccaucgacaagaucaccaacaaggucaacuccgucaucgagaagaugaacacccaguucaccgccgucggcaaggaguucaaccaccucgagaagcgcaucgagaaccucaacaagaaggucgacgacggcuuccucgacaucuggaccuacaacgccgagcuccucguccuccucgagaacgagcgcacccucgacuaccacgacuccaacgucaagaaccucuacgagaagguccgcaaccagcucaagaacaacgccaaggagaucggcaacggcugcuucgaguucuaccacaagugcgacaacaccugcauggaguccgucaagaacggcaccuacgacuaccccaaguacuccgaggaggccaagcucaaccgcgagaagaucgacggcgucaagcucgaguccacccgcaucuaccagauccucgccaucuacuccaccgucgccuccucccucguccucgucgucucccucggcgccaucuccuucuggaugugcuccaacggcucccuccagugccgcaucugcaucuga

SEQ ID NO: 106024 - RNA, 1683 nt, Artificial Sequence
  derived and/or modified CDS sequence (opt2) from hemagglutinin__InfluenzaA__AGK82158
augaacacccagauccucgucuucgcccucaucgccaucauccccaccaacgccgacaagaucugccucggccaccacgccgucuccaacggcaccaaggucaacacccucaccgagcgcggcgucgaggucgucaacgccaccgagaccgucgagcgcaccaacaucccccgcaucugcuccaagggcaagcgcaccgucgaccucggccagugcggccuccucggcaccaucaccggccccccccagugcgaccaguuccucgaguucuccgccgaccucaucaucgagcgccgcgagggcuccgacgucugcuaccccggcaaguucgucaacgaggaggcccuccgccagauccuccgcgaguccggcggcaucgacaaggaggccaugggcuucaccuacuccggcauccgcaccaacggcgccaccuccgccugccgccgcuccggcuccuccuucuacgccgagaugaaguggcuccucuccaacaccgacaacgccgccuucccccagaugaccaaguccuacaagaacacccgcaagucccccgcccucaucgucuggggcauccaccacuccgucuccaccgccgagcagaccaagcucuacggcuccggcaacaagcucgucaccgucggcuccuccaacuaccagcaguccuucguccccucccccggcgcccgcccccaggucaacggccucuccggccgcaucgacuuccacuggcucaugcucaaccccaacgacaccgucaccuucuccuucaacggcgccuucaucgcccccgaccgcgccuccuuccuccgcggcaaguccaugggcauccaguccggcguccaggucgacgccaacugcgagggcgacugcuaccacuccggcggcaccaucaucuccaaccuccccuuccagaacaucgacucccgcgccgucggcaagugcccccgcuacgucaagcagcgcucccuccuccucgccaccggcaugaagaacguccccgagauccccaagggccgcggccucuucggcgccaucgccggcuucaucgagaacggcugggagggccucaucgacggcugguacggcuuccgccaccagaacgcccagggcgagggcaccgccgccgacuacaaguccacccaguccgccaucgaccagaucaccggcaagcucaaccgccucaucgagaagaccaaccagcaguucgagcucaucgacaacgaguucaacgaggucgagaagcagaucggcaacgucaucaacuggacccgcgacuccaucaccgaggucugguccuacaacgccgagcuccucgucgccauggagaaccagcacaccaucgaccucgccgacuccgagauggacaagcucuacgagcgcgucaagcgccagcuccgcgagaacgccgaggaggacggcaccggcugcuucgagaucuuccacaagugcgacgacgacugcauggccuccauccgcaacaacaccuacgaccacuccaaguaccgcgaggaggccaugcagaaccgcauccagaucgaccccgucaagcucuccuccggcuacaaggacgucauccucugguucuccuucggcgccuccugcuucauccuccucgccaucgucaugggccucgucuucaucugcgucaagaacggcaacaugcgcugcaccaucugcaucuga

SEQ ID NO: 106025 - RNA, 1683 nt, Artificial Sequence
  derived and/or modified CDS sequence (opt2) from hemagglutinin__InfluenzaA__AGK84857
augaacacccagauccucgucuucgcccucaucgccaucauccccaccaacgccgacaagaucugccucggccaccacgccgucuccaacggcaccaaggucaacacccucaccgagcgcggcgucgaggucgucaacgccaccgagaccgucgagcgcaccaacaucccccgcaucugcuccaagggcaagcgcaccgucgaccucggccagugcggccuccucggcaccaucaccggccccccccagugcgaccaguuccucgaguucuccgccgaccucaucaucgagcgccgcgagggcuccgacgucugcuaccccggcaaguucgucaacgaggaggcccuccgccagauccuccgcgaguccggcggcaucgacaaggaggccaugggcuucaccuacuccggcauccgcaccaacggcgccaccuccgccugccgccgcuccggcuccuccuucuacgccgagaugaaguggcuccucuccaacaccgacaacgccgccuucccccagaucaccaaguccuacaagaacacccgcaagucccccgcccucaucgucuggggcauccaccacuccgucuccaccgccgagcagaccaagcucuacggcuccggcaacaagcucgucaccgucggcuccuccaacuaccagcaguccuucguccccucccccggcgcccgcccccaggucaacggccucuccggccgcaucgacuuccacuggcucaugcucaaccccaacgacaccgucaccuucuccuucaacggcgccuucaucgcccccgaccgcgccuccuuccuccgcggcaaguccaugggcauccaguccggcguccaggucgacgccaacugcgagggcgacugcuaccacuccggcggcaccaucaucuccaaccuccccuuccagaacaucgacucccgcgccgucggcaagugcccccgcuacgucaagcagcgcucccuccuccucgccaccggcaugaagaacguccccgagauccccaagggccgcggccucuucggcgccaucgccggcuucaucgagaacggcugggagggccucaucgacggcugguacggcuuccgccaccagaacgcccagggcgagggcaccgccgccgacuacaaguccacccaguccgccaucgaccagaucaccggcaagcucaaccgccucaucgagaagaccaaccagcaguucgagcucaucgacaacgaguucaacgaggucgagaagcagaucggcaacgucaucaacuggacccgcgacuccaucaccgaggucugguccuacaacgccgagcuccucgucgccauggagaaccagcacaccaucgaccucgccgacuccgagauggacaagcucuacgagcgcgucaagcgccagcuccgcgagaacgccgaggaggacggcaccggcugcuucgagaucuuccacaagugcgacgacgacugcauggccuccauccgcaacaacaccuacgaccacuccaaguaccgcgaggaggccaugcagaaccgcauccagaucgaccccgucaagcucuccuccggcuacaaggacgucauccucugguucuccuucggcgccuccugcuucauccuccucgccaucgucaugggccucgucuucaucugcgucaagaacggcaacaugcgcugcaccaucugcaucuga

SEQ ID NO: 106026 - RNA, 1683 nt, Artificial Sequence
  derived and/or modified CDS sequence (opt2) from hemagglutinin__InfluenzaA__AGK84860
augaacacccagauccucgucuucgcccucaucgccaucauccccaccaacgccgacaagaucugccucggccaccacgccgucuccaacggcaccaaggucaacacccucaccgagcgcggcgucgaggucgucaacgccaccgagaccgucgagcgcaccaacaucccccgcaucugcuccaagggcaagaugaccgucgaccucggccagugcggccuccucggcaccaucaccggccccccccagugcgaccaguuccucgaguucuccgccgaccucaucaucgagcgccgcgagggcuccgacgucugcuaccccggcaaguucgucaacgaggaggcccuccgccagauccuccgcgaguccggcggcaucgacaaggaggccaugggcuucaccuacuccggcauccgcaccaacggcgccaccuccgccugccgccgcuccggcuccuccuucuacgccgagaugaaguggcuccucuccaacaccgacaacgccgccuucccccagaugaccaaguccuacaagaacacccgcaagucccccgcccucaucgucuggggcauccaccacuccgucuccaccgccgagcagaccaagcucuacggcuccggcaacaagcucgucaccgucggcuccuccaacuaccagcaguccuucguccccucccccggcgcccgcccccaggucaacggccucuccggccgcaucgacuuccacuggcucaugcucaaccccaacgacaccgucaccuucuccuucaacggcgccuucaucgcccccgaccgcgccuccuuccuccgcggcaaguccaugggcauccaguccggcguccaggucgacgccaacugcgagggcgacugcuaccacuccggcggcaccaucaucuccaaccuccccuuccagaacaucgacucccgcgccgucggcaagugcccccgcuacgucaagcagcgcucccuccuccucgccaccggcaugaagaacguccccgagauccccaagggccgcggccucuucggcgccaucgccggcuucaucgagaacggcugggagggccucaucgacggcugguacggcuuccgccaccagaacgcccagggcgagggcaccgccgccgacuacaaguccacccaguccgccaucgaccagaucaccggcaagcucaaccgccucaucgagaagaccaaccagcaguucgagcucaucgacaacgaguucaacgaggucgagaagcagaucggcaacgucaucaacuggacccgcgacuccaucaccgaggucugguccuacaacgccgagcuccucgucgccauggagaaccagcacaccaucgaccucgccgacuccgagauggacaagcucuacgagcgcgucaagcgccagcuccgcgagaacgccgaggaggacggcaccggcugcuucgagaucuuccacaagugcgacgacgacugcauggccuccauccgcaacaacaccuacgaccacuccaaguaccgcgaggaggccaugcagaaccgcauccagaucgaccccgucaagcucuccuccggcuacaaggacgucauccucugguucuccuucggcgccuccugcuucauccuccucgccaucgucaugggccucgucuucaucugcgucaagaacggcaacaugcgcugcaccaucugcaucuga

SEQ ID NO: 106027 - RNA, 1683 nt, Artificial Sequence
  derived and/or modified CDS sequence (opt2) from hemagglutinin__InfluenzaA__AGK84863
augaacacccagauccucgucuucgcccucaucgccaucauccccaccaacgccgacaagaucugccucggccaccacgccgucuccaacggcaccaaggucaacacccucaccgagcgcggcgucgaggucgucaacgccaccgagaccgucgagcgcaccaacaucccccgcaucugcuccaagggcaagaagaccgucgaccucggccagugcggccuccucggcaccaucaccggccccccccagugcgaccaguuccucgaguucuccgccgaccucaucaucgagcgccgcgagggcuccgacgucugcuaccccggcaaguucgucaacgaggaggcccuccgccagauccuccgcgaguccggcggcaucgacaaggaggccaugggcuucaccuacuccggcauccgcaccaacggcgccaccuccgccugccgccgcuccggcuccuccuucuacgccgagaugaaguggcuccucuccaacaccgacaacgccgccuucccccagaugaccaaguccuacaagaacacccgcaagucccccgcccucaucgucuggggcauccaccacuccgucuccaccgccgagcagaccaagcucuacggcuccggcaacaagcucgucaccgucggcuccuccaacuaccagcaguccuucguccccucccccggcgcccgcccccaggucaacggccucuccggccgcaucgacuuccacuggcucaugcucaaccccaacgacaccgucaccuucuccuucaacggcgccuucaucgcccccgaccgcgccuccuuccuccgcggcaaguccaugggcauccaguccggcguccaggucgacgccaacugcgagggcgacugcuaccacuccggcggcaccaucaucuccaaccuccccuuccagaacaucgacucccgcgccgucggcaagugcccccgcuacgucaagcagcgcucccuccuccucgccaccggcaugaagaacguccccgagauccccaagggccgcggccucuucggcgccaucgccggcuucaucgagaacggcugggagggccucaucgacggcugguacggcuuccgccaccagaacgcccagggcgagggcaccgccgccgacuacaaguccacccaguccgccaucgaccagaucaccggcaagcucaaccgccucaucgagaagaccaaccagcaguucgagcucaucgacaacgaguucaacgaggucgagaagcagaucggcaacgucaucaacuggacccgcgacuccaucaccgaggucugguccuacaacgccgagcuccucgucgccauggagaaccagcacaccaucgaccucgccgacuccgagauggacaagcucuacgagcgcgucaagcgccagcuccgcgagaacgccgaggaggacggcaccggcugcuucgagaucuuccacaagugcgacgacgacugcauggccuccauccgcaacaacaccuacgaccacuccaaguaccgcgaggaggccaugcagaaccgcauccagaucgaccccgucaagcucuccuccggcuacaaggacgucauccucugguucuccuucggcgccuccugcuucauccuccucgccaucgucaugggccucgucuucaucugcgucaagaacggcaacaugcgcugcaccaucugcaucuga

SEQ ID NO: 106028 - RNA, 1701 nt, Artificial Sequence
  derived and/or modified CDS sequence (opt2) from hemagglutinin__InfluenzaA__AGL07713
augaaggccauccucgucguccuccucuacaccuucgccaccgccaacgccgacacccucugcaucggcuaccacgccaacaacuccaccgacaccgucgacaccguccucgagaagaacgucaccgucacccgcuccgucaaccuccucgaggacaagcacaacggcaagcucugcaagcuccgcggcgucgccccccuccaccucggcaagugcaacaucgccggcuggauccucggcaaccccgagugcgagucccucuccaccgccuccuccugguccuacaucgucgagaccuccuccuccgacaacggcaccugcuaccccggcgacuucaucgacuacgaggagcuccgcgagcagcucuccuccgucuccuccuucgagcgcuucgagaucuuccccaagaccggcuccuggcccaaccacgacuccaacaagggcgucaccgccgccugcccccacgccggcgccaagggcuucuacaagaaccucaucuggcucgucgagaagggcaacuccuaccccaagcucuccaaguccuacaucaacgacaagggcaaggagguccucguccucuggggcauccaccaccccuccaccaccgccgaccagcagcgccucuaccagaacgccgacaccuacgucuucgucggcaccucccgcuacuccaagaaguucaagcccgagaucgccauccgccccaagguccgcgaccaggagggccgcaugaacuacuacuggacccucgucgagcccggcgacaagaucaccuucgaggccaccggcaaccucgucgucccccgcuacgccuucgccauggagcgcaacgccggcuccggcaucaucaucuccgacacccccguccacgacugcaacaccaccugccagacccccaagggcgccaucaacaccucccuccccuuccagaacauccaccccaucaccaucggcaagugccccaaguacgucaaguccaccaagcuccgccucgccaccggccuccgcaacguccccuccauccagucccgcggccucuucggcgccaucgccggcuucaucgagggcggcuggaccggcauggucgacggcugguacggcuaccaccaccagaacgagcagggcuccggcuacgccgccgaccucaaguccacccagaacgccaucgacaagaucaccaacaaggucaacuccgucaucgagaagaugaacacccaguucaccgccgucggcaaggaguucaaccaccucgagaagcgcaucgagaaccucaacaagaaggucgacgacggcuuccucgacaucuggaccuacaacgccgagcuccucguccuccucgagaacgagcgcacccucgacuaccacgacuccaacgucaagaaccucuacgagaagguccgcaaccagcucaagaacaacgccaaggagaucggcaacggcugcuucgaguucuaccacaagugcgacaacaccugcauggaguccgucaagaacggcaccuacgacuaccccaaguacuccgaggaggccaagcucaaccgcgaggagaucgacggcgucaagcucgaguccacccgcaucuaccagauccucgccaucuacuccaccgucgccuccucccucguccucgucgucucccucggcgccaucuccuucuggaugugcuccaacggcucccuccagugccgcaucugcaucuga

SEQ ID NO: 106029 - RNA, 1701 nt, Artificial Sequence
  derived and/or modified CDS sequence (opt2) from hemagglutinin__InfluenzaA__AGL09731
augaagaccaucaucgcccucuccuacauccucugccucgucuucgcccagaagauccccggcaacgacaacuccaccgccacccucugccucggccaccacgccguccccaacggcaccaucgucaagaccaucaccaacgaccgcaucgaggucaccaacgccaccgagcucguccagaacuccuccaucggcgagaucugcgacuccccccaccagauccucgacggcgagaacugcacccucaucgacgcccuccucggcgacccccagugcgacggcuuccagaacaagaagugggaccucuucgucgagcgcuccaaggccuacuccaacugcuaccccuacgacguccccgacuacgccucccuccgcucccucgucgccuccuccggcacccucgaguucaacaacgaguccuucaacuggaccggcgucacccagaacggcaccuccuccgccugcauccgccgcuccaacuccuccuucuucucccgccucaacuggcucacccaccucaacuucaaguaccccgcccucaacgucaccaugcccaacaacgagcaguucgacaagcucuacaucuggggcguccaccaccccggcaccgacaaggaccagaucuuccucuacgcccaguccuccggccgcaucaccgucuccaccaagcgcucccagcaggccgucauccccaacaucggcucccgcccccgcauccgcaacauccccucccgcaucuccaucuacuggaccaucgucaagcccggcgacauccuccucaucaacuccaccggcaaccucaucgccccccgcggcuacuucaagauccgcuccggcaaguccuccaucaugcgcuccgacgcccccaucggcaagugcaaguccgagugcaucacccccaacggcuccauccccaacgacaagcccuuccagaacgucaaccgcaucaccuacggcgccugcccccgcuacgucaagcaguccacccucaagcucgccaccggcaugcgcaacguccccgagaagcagacccgcggcaucuucggcgccaucgccggcuucaucgagaacggcugggagggcauggucgacggcugguacggcuuccgccaccagaacuccgagggccgcggccaggccgccgaccucaaguccacccaggccgccaucgaccagaucaacggcaagcucaaccgccucaucggcaagaccaacgagaaguuccaccagaucgagaaggaguucuccgaggucgagggccgcauccaggaccucgagaaguacgucgaggacaccaagaucgaccucugguccuacaacgccgagcuccucgucgcccucgagaaccagcacaccaucgaccucaccgacuccgagaugaacaagcucuucgagaagaccaagaagcagcuccgcgagaacgccgaggacaugggcaacggcugcuucaagaucuaccacaagugcgacaacgccugcaucggcuccauccgcaacggcaccuacgaccacgacgucuaccgcgacgaggcccucaacaaccgcuuccagaucaagggcgucgagcucaaguccggcuacaaggacuggauccucuggaucuccuucgccaucuccugcuuccuccucugcgucgcccuccucggcuucaucaugugggccugccagaagggcaacauccgcugcaacaucugcaucuga

SEQ ID NO: 106030 - RNA, 1701 nt, Artificial Sequence
  derived and/or modified CDS sequence (opt2) from hemagglutinin__InfluenzaA__AGL09732
augaagaccaucaucgcccucuccuacauccucugccucgucuucgcccagaagcuccccggcaacgacaacuccaccgccacccucugccucggccaccacgccguccccaacggcaccaucgucaagaccaucaccaacgaccgcaucgaggucaccaacgccaccgagcucguccagaacuccuccaucggcgagaucugcgacuccccccaccagauccucgacggcgagaacugcacccucaucgacgcccuccucggcgacccccagugcgacggcuuccagaacaagaagugggaccucuucgucgagcgcuccaaggccuacuccaacugcuaccccuacgacguccccgacuacgccucccuccgcucccucgucgccuccuccggcacccucgaguucaacaacgaguccuucaacugggccggcgucacccagaacggcaccuccuccgccugcauccgcggcuccaacuccuccuucuucucccgccucaacuggcucacccaccucaacuucaaguaccccgcccucaacgucaccaugcccaacaacgagcaguucgacaagcucuacaucuggggcguccaccaccccggcaccgacaaggaccagaucuuccucuacgcccaguccuccggccgcaucaccgucuccaccaagcgcucccagcaggccgucauccccaacaucggcucccgcccccgcauccgcaacauccccucccgcaucuccaucuacuggaccaucgucaagcccggcgacauccuccucaucaacuccaccggcaaccucaucgccccccgcggcuacuucaagauccgcuccggcaaguccuccaucaugcgcuccgacgcccccaucggcaagugcaaguccgagugcaucacccccaacggcuccauccccaacgacaagcccuuccagaacgucaaccgcaucaccuacggcgccugcccccgcuacgucaagcaguccacccucaagcucgccaccggcaugcgcaacguccccgagaagcagacccgcggcaucuucggcgccaucgccggcuucaucgagaacggcugggagggcauggucgacggcugguacggcuuccgccaccagaacuccgagggccgcggccaggccgccgaccucaaguccacccaggccgccaucgaccagaucaacggcaagcucaaccgccucaucggcaagaccaacgagaaguuccaccagaucgagaaggaguucuccgaggucgagggccgcauccaggaccucgagaaguacgucgaggacaccaagaucgaccucugguccuacaacgccgagcuccucgucgcccucgagaaccagcacaccaucgaccucaccgacuccgagaugaacaagcucuucgagaagaccaagaagcagcuccgcgagaacgccgaggacaugggcaacggcugcuucaagaucuaccacaagugcgacaacgccugcaucggcuccauccgcaacggcaccuacgaccacgacgucuaccgcgacgaggcccucaacaaccgcuuccagaucaagggcgucgagcucaaguccggcuacaaggacuggauccucuggaucuccuucgccaucuccugcuuccuccucugcgucgcccuccucggcuucaucaugugggccugccagaagggcaacauccgcugcaacaucugcaucuga

SEQ ID NO: 106031 - RNA, 1701 nt, Artificial Sequence
  derived and/or modified CDS sequence (opt2) from hemagglutinin__InfluenzaA__AGL09734
augaagaccaucaucgcccucuccuacauccucugccucgucuucgcccagaaguuccccggcaacgacaacuccaccgccacccucugccucggccaccacgccguccccaacggcaccaucgucaagaccaucaccaacgaccgcaucgaggucaccaacgccaccgagcucguccagaacuccuccaucggcgagaucugcgacuccccccaccagauccucgacggcgagaacugcacccucaucgacgcccuccucggcgacccccagugcgacggcuuccagaacaagaagugggaccucuucaucgagcgcuccaaggccuacuccaacugcuaccccuacgacguccccgacuacgccucccuccgcucccucgucgccuccuccggcacccucgaguucaacaacgaguccuucaacuggaccggcgucacccagaacggcaccuccuccgccugcauccgccgcuccaacuccuccuucuucucccgccucaacuggcucacccaccucaacuucaaguaccccgcccucaacgucaccaugcccaacaacgagcaguucgacaagcucuacaucuggggcguccaccaccccggcaccgacaaggaccagaucuuccucuacgcccaguccuccggccgcaucaccgucuccaccaagcgcucccagcaggccgucauccccaacaucggcucccgcccccgcauccgcaacauccccucccgcaucuccaucuacuggaccaucgucaagcccggcgacauccuccucaucaacuccaccggcaaccucaucgccccccgcggcuacuucaagauccgcuccggcaaguccuccaucaugcgcuccgacgcccccaucggcaagugcaaguccgagugcaucacccccaacggcuccauccccaacgacaagcccuuccagaacgucaaccgcaucaccuacggcgccugcccccgcuacgucaagcaguccacccucaagcucgccaccggcaugcgcaacguccccgagaagcagacccgcggcaucuucggcgccaucgccggcuucaucgagaacggcugggagggcauggucgacggcugguacggcuuccgccaccagaacuccgagggccgcggccaggccgccgaccucaaguccacccaggccgccaucgaccagaucaacggcaagcucaaccgccucaucggcaagaccaacgagaaguuccaccagaucgagaaggaguucuccgaggucgagggccgcauccaggaccucgagaaguacgucgaggacaccaagaucgaccucugguccuacaacgccgagcuccucgucgcccucgagaaccagcacaccaucgaccucaccgacuccgagaugaacaagcucuucgagaagaccaagaagcagcuccgcgagaacgccgaggacaugggcaacggcugcuucaagaucuaccacaagugcgacaacgccugcaucggcuccauccgcaacggcaccuacgaccacgacgucuaccgcgacgaggcccucaacaaccgcuuccagaucaagggcgucgagcucaaguccggcuacaaggacuggauccucuggaucuccuucgccaucuccugcuuccuccucugcgucgcccuccucggcuucaucaugugggccugccagaagggcaacauccgcugcaacaucugcaucuga

SEQ ID NO: 106032 - RNA, 1701 nt, Artificial Sequence
  derived and/or modified CDS sequence (opt2) from hemagglutinin__InfluenzaA__AGL09735
augaagaccaucaucgcccucuccuacauccucugccucgucuucgcccagaagcuccccggcaacgacaacuccaccgccacccucugccucggccaccacgccguccccaacggcaccaucgucaagaccaucaccaacgaccgcaucgaggucaccaacgccaccgagcucguccagaacuccuccaucggcgagaucugcgacuccccccaccagauccucgacggcgagaacugcacccucaucgacgcccuccucggcgacccccagugcgacggcuuccagaacaagaagugggaccucuucgucgagcgcuccaaggccuacuccaacugcuaccccuacgacguccccgacuacgccucccuccgcucccucgucgccuccuccggcacccucgaguucaacaacgaguccuucaacugggccggcgucacccagaacggcaccuccuccgccugcauccgcggcuccaacuccuccuucuucucccgccucaacuggcucacccaccucaacuucaaguaccccgcccucaacgucaccaugcccaacaacgagcaguucgacaagcucuacaucuggggcguccaccaccccggcaccgacaaggaccagaucuuccucuacgcccaguccuccggccgcaucaccgucuccaccaagcgcucccagcaggccgucauccccaacaucggcucccgcccccgcauccgcaacauccccucccgcaucuccaucuacuggaccaucgucaagcccggcgacauccuccucaucaacuccaccggcaaccucaucgccccccgcggcuacuucaagauccgcuccggcaaguccuccaucaugcgcuccgacgcccccaucggcaagugcaaguccgagugcaucacccccaacggcuccauccccaacgacaagcccuuccagaacgucaaccgcaucaccuacggcgccugcccccgcuacgucaagcaguccacccucaagcucgccaccggcaugcgcaacguccccgagaagcagacccgcggcaucuucggcgccaucgccggcuucaucgagaacggcugggagggcauggucgacggcugguacggcuuccgccaccagaacuccgagggccgcggccaggccgccgaccucaaguccacccaggccgccaucgaccagaucaacggcaagcucaaccgccucaucggcaagaccaacgagaaguuccaccagaucgagaaggaguucuccgaggucgagggccgcauccaggaccucgagaaguacgucgaggacaccaagaucgaccucugguccuacaacgccgagcuccucgucgcccucgagaaccagcacaccaucgaccucaccgacuccgagaugaacaagcucuucgagaagaccaagaagcagcuccgcgagaacgccgaggacaugggcaacggcugcuucaagaucuaccacaagugcgacaacgccugcaucggcuccauccgcaacggcaccuacgaccacgacgucuaccgcgacgaggcccucaacaaccgcuuccagaucaagggcgucgagcucaaguccggcuacaaggacuggauccucuggaucuccuucgccaucuccugcuuccuccucugcgucgcccuccucggcuucaucaugugggccugccagaagggcaacauccgcugcaacaucuccaucuga

SEQ ID NO: 106033 - RNA, 1701 nt, Artificial Sequence
  derived and/or modified CDS sequence (opt2) from hemagglutinin__InfluenzaA__AGL09736
augaagaccaucaucgcccucuccuacauccucugccucgucuucgcccagaagcuccccggcaacgacaacuccaccgccacccucugccucggccaccacgccguccccaacggcaccaucgucaagaccaucaccaacgaccagaucgaggucaccaacgccaccgagcucguccagaacuccuccaucggcgagaucugcgacuccccccaccagauccucgacggcgagaacugcacccucaucgacgcccuccucggcgacccccagugcgacggcuuccagaacaagaagugggaccucuucgucgagcgcuccaaggccuacuccaacugcuaccccuacgacguccccgacuacgccucccuccgcucccucgucgccuccuccggcacccucgaguucaacaacgaguccuucaacugggccggcgucacccagaacggcaccuccuccgccugcauccgcggcuccaacuccuccuucuucucccgccucaacuggcucacccaccucaacuucaaguaccccgcccucaacgucaccaugcccaacaacgagcaguucgacaagcucuacaucuggggcguccaccaccccggcaccgacaaggaccagaucuuccucuacgcccaguccuccggccgcaucaccgucuccaccaagcgcucccagcaggccgucauccccaacaucggcucccgcccccgcauccgcaacauccccucccgcaucuccaucuacuggaccaucgucaagcccggcgacauccuccucaucaacuccaccggcaaccucaucgccccccgcggcuacuucaagauccgcuccggcaaguccuccaucaugcgcuccgacgcccccaucggcaagugcaaguccgagugcaucacccccaacggcuccauccccaacgacaagcccuuccagaacgucaaccgcaucaccuacggcgccugcccccgcuacgucaagcaguccacccucaagcucgccaccggcaugcgcaacguccccgagaagcagacccgcggcaucuucggcgccaucgccggcuucaucgagaacggcugggagggcauggucgacggcugguacggcuuccgccaccagaacuccgagggccgcggccaggccgccgaccucaaguccacccaggccgccaucgaccagaucaacggcaagcucaaccgccucaucggcaagaccaacgagaaguuccaccagaucgagaaggaguucuccgaggucgagggccgcauccaggaccucgagaaguacgucgaggacaccaagaucgaccucugguccuacaacgccgagcuccucgucgcccucgagaaccagcacaccaucgaccucaccgacuccgagaugaacaagcucuucgagaagaccaagaagcagcuccgcgagaacgccgaggacaugggcaacggcugcuucaagaucuaccacaagugcgacaacgccugcaucggcuccauccgcaacggcaccuacgaccacgacgucuaccgcgacgaggcccucaacaaccgcuuccagaucaagggcgucgagcucaaguccggcuacaaggacuggauccucuggaucuccuucgccaucuccugcuuccuccucugcgucgcccuccucggcuucaucaugugggccugccagaagggcaacauccgcugcaacaucugcaucuga

SEQ ID NO: 106034 - RNA, 1701 nt, Artificial Sequence; identical to SEQ ID NO: 105919
  derived and/or modified CDS sequence (opt2) from hemagglutinin__InfluenzaA__AGL09737

SEQ ID NO: 106035 - RNA, 1701 nt, Artificial Sequence
  derived and/or modified CDS sequence (opt2) from hemagglutinin__InfluenzaA__AGL09739
augaagaccaucaucgcccucuccuacauccucugccucgucuucgcccagaagcuccccggcaacgacaacuccaccgccacccucugccucggccaccacgccguccccaacggcaccaucgucaagaccaucaccaacgaccgcaucgaggucaccaacgccaccgagcucguccagaacuccuccaucggcgagaucugcgacuccccccaccagauccucgacggcgagaacugcacccucaucgacgcccuccucggcgacccccagugcgacggcuuccagaacaagaagugggaccucuucgucgagcgcuccaaggccuacuccuccugcuaccccuacgacguccccgacuacgccucccuccgcucccucgucgccuccuccggcacccucgaguucaacaacgaguccuucaacuggaccggcgucacccagaacggcaccuccuccgccugcauccgccgcuccaacuccuccuucuucucccgccucaacuggcucacccaccucaacuucaaguaccccgcccucaacgucaccaugcccaacaacgagcaguucgacaagcucuacaucuggggcguccaccaccccggcaccgacaaggaccagaucuuccucuacgcccaguccuccggccgcaucaccgucuccaccaagcgcucccagcaggccgucauccccaacaucggcucccgcccccgcauccgcaacauccccucccgcaucuccaucuacuggaccaucgucaagcccggcgacauccuccucaucaacuccaccggcaaccucaucgccccccgcggcuacuucaagauccgcuccggcaaguccuccaucaugcgcuccgacgcccccaucggcaagugcaaguccgagugcaucacccccaacggcuccauccccaacgacaagcccuuccagaacgucaaccgcaucaccuacggcgccugcccccgcuacgucaagcaguccacccucaagcucgccaccggcaugcgcaacguccccgagaagcagacccgcggcaucuucggcgccaucgccggcuucaucgagaacggcugggagggcauggucgacggcugguacggcuuccgccaccagaacuccgagggccgcggccaggccgccgaccucaaguccacccaggccgccaucgaccagaucaacggcaagcucaaccgccucaucggcaagaccaacgagaaguuccaccagaucgagaaggaguucuccgaggucgagggccgcauccaggaccucgagaaguacgucgaggacaccaagaucgaccucugguccuacaacgccgagcuccucgucgcccucgagaaccagcacaccaucgaccucaccgacuccgagaugaacaagcucuucgagaagaccaagaagcagcuccgcgagaacgccgaggacaugggcaacggcugcuucaagaucuaccacaagugcgacaacgccugcaucggcuccauccgcaacggcaccuacgaccacaacgucuaccgcgacgaggcccucaacaaccgcuuccagaucaagggcgucgagcucaaguccggcuacaaggacuggauccucuggaucuccuucgccaucuccugcuuccuccucugcgucgcccuccucggcuucaucaugugggccugccagaagggcaacauccgcugcaacaucugcaucuga

SEQ ID NO: 106036 - RNA, 1701 nt, Artificial Sequence; identical to SEQ ID NO: 105871
  derived and/or modified CDS sequence (opt2) from hemagglutinin__InfluenzaA__AGL09740

SEQ ID NO: 106037 - RNA, 1701 nt, Artificial Sequence; identical to SEQ ID NO: 105110
  derived and/or modified CDS sequence (opt2) from hemagglutinin__InfluenzaA__AGL09741

SEQ ID NO: 106038 - RNA, 1701 nt, Artificial Sequence
  derived and/or modified CDS sequence (opt2) from hemagglutinin__InfluenzaA__AGL09742
augaagaccaucaucgcccucuccuacauccucugccucgucuucgcccaggagcuccccggcaacgacgacuccaccgccacccucugccucggccaccacgccguccccaacggcaccaucgucaagaccaucaccaacgaccagaucgaggucaccaacgccaccgagcucguccaguccuccuccaccggcgagaucugcaacuccccccaccagauccucgacggcgagaacugcacccucaucgacgcccuccucggcgacccccagugcgacggcuuccagaacaagaagugggaccucuucgucgagcgcuccaaggcccacuccaacugcuaccccuacgacguccccgacuacgccucccuccgcucccucgucgccuccuccggcacccucgaguucaacaacgaguccuucaacuggaccggcgucacccagaacggcaccuccuccgccugcauccgccgcuccaacaacuccuucuucucccgccucaacuggcucacccaccucaacuucaaguaccccgcccucaacgucaccaugcccaacaacgagcaguucgacaagcucuacaucuggggcguccaccaccccggcaccgacaaggaccagaucuuccucuacgcccaggccuccggccgcaucaccgucuccaccaagcgcucccagcaggccgucauccccaacaucggcucccgcccccgcguccgcaacauccccucccgcgucuccaucuacuggaccaucgucaagcccggcgacauccuccucaucaacuccaccggcaaccucaucgccccccgcggcuacuucaagauccgcuccggcaaguccuccaucaugcgcuccgacgcccccaucggcaagugcaacuccgccugcaucacccccaacggcuccauccccaacgacaagcccuuccagaacgucaaccgcaucaccuacggcgccugcccccgcuacgucaagcagaacacccucaagcucgccaccggcaugcgcaacguccccgagacccagacccgcggcaucuucggcgccaucgccggcuucaucgagaacggcugggagggcauggucgacggcugguacggcuuccgccaccagaacuccgagggccgcggccaggccgccgaccucaaguccacccaggccgccaucgaccagaucaacggcaagcucaaccgccucaucggcaagaccaacgagaaguuccaccagaucgagaaggaguucuccgaggucgagggccgcauccaggaccucgagaaguacgucgaggacaccaagaucgaccucugguccuacaacgccgagcuccucgucgcccucgagaaccagcacaccaucgaccucaccgacuccgagaugaacaagcucuucgagaagaccaagaagcagcuccgcgagaacgccgaggacaugggcaacggcugcuucaagaucuaccacaagugcgacaacgccugcaucggcuccauccgcaacggcaccuacgaccacgacgucuaccgcgacgaggcccucaacaaccgcuuccagaucaagggcgucgagcuccgcuccggcuacaaggacuggauccucuggaucuccuucgccaucuccugcuuccuccucugcgucgcccuccucggcuucaucaugugggccugccagaagggcaacauccgcugcuccaucugcaucuga

SEQ ID NO: 106039 - RNA, 1701 nt, Artificial Sequence; identical to SEQ ID NO: 105894
  derived and/or modified CDS sequence (opt2) from hemagglutinin__InfluenzaA__AGL09744

SEQ ID NO: 106040 - RNA, 1701 nt, Artificial Sequence
  derived and/or modified CDS sequence (opt2) from hemagglutinin__InfluenzaA__AGL09745
augaagaccaucaucgcccucuccuacauccucugccucgucuucgcccagaagcuccccggcaacgacaacuccaccgccacccucugccucggccaccacgccguccccaacggcaccaucgucaagaccaucaccaacgaccgcaucgaggucaccaacgccaccgagcucguccagaacuccuccaucggcgagaucugcgacuccccccaccagauccucgacggcgagaacugcacccucaucgacgcccuccucggcgacccccagugcgacggcuuccagaacaagaagugggaccucuucgucgagcgcuccaaggccuacuccaacugcuaccccuacgacguccccgacuacgccucccuccgcucccucgucgccuccuccggcacccucgaguucaacaacgaguccuucaacuggaccggcgucacccagaacggcaccuccuccgccugcauccgccgcuccaacuccuccuucuucucccgccucaacuggcucacccaccucaacuucaaguaccccgcccucaacgucaccaugcccaacaacgagcaguucgacaagcucuacaucuggggcguccaccaccccggcaccgacaaggaccagaucuuccucuacgcccaguccuccggccgcaucaccgucuccaccaagcgcucccagcaggccgucauccccaacaucggcucccgcccccgcauccgcaacauccccucccgcaucuccaucuacuggaccaucgucaagcccggcgacauccuccucaucaacuccaccggcaaccucaucgccccccgcggcuacuucaagauccgcuccggcaaguccuccaucaugcgcuccgacgcccccaucggcaagugcaaguccgagugcaucacccccaacggcuccauccccaacgacaagcccuuccagaacgucaaccgcaucaccuacggcgccugcccccgcuacgucaagcaguccacccucaagcucgccaccggcaugcgcaacguccccgagaagcagacccgcggcaucuucggcgccaucgccggcuucaucgagaacggcugggagggcauggucgacggcugguacggcuuccgccaccagaacuccgagggccgcggccaggccgccgaccucaaguccacccaggccgccaucgaccagaucaacggcaagcucaaccgccucaucggcaagaccaacgagaaguuccaccagaucgagaaggaguucuccgaggucgagggccgcauccaggaccucgagaaguacgucgaggacaccaagaucgaccucugguccuacaacgccgagcuccucgucgcccucgagaaccagcacaccaucgaccucaccgacuccgagaugaacaagcucuucgagaagaccaagaagcagcuccgcgagaacgccgaggacgucggcaacggcugcuucaagaucuaccacaagugcgacaacaccugcaucggcuccauccgcaacggcaccuacgaccacaacgucuaccgcgacgaggcccucaacaaccgcuuccagaucaagggcgucgagcucaaguccggcuacaaggacuggauccucuggaucuccuucgccaucuccugcuuccuccucugcgucgcccuccucggcuucaucaugugggccugccagaagggcaacauccgcugcaacaucugcaucuga

SEQ ID NO: 106041 - RNA, 1701 nt, Artificial Sequence; identical to SEQ ID NO: 106033
  derived and/or modified CDS sequence (opt2) from hemagglutinin__InfluenzaA__AGL09746

SEQ ID NO: 106042 - RNA, 1701 nt, Artificial Sequence; identical to SEQ ID NO: 105871
  derived and/or modified CDS sequence (opt2) from hemagglutinin__InfluenzaA__AGL09747

SEQ ID NO: 106043 - RNA, 1701 nt, Artificial Sequence; identical to SEQ ID NO: 105894
  derived and/or modified CDS sequence (opt2) from hemagglutinin__InfluenzaA__AGL09748

SEQ ID NO: 106044 - RNA, 1701 nt, Artificial Sequence; identical to SEQ ID NO: 105892
  derived and/or modified CDS sequence (opt2) from hemagglutinin__InfluenzaA__AGL09749

SEQ ID NO: 106045 - RNA, 1701 nt, Artificial Sequence; identical to SEQ ID NO: 106030
  derived and/or modified CDS sequence (opt2) from hemagglutinin__InfluenzaA__AGL09750

SEQ ID NO: 106046 - RNA, 1701 nt, Artificial Sequence; identical to SEQ ID NO: 105871
  derived and/or modified CDS sequence (opt2) from hemagglutinin__InfluenzaA__AGL09751

SEQ ID NO: 106047 - RNA, 1701 nt, Artificial Sequence; identical to SEQ ID NO: 106030
  derived and/or modified CDS sequence (opt2) from hemagglutinin__InfluenzaA__AGL09753

SEQ ID NO: 106048 - RNA, 1701 nt, Artificial Sequence
  derived and/or modified CDS sequence (opt2) from hemagglutinin__InfluenzaA__AGL09754
augaagaccaucaucgcccucuccuacauccucugccucgucuucgcccagaagcuccccggcaacgacaacuccaccgccacccucugccucggccaccacgccguccccaacggcaccaucgucaagaccaucaccaacgaccgcaucgaggucaccaacgccaccgagcucguccagaacuccuccaucggcgagaucugcgacuccccccaccagauccucgacggcgagaacugcacccucaucgacgcccuccucggcgacccccagugcgacggcuuccagaacaagaagugggaccucuucgucgagcgcuccaaggccuacuccaacugcuaccccuacgacguccccgacuacgccucccuccgcucccucgucgccuccuccggcacccucgaguucaacaacgaguccuucaacuggaccggcgucacccagaacggcaccuccuccgccugcauccgccgcuccaacuccuccuucuucucccgccucaacuggcucacccaccucaacuucaaguaccccgcccucaacgucaccaugcccaacaacgagcaguucgacaagcucuacaucuggggcguccaccaccccggcaccgacaaggaccagaucuuccucuacgcccaguccuccggccgcaucaccgucuccaccaagcgcucccagcaggccgucauccccaacaucggcucccgcccccgcauccgcaacauccccucccgcaucuccaucuacuggaccaucgucaagcccggcgacauccuccucaucaacuccaccggcaaccucaucgccccccgcggcuacuucaagauccgcuccggcaaguccuccaucaugcgcuccgacgcccccaucggcaagugcaaguccgagugcaucacccccaacggcuccauccccaacgacaagcccuuccagaacgucaaccgcaucaccuacggcgccugcccccgcuacgucaagcaguccacccucaagcucgccaccggcaugcgcaacguccccgagaagcagacccgcggcaucuucggcgccaucgccggcuucaucgagaacggcugggagggcauggucgacggcugguacggcuuccgccaccagaacuccgagggccgcggccaggccgccgaccucaaguccacccaggccgccaucgaccagaucaacggcaagcucaaccgccucaucggcaagaccaacgagaaguuccaccagaucgagaaggaguucuccgaggucgagggccgcauccaggaccucgagaaguacgucgaggacaccaagaucgaccucugguccuacaacgccgagcuccucgucgcccucgagaaccagcacaccaucgaccucaccgacuccgagaugaacaagcucuucgagaagaccaagaagcagcuccgcgagaacgccgaggacaugggcaacggcugcuucaagaucuaccacaagugcgacaacgccugcaucggcuccauccgcaacggcaccuacgaccacaacgucuaccgcgacgaggcccucaacaaccgcuuccagaucaagggcgucgagcucaaguccggcuacaaggacuggauccucuggaucuccuucgccaucuccugccuccuccucugcgucgcccuccucggcuucaucaugugggccugccagaagggcaacauccgcugcaacaucugcaucuga

SEQ ID NO: 106049 - RNA, 1701 nt, Artificial Sequence; identical to SEQ ID NO: 106033
  derived and/or modified CDS sequence (opt2) from hemagglutinin__InfluenzaA__AGL09756

SEQ ID NO: 106050 - RNA, 1701 nt, Artificial Sequence
  derived and/or modified CDS sequence (opt2) from hemagglutinin__InfluenzaA__AGL09758
augaaggccauccucgucguccuccucuacaccuucgccaccgccaacgccgacacccucugcaucggcuaccacgccaacaacuccaccgacaccgucgacaccguccucgagaagaacgucaccgucacccacuccgucaaccuccucgaggacaagcacaacggcaagaucugcaagcuccgcggcgucgccccccuccaccucggcaagugcaacaucgccggcuggauccucggcaaccccgagugcgagucccucuccaccgccuccuccugguccuacaucgucgagaccuccuccuccgacaacggcaccugcuaccccggcgacuucaucgacuacgaggagcuccgcgagcagcucuccuccgucuccuccuucgagcgcuucgagaucuuccccaagaccuccuccuggcccaaccacgacuccaacaagggcgucaccgccgccugcccccacgccggcgccaagggcuucuacaagaaccucaucuggcucgucaagaagggcaacuccuaccccaagcucuccaacuccuacaucaacgacaagggcaaggagguccucguccucuggggcauccaccaccccuccaccaccgccgaccagcagucccucuaccagaacgccgacaccuacgucuucgucggcaccucccgcuacuccaagaaguucaagcccgagaucgccauccgccccaagguccgcgaccaggagggccgcaugaacuacuacuggacccucgucgagcccggcgacaagaucaccuucgaggccaccggcaaccucgucgucccccgcuacgccuucgccauggagcgcaacgccggcuccggcaucaucaucuccgacaccaccguccacgacugcaacaccaccugccagacccccaagggcgccaucaacaccucccuccccuuccagaacauccaccccaucaccaucggcaagugccccaaguacgucaaguccaccaagcuccgccucgccaccggccuccgcaacguccccuccauccagucccgcggccucuucggcgccaucgccggcuucaucgagggcggcuggaccggcauggucgacggcugguacggcuaccaccaccagaacgagcagggcuccggcuacgccgccgaccucaaguccacccagaacgccaucgacaagaucaccaacaaggucaacuccgucaucgagaagaugaacacccaguucaccgccgucggcaaggaguucaaccaccucgagaagcgcaucgagaaccucaacaagaaggucgacgacggcuuccucgacaucuggaccuacaacgccgagcuccucguccuccucgagaacgagcgcacccucgacuaccacgacuccaacgucaagaaccucuacgagaagguccgcaaccagcucaagaacaacgccaaggagaucggcaacggcugcuucgaguucuaccacaagugcgacaacaugugcauggaguccgucaagaacggcaccuacgacuaccccaaguacuccgaggaggccaagcucaaccgcgagaagaucgacggcgucaagcucgaguccacccgcaucuaccagauccucgccaucuacuccaccgucgccuccucccucguccucgucgucucccucggcgccaucuccuucuggaugugcuccaacggcucccuccagugccgcaucugcaucuga

SEQ ID NO: 106051 - RNA, 1701 nt, Artificial Sequence
  derived and/or modified CDS sequence (opt2) from hemagglutinin__InfluenzaA__AGL09760
augaagaccaucaucgccgucuccuacauccucugccucgucuucgcccaggagcuccccggcaacgacgacuccaccgccacccucugccucggccaccacgccguccccaacggcaccaucgucaagaccaucaccaacgaccagaucgaggucaccaacgccaccgagcucguccaguccuccuccaccggcgagaucugcaacuccccccaccagauccucgacggcgagaacugcacccucaucgacgcccuccucggcgacccccagugcgacggcuuccagaacaagaagugggaccucuucgucgagcgcuccaaggcccacuccaacugcuaccccuacgacguccccgacuacgccucccuccgcucccucgucgccuccuccggcacccucgaguucaacaacgaguccuucaacuggaccggcgucacccagaacggcaccuccuccgccugcauccgccgcuccaacaacuccuucuucucccgccucaacuggcucacccaccucaacuucaaguaccccgcccucaacgucaccaugcccaacaacgagcaguucgacaagcucuacaucuggggcguccaccaccccggcaccgacaaggaccagaucuuccucuacgcccaggccuccggccgcaucaccgucuccaccaagcgcucccagcaggccgucauccccaacaucggcucccgcccccgcguccgcaacauccccucccgcgucuccaucuacuggaccaucgucaagcccggcgacauccuccucaucaacuccaccggcaaccucaucgccccccgcggcuacuucaagauccgcuccggcaaguccuccaucaugcgcuccgacgcccccaucggcaagugcaacuccgccugcaucacccccaacggcuccauccccaacgacaagcccuuccagaacgucaaccgcaucaccuacggcgccugcccccgcuacgucaagcagaacacccucaagcucgccaccggcaugcgcaacguccccgagaagcagacccgcggcaucuucggcgccaucgccggcuucaucgagaacggcugggagggcauggucgacggcugguacggcuuccgccaccagaacuccgagggccgcggccaggccgccgaccucaaguccacccaggccgccaucgaccagaucaacggcaagcucaaccgccucaucggcaagaccaacgagaaguuccaccagaucgagaaggaguucuccgaggucgagggccgcauccaggaccucgagaaguacgucgaggacaccaagaucgaccucugguccuacaacgccgagcuccucgucgcccucgagaaccagcacaccaucgaccucaccgacuccgagaugaacaagcucuucgagaagaccaagaagcagcuccgcgagaacgccgaggacaugggcaacggcugcuucaagaucuaccacaagugcgacaacgccugcaucggcuccauccgcaacggcaccuacgaccacgacgucuaccgcgacgaggcccucaacaaccgcuuccagaucaagggcgucgagcucaaguccggcuacaaggacuggauccucuggaucuccuucgccaucuccugcuuccuccucugcgucgcccuccucggcuucaucaugugggccugccagaagggcaacauccgcugcaacaucugcaucuga

SEQ ID NO: 106052 - RNA, 1701 nt, Artificial Sequence; identical to SEQ ID NO: 105904
  derived and/or modified CDS sequence (opt2) from hemagglutinin__InfluenzaA__AGL09761

SEQ ID NO: 106053 - RNA, 1701 nt, Artificial Sequence
  derived and/or modified CDS sequence (opt2) from hemagglutinin__InfluenzaA__AGL09762
augaagaccaucaucgcccucuccuacauccucugccucgucuucgcccagaagcuccccggcaacgacaacuccaccgccacccucugccucggccaccacgccguccccaacggcaccaucgucaagaccaucaccaacgaccagaucgaggucaccaacgccaccgagcucguccagaacuccuccaucggcgagaucugcgacuccccccaccagauccucgacggcgagaacugcacccucaucgacgcccuccucggcgacccccagugcgacggcuuccagaacaagaagugggaccucuucgucgagcgcuccaaggccuacuccaacugcuaccccuacgacguccccgacuacgccucccuccgcucccucgucgccuccuccggcacccucgaguucaacaacgaguccuucaacuggaccggcgucacccagaacggcaccuccuccgccugcauccgcggcuccaacuccuccuucuucucccgccucaacuggcucacccaccucaacuucaaguaccccgcccucaacgucaccaugcccaacaacgagcaguucgacaagcucuacaucuggggcguccaccaccccggcaccgacaaggaccagaucuuccucuacgcccaguccuccggccgcaucaccgucuccaccaagcgcucccagcaggccgucauccccaacaucggcucccgcccccgcauccgcaacauccccucccgcaucuccaucuacuggaccaucgucaagcccggcgacauccuccucaucaacuccaccggcaaccucaucgccccccgcggcuacuucaagauccgcuccggcaaguccuccaucaugcgcuccgacgcccccaucggcaagugcaaguccgagugcaucacccccaacggcuccauccccaacgacaagcccuuccagaacgucaaccgcaucaccuacggcgccugcccccgcuacgucaagcaguccacccucaagcucgccaccggcaugcgcaacguccccgagaagcagacccgcggcaucuucggcgccaucgccggcuucaucgagaacggcugggagggcauggucgacggcugguacggcuuccgccaccagaacuccgagggccgcggccaggccgccgaccucaaguccacccaggccgccaucgaccagaucaacggcaagcucaaccgccucaucggcaagaccaacgagaaguuccaccagaucgagaaggaguucuccgaggucgagggccgcauccaggaccucgagaaguacgucgaggacaccaagaucgaccucugguccuacaacgccgagcuccucgucgcccucgagaaccagcacaccaucgaccucaccgacuccgagaugaacaagcucuucgagaagaccaagaagcagcuccgcgagaacgccgaggacaugggcaacggcugcuucaagaucuaccacaagugcgacaacgccugcaucggcuccauccgcaacggcaccuacgaccacgacgucuaccgcgacgaggcccucaacaaccgcuuccagaucaagggcgucgagcucaaguccggcuacaaggacuggauccucuggaucuccuucgccaucuccugcuuccuccucugcgucgcccuccucggcuucaucaugugggccugccagaagggcaacauccgcugcaacaucugcaucuga

SEQ ID NO: 106054 - RNA, 1701 nt, Artificial Sequence; identical to SEQ ID NO: 106030
  derived and/or modified CDS sequence (opt2) from hemagglutinin__InfluenzaA__AGL09763

SEQ ID NO: 106055 - RNA, 1701 nt, Artificial Sequence
  derived and/or modified CDS sequence (opt2) from hemagglutinin__InfluenzaA__AGL09764
augaagaccaucaucgcccucuccuacauccucugccucgucuucgcccagaagauccccggcaacgacaacuccaccgccacccucugccucggccaccacgccguccccaacggcaccaucgucaagaccaucaccaacgaccagaucgaggucaccaacgccaccgagcucguccagaacuccuccaucggcgagaucugcgacuccccccaccagauccucgacggcgagaacugcacccucaucgacgcccuccucggcgacccccagugcgacggcuuccagaacaagaagugggaccucuucgucgagcgcuccaaggccuacuccaacugcuaccccuacgacguccccgacuacgccucccuccgcucccucgucgccuccuccggcacccucgaguucaacaacgaguccuucaacuggaccggcgucacccagaacggcaccuccuccgccugcauccgccgcuccaacuccuccuucuucucccgccucaacuggcucacccaccucaacuucaaguaccccgcccucaacgucaccaugcccaacaacgagcaguucgacaagcucuacaucuggggcguccaccaccccggcaccgacaaggaccagaucuuccucuacgcccaguccuccggccgcaucaccgucuccaccaagcgcucccagcaggccgucauccccaacaucggcucccgcccccgcauccgcaacauccccucccgcaucuccaucuacuggaccaucgucaagcccggcgacauccuccucaucaacuccaccggcaaccucaucgccccccgcggcuacuucaagauccgcuccggcaaguccuccaucaugcgcuccgacgcccccaucggcaagugcaaguccgagugcaucacccccaacggcuccauccccaacgacaagcccuuccagaacgucaaccgcaucaccuacggcgccugcccccgcuacgucaagcaguccacccucaagcucgccaccggcaugcgcaacguccccgagaagcagacccgcggcaucuucggcgccaucgccggcuucaucgagaacggcugggagggcauggucgacggcugguacggcuuccgccaccagaacuccgagggccgcggccaggccgccgaccucaaguccacccaggccgccaucgaccagaucaacggcaagcucaaccgccucaucggcaagaccaacgagaaguuccaccagaucgagaaggaguucuccgaggucgagggccgcauccaggaccucgagaaguacgucgaggacaccaagaucgaccucugguccuacaacgccgagcuccucgucgcccucgagaaccagcacaccaucgaccucaccgacuccgagaugaacaagcucuucgagaagaccaagaagcagcuccgcgagaacgccgaggacaugggcaacggcugcuucaagaucuaccacaagugcgacaacgccugcaucggcuccauccgcaacggcaccuacgaccacgacgucuaccgcgacgaggcccucaacaaccgcuuccagaucaagggcgucgagcucaaguccggcuacaaggacuggauccucuggaucuccuucgccaucuccugcuuccuccucugcgucgcccuccucggcuucaucaugugggccugccagaagggcaacauccgcugcaacaucugcaucuga

SEQ ID NO: 106056 - RNA, 1701 nt, Artificial Sequence; identical to SEQ ID NO: 105894
  derived and/or modified CDS sequence (opt2) from hemagglutinin__InfluenzaA__AGL09765

SEQ ID NO: 106057 - RNA, 1701 nt, Artificial Sequence
  derived and/or modified CDS sequence (opt2) from hemagglutinin__InfluenzaA__AGL09766
augaagaccaucaucgcccucuccuacauccucugccucgucuucgcccagaagcuccccggcaacgacaacuccaccgccacccucugccucggccaccacgccguccccaacggcaccaucgucaagaccaucaccaacgaccagaucgaggucaccaacgccaccgagcucguccagaacuccuccaucggcgagaucugcgacuccccccaccagauccucgacggcgagaacugcacccucaucgacgcccuccucggcgacccccagugcgacggcuuccagaacaagaagugggaccucuucgucgagcgcuccaaggccuacuccaacugcuaccccuacgacguccccgacuacgccucccuccgcucccucgucgccuccuccggcacccucgaguucaacaacgaguccuucaacugggccggcgucacccagaacggcaccuccuccgccugcauccgcggcuccaacuccuccuucuucucccgccucaacuggcucacccaccucaacuucaaguaccccgcccucaacgucaccaugcccaacaacgagcaguucgacaagcucuacaucuggggcguccaccaccccggcaccgacaaggaccagaucuuccucuacgcccaguccuccggccgcaucaccgucuccaccaagcgcucccagcaggccgucauccccaacaucggcucccgcccccgcauccgcaacauccccucccgcaucuccaucuacuggaccaucgucaagcccggcgacauccuccucaucaacuccaccggcaaccucaucgccccccgcggcuacuucaagauccucuccggcaaguccuccaucaugcgcuccgacgcccccaucggcaagugcaaguccgagugcaucacccccaacggcuccauccccaacgacaagcccuuccagaacgucaaccgcaucaccuacggcgccugcccccgcuacgucaagcaguccacccucaagcucgccaccggcaugcgcaacguccccgagaagcagacccgcggcaucuucggcgccaucgccggcuucaucgagaacggcugggagggcauggucgacggcugguacggcuuccgccaccagaacuccgagggccgcggccaggccgccgaccucaaguccacccaggccgccaucgaccagaucaacggcaagcucaaccgccucaucggcaagaccaacgagaaguuccaccagaucgagaaggaguucuccgaggucgagggccgcauccaggaccucgagaaguacgucgaggacaccaagaucgaccucugguccuacaacgccgagcuccucgucgcccucgagaaccagcacaccaucgaccucaccgacuccgagaugaacaagcucuucgagaagaccaagaagcagcuccgcgagaacgccgaggacaugggcaacggcugcuucaagaucuaccacaagugcgacaacgccugcaucggcuccauccgcaacggcaccuacgaccacgacgucuaccgcgacgaggcccucaacaaccgcuuccagaucaagggcgucgagcucaaguccggcuacaaggacuggauccucuggaucuccuucgccaucuccugcuuccuccucugcgucgcccuccucggcuucaucaugugggccugccagaagggcaacauccgcugcaacaucugcaucuga

SEQ ID NO: 106058 - RNA, 1701 nt, Artificial Sequence
  derived and/or modified CDS sequence (opt2) from hemagglutinin__InfluenzaA__AGL09767
augaagaccaucaucgcccucuccuacauccucugccucgucuucgcccagaagcuccccggcaacgacaacuccaccgccacccucugccucggccaccacgccguccccaacggcaccaucgucaagaccaucaccaacgaccgcaucgaggucaccaacgccaccgagcucguccagaacuccuccaucggcgagaucugcgacuccccccaccagauccucgacggcgagaacugcacccucaucgacgcccuccucggcgacccccagugcgacggcuuccagaacaagaagugggaccucuucgucgagcgcuccaaggccuacuccaacugcuaccccuacgacguccccgacuacgccucccuccgcucccucgucgccuccuccggcacccucgaguucaacaacgaguccuucaacugggccggcgucacccagaacggcaccuccuccgccugcauccgcggcuccaacuccuccuucuucucccgccucaacuggcucacccaccucaacuucaaguaccccgcccucaacgucaccaugcccaacaacgagcaguucgacaagcucuacaucuggggcguccaccaccccggcaccgacaaggaccagaucuuccucuacgcccaguccuccggccgcaucaccgucuccaccaagcgcucccagcaggccgucauccccaacaucggcucccgcccccgcauccgcaacauccccucccgcaucuccaucuacuggaccaucgucaagcccggcgacauccuccucaucaacuccaccggcaaccucaucgccccccgcggcuacuucaagauccgcuccggcaaguccuccaucaugcgcuccgacgcccccaucggcaagugcaaguccgagugcaucacccccaacggcuccauccccaacgacaagcccuuccagaacgucaaccgcaucaccuacggcgccugcccccgcuacgucaagcaguccacccucaagcucgccaccggcaugcgcaacguccccgagaagcagacccgcggcaucuucggcgccaucgccggcuucaucgagaacggcugggagggcauggucgacggcugguacggcuuccgccaccagaacuccgagggccgcggccaggccgccgaccucaaguccacccaggccgccaucgaccagaucaacggcaagcucaaccgccucaucggcaagaccaacgagaaguuccaccagaucgagaaggaguucuccgaggucgagggccgcauccaggaccucgagaaguacgucgaggacaccaagaucgaccucugguccuacaacgccgagcuccucgucgcccucgagaaccagcacaccaucgaccucaccgacuccgagaugaacaagcucuucgagaagaccaagaagcagcuccgcgagaacgccgaggacaugggcaacggcugcuucaagaucuaccacaagugcgacaacgccugcaucggcuccauccgcaacggcaccuacgaccacaacgucuaccgcgacgaggcccucaacaaccgcuuccagaucaagggcgucgagcucaaguccggcuacaaggacuggauccucuggaucuccuucgccaucuccugcuuccuccucugcgucgcccuccucggcuucaucaugugggccugccagaagggcaacauccgcugcaacaucugcaucuga

SEQ ID NO: 106059 - RNA, 1701 nt, Artificial Sequence
  derived and/or modified CDS sequence (opt2) from hemagglutinin__InfluenzaA__AGL09769
augaagaccaucaucgcccucuccuacauccucugccucgucuucgcccagaagauccccggcaacgacaacuccaccgccacccucugccucggccaccacgccguccccaacggcaccaucgucaagaccaucaccaacgaccgcaucgaggucaccaacgccaccgagcucguccagaacuccuccaucggcgagaucugcgacuccccccaccagauccucgacggcgagaacugcacccucaucgacgcccuccucggcgacccccagugcgacggcuuccagaacaagaagugggaccucuucgucgagcgcuccaaggccuacuccaacugcuaccccuacgacguccccgacuacgccucccuccgcucccucgucgccuccuccggcacccucgaguucaacaacgaguccuucaacuggaccggcgucacccagaacggcaccuccuccgccugcauccgcggcuccaacuccuccuucuucucccgccucaacuggcucacccaccucaacuucaaguaccccgcccucaacgucaccaugcccaacaacgagcaguucgacaagcucuacaucuggggcguccaccaccccggcaccgacaaggaccagaucuuccucuacgcccaguccuccggccgcaucaccgucuccaccaagcgcucccagcaggccgucauccccaacaucggcucccgcccccgcauccgcaacauccccucccgcaucuccaucuacuggaccaucgucaagcccggcgacauccuccucaucaacuccaccggcaaccucaucgccccccgcggcuacuucaagauccgcuccggcaaguccuccaucaugcgcuccgacgcccccaucggcaagugcaaguccgagugcaucacccccaacggcuccauccccaacgacaagcccuuccagaacgucaaccgcaucaccuacggcgccugcccccgcuacgucaagcaguccacccucaagcucgccaccggcaugcgcaacguccccgagaagcagacccgcggcaucuucggcgccaucgccggcuucaucgagaacggcugggagggcauggucgacggcugguacggcuuccgccaccagaacuccgagggccgcggccaggccgccgaccucaaguccacccaggccgccaucgaccagaucaacggcaagcucaaccgccucaucggcaagaccaacgagaaguuccaccagaucgagaaggaguucuccgaggucgagggccgcauccaggaccucgagaaguacgucgaggacaccaagaucgaccucugguccuacaacgccgagcuccucgucgcccucgagaaccagcacaccaucgaccucaccgacuccgagaugaacaagcucuucgagaagaccaagaagcagcuccgcgagaacgccgaggacaugggcaacggcugcuucaagaucuaccacaagugcgacaacgccugcaucggcuccauccgcaacggcaccuacgaccacgacgucuaccgcgacgaggcccucaacaaccgcuuccagaucaagggcgucgagcucaaguccggcuacaaggacuggauccucuggaucuccuucgccaucuccugcuuccuccucugcgucgcccuccucggcuucaucaugugggccugccagaagggcaacauccgcugcaacaucugcaucuga

SEQ ID NO: 106060 - RNA, 1701 nt, Artificial Sequence; identical to SEQ ID NO: 105894
  derived and/or modified CDS sequence (opt2) from hemagglutinin__InfluenzaA__AGL09770

SEQ ID NO: 106061 - RNA, 1701 nt, Artificial Sequence
  derived and/or modified CDS sequence (opt2) from hemagglutinin__InfluenzaA__AGL09771
augaagaccaucaucgcccucuccuacauccucugccucgucuucgcccagaagcuccccggcaacgacaacuccaccgccacccucugccucggccaccacgccguccccaacggcaccaucgucaagaccaucaccaacgaccgcaucgaggucaccaacgccaccgagcucguccagaacuccuccaucggcgagaucugcgacuccccccaccagauccucgacggcgagaacugcacccucaucgacgcccuccucggcgacccccagugcgacggcuuccagaacaagaagugggaccucuucgucgagcgcuccaaggccuacuccaacugcuaccccuacgacguccccgacuacgccucccuccgcucccucgucgccuccuccggcacccucgaguucaacaacgaguccuucaacugggccggcgucacccagaacggcaccuccuccgccugcauccgcggcuccaacuccuccuucuucucccgccucaacuggcucacccaccucaacuucaaguaccccgcccucaacgucaccaugcccaacaacgagcaguucgacaagcucuacaucuggggcguccaccaccccggcaccgacaaggaccagaucuuccucuacgcccaguccuccggccgcaucaccgucuccaccaagcgcucccagcaggccgucauccccaacaucggcucccgcccccgcauccgcaacauccccucccgcaucuccaucuacuggaccaucgucaagcccggcgacauccuccucaucaacuccaccggcaaccucaucgccccccgcggcuacuucaagauccgcuccggcaaguccuccaucaugcgcuccgacgcccccaucggcaagugcaaguccgagugcaucacccccaacggcuccauccccaacgacaagcccuuccagaacgucaaccgcaucaccuacggcgccugcccccgcuacgucaagcaguccacccucaagcucgccaccggcaugcgcaacguccccgagaagcagacccgcggcaucuucggcgccaucgccggcuucaucgagaacggcugggagggcauggucgacggcugguacggcuuccgccaccagaacuccgagggccgcggccaggccgccgaccucaaguccacccaggccgccaucgaccagaucaacggcaagcucaaccgccucaucggcaagaccaacgagaaguuccaccagaucgagaaggaguucuccgaggucgagggccgcauccaggaccucgagaaguacgucgaggacaccaagaucgaccucugguccuacaacgccgagcuccucgucgcccucgagaaccagcacaccaucgaccucaccgacuccgagaugaacaagcucuucgagaagaccaagaagcagcuccgcgagaacgccgaggacaugggcaacggcugcuucaagaucuaccacaagugcgacaacgccugcaucggcuccauccgcaacggcaccuacgaccacgacaucuaccgcgacgaggcccucaacaaccgcuuccagaucaagggcgucgagcucaaguccggcuacaaggacuggauccucuggaucuccuucgccaucuccugcuuccuccucugcgucgcccuccucggcuucaucaugugggccugccagaagggcaacauccgcugcaacaucugcaucuga

SEQ ID NO: 106062 - RNA, 1701 nt, Artificial Sequence
  derived and/or modified CDS sequence (opt2) from hemagglutinin__InfluenzaA__AGL09772
augaagaccaucaucgcccucuccuacauccucugccucgucuucgcccagaagcuccccggcaacgacaacuccaccgccacccucugccucggccaccacgccguccccaacggcaccaucgucaagaccaucaccaacgaccagaucgaggucaccaacgccaccgagcucguccaguccuccuccaccggcgagaucugcaacuccccccaccagauccucgacggcgagaacugcacccucaucgacgcccuccucggcgacccccagugcgacggcuuccagaacaagaagugggaccucuucgucgagcgcuccaaggcccacuccaacugcuaccccuacgacguccccgacuacgccucccuccgcucccucgucgccuccuccggcacccucgaguucaacaacgaguccuucaacuggaccggcgucacccagaacggcaccuccuccgccugcauccgccgcuccaacaacuccuucuucucccgccucaacuggcucacccaccucaacuucaaguaccccgcccucaacgucaccaugcccaacaacgagcaguucgacaagcucuacaucuggggcguccaccaccccggcaccgacaaggaccagaucuuccucuacgcccaggccgccggccgcaucaccgucuccaccaagcgcucccagcaggccgucauccccaacaucggcucccgcccccgcguccgcaacauccccucccgcgucuccaucuacuggaccaucgucaagcccggcgacauccuccucaucaacuccaccggcaaccucaucgccccccgcggcuacuucaagauccgcuccggcaaguccuccaucaugcgcuccgacgcccccaucggcaagugcaacuccgccugcaucacccccaacggcuccauccccaacgacaagcccuuccagaacgucaaccgcaucaccuacggcgccugcccccgcuacgucaagcagaacacccucaagcucgccaccggcaugcgcaacguccccgagaagcagacccgcggcaucuucggcgccaucgccggcuucaucgagaacggcugggagggcauggucgacggcugguacggcuuccgccaccagaacuccgagggccgcggccaggccgccgaccucaaguccacccaggccgccaucgaccagaucaacggcaagcucaaccgccucaucggcaagaccaacgagaaguuccaccagaucgagaaggaguucuccgaggucgagggccgcauccaggaccucgagaaguacgucgaggacaccaagaucgaccucugguccuacaacgccgagcuccucgucgcccucgagaaccagcacaccaucgaccucaccgacuccgagaugaacaagcucuucgagaagaccaagaagcagcuccgcgagaacgccgaggacaugggcaacggcugcuucaagaucuaccacaagugcgacaacgccugcaucggcuccauccgcaacggcaccuacgaccacuacgucuaccgcgacgaggcccucaacaaccgcuuccagaucaagggcgucgagcucaaguccggcuacaaggacuggauccucuggaucuccuucgccaccuccugcuuccuccucugcgucgcccuccucggcuucaucaugugggccugccagaagggcaacauccgcugcaacaucugcaucuga

SEQ ID NO: 106063 - RNA, 1701 nt, Artificial Sequence
  derived and/or modified CDS sequence (opt2) from hemagglutinin__InfluenzaA__AGL09773
augaagaccaucaucgcccucuccuacauccucugccucgucuucgcccagaagcuccccggcaacgacaacuccaccgccacccucugccucggccaccacgccguccccaacggcaccaucgucaagaccaucaccaacgaccagaucgaggucaccaacgccaccgagcucguccaguccuccuccaccggcgagaucugcaacuccccccaccagauccucgacggcgagaacugcacccucaucgacgcccuccucggcgacccccagugcgacggcuuccagaacaagaagugggaccucuucgucgagcgcuccaaggcccacuccaacugcuaccccuacgacguccccgacuacgccucccuccgcucccucgucgccuccuccggcacccucgaguucaacaacgaguccuucaacuggaccgaggucacccagaacggcaccuccuccgccugcauccgccgcuccaacaacuccuucuucucccgccucaacuggcucacccaccucaacuucaaguaccccgcccucaacgucaccaugcccaacaacgagcaguucgacaagcucuacaucuggggcguccaccaccccggcaccgacaaggaccagaucuuccucuacgcccaggccgccggccgcaucaccgucuccaccaagcgcucccagcaggccgucauccccaacaucggcucccgcccccgcguccgcaacauccccucccgcgucuccaucuacuggaccaucgucaagcccggcgacauccuccucaucaacuccaccggcaaccucaucgccccccgcggcuacuucaagauccgcuccggcaaguccuccaucaugcgcuccgacgcccccaucggcaagugcaacuccgccugcaucacccccaacggcuccauccccaacgacaagcccuuccagaacgucaaccgcaucaccuacggcgccugcccccgcuacgucaagcagaacacccucaagcucgccaccggcaugcgcaacguccccgagaagcagacccgcggcaucuucggcgccaucgccggcuucaucgagaacggcugggagggcauggucgacggcugguacggcuuccgccaccagaacuccgagggccgcggccaggccgccgaccucaaguccacccaggccgccaucgaccagaucaacggcaagcucaaccgccucaucggcaagaccaacgagaaguuccaccagaucgagaaggaguucuccgaggucgagggccgcauccaggaccucgagaaguacgucgaggacaccaagaucgaccucugguccuacaacgccgagcuccucgucgcccucgagaaccagcacaccaucgaccucaccgacuccgagaugaacaagcucuucgagaagaccaagaagcagcuccgcgagaacgccgaggacaugggcaacggcugcuucaagaucuaccacaagugcgacaacgccugcaucggcuccauccgcaacggcaccuacgaccacuacgucuaccgcgacgaggcccucaacaaccgcuuccagaucaagggcgucgagcucaaguccggcuacaaggacuggauccucuggaucuccuucgccaccuccugcuuccuccucugcgucgcccuccucggcuucaucaugugggccugccagaagggcaacauccgcugcaacaucugcaucuga

SEQ ID NO: 106064 - RNA, 1701 nt, Artificial Sequence; identical to SEQ ID NO: 106062
  derived and/or modified CDS sequence (opt2) from hemagglutinin__InfluenzaA__AGL09774

SEQ ID NO: 106065 - RNA, 1701 nt, Artificial Sequence; identical to SEQ ID NO: 105904
  derived and/or modified CDS sequence (opt2) from hemagglutinin__InfluenzaA__AGL09775

SEQ ID NO: 106066 - RNA, 1701 nt, Artificial Sequence; identical to SEQ ID NO: 106062
  derived and/or modified CDS sequence (opt2) from hemagglutinin__InfluenzaA__AGL09776

SEQ ID NO: 106067 - RNA, 1701 nt, Artificial Sequence; identical to SEQ ID NO: 106062
  derived and/or modified CDS sequence (opt2) from hemagglutinin__InfluenzaA__AGL09777

SEQ ID NO: 106068 - RNA, 1701 nt, Artificial Sequence
  derived and/or modified CDS sequence (opt2) from hemagglutinin__InfluenzaA__AGL09778
augaagaccaucaucgcccucuccuacauccucugccucaucuucgcccagaagcuccccggcaacgacaacuccaccgccacccucugccucggccaccacgccguccccaacggcaccaucgucaagaccaucaccaacgaccgcaucgaggucaccaacgccaccgagcucguccagaacuccuccaucggcgagaucugcgacuccccccaccagauccucgacggcgagaacugcacccucaucgacgcccuccucggcgacccccagugcgacggcuuccagaacaagaagugggaccucuucgucgagcgcuccaaggccuacuccaacugcuaccccuacgacguccccgacuacgccucccuccgcucccucgucgccuccuccggcacccucgaguucaacaacgaguccuucaacugggccggcgucacccagaacggcaccuccuccgccugcauccgcggcuccaacuccuccuucuucucccgccucaacuggcucacccaccucaacuucaaguaccccgcccucaacgucaccaugcccaacaacgagcaguucgacaagcucuacaucuggggcguccaccaccccggcaccgacaaggaccagaucuuccucuacgcccaguccuccggccgcaucaccgucuccaccaagcgcucccagcaggccgucauccccaacaucggcucccgcccccgcauccgcaacauccccucccgcaucuccaucuacuggaccaucgucaagcccggcgacauccuccucaucaacuccaccggcaaccucaucgccccccgcggcuacuucaagauccgcuccggcaaguccuccaucaugcgcuccgacgcccccaucggcaagugcaaguccgagugcaucacccccaacggcuccauccccaacgacaagcccuuccagaacgucaaccgcaucaccuacggcgccugcccccgcuacgucaagcaguccacccucaagcucgccaccggcaugcgcaacguccccgagaagcagacccgcggcaucuucggcgccaucgccggcuucaucgagaacggcugggagggcaugauggacggcugguacggcuuccgccaccagaacuccgagggccgcggccaggccgccgaccucaaguccacccaggccgccaucgaccagaucaacggcaagcucaaccgccucaucggcaagaccaacgagaaguuccaccagaucgagaaggaguucuccgaggucgagggccgcauccaggaccucgagaaguacgucgaggacaccaagaucgaccucugguccuacaacgccgagcuccucgucgcccucgagaaccagcacaccaucgaccucaccgacuccgagaugaacaagcucuucgagaagaccaagaagcagcuccgcgagaacgccgaggacaugggcaacggcugcuucaagaucuaccacaagugcgacaacgccugcaucggcuccauccgcaacggcaccuacgaccacgacgucuaccgcgacgaggcccucaacaaccgcuuccagaucaagggcgucgagcucaaguccggcuacaaggacuggauccucuggaucuccuucgccaucuccugcuuccuccucugcgucgcccuccucggcuucaucaugugggccugccagaagggcaacauccgcugcaacaucugcaucuga

SEQ ID NO: 106069 - RNA, 1701 nt, Artificial Sequence
  derived and/or modified CDS sequence (opt2) from hemagglutinin__InfluenzaA__AGL09779
augaagaccaucaucgcccucuccuacauccucugccucgucuucgcccagaagcuccccggcaacaacaacuccaccgccacccucugccucggccaccacgccguccccaacggcaccaucgucaagaccaucaccaacgaccgcaucgaggucaccaacgccaccgagcucguccagaacuccuccaucggcgagaucugcgacuccccccaccagauccucgacggcgagaacugcacccucaucgacgcccuccucggcgacccccagugcgacggcuuccagaacaagaagugggaccucuucgucgagcgcuccaaggccuacuccaacugcuaccccuacgacguccccgacuacgccucccuccgcucccucgucgccuccuccggcacccucgaguucaacaacgaguccuucaacugggccggcgucacccagaacggcaccuccuccgccugcauccgcggcuccaacuccuccuucuucucccgccucaacuggcucacccaccucaacuucaaguaccccgcccucaacgucaccaugcccaacaacgagcaguucgacaagcucuacaucuggggcguccaccaccccggcaccgacaaggaccagaucuuccucuacgcccaguccuccggccgcaucaccgucuccaccaagcgcucccagcaggccgucauccccaacaucggcucccgcccccgcauccgcaacauccccucccgcaucuccaucuacuggaccaucgucaagcccggcgacauccuccucaucaacuccaccggcaaccucaucgccccccgcggcuacuucaagauccgcuccggcaaguccuccaucaugcgcuccgacgcccccaucggcaagugcaaguccgagugcaucacccccaacggcuccauccccaacgacaagcccuuccagaacgucaaccgcaucaccuacggcgccugcccccgcuacgucaagcaguccacccucaagcucgccaccggcaugcgcaacguccccgagaagcagacccgcggcaucuucggcgccaucgccggcuucaucgagaacggcugggagggcauggucgacggcugguacggcuuccgccaccagaacuccgagggccgcggccaggccgccgaccucaaguccacccaggccgccaucgaccagaucaacggcaagcucaaccgccucaucggcaagaccaacgagaaguuccaccagaucgagaaggaguucuccgaggucgagggccgcauccaggaccucgagaaguacgucgaggacaccaagaucgaccucugguccuacaacgccgagcuccucgucgcccucgagaaccagcacaccaucgaccucaccgacuccgagaugaacaagcucuucgagaagaccaagaagcagcuccgcgagaacgccgaggacaugggcaacggcugcuucaagaucuaccacaagugcgacaacgccugcaucggcuccauccgcaacggcaccuacgaccacgacgucuaccgcgacgaggcccucaacaaccgcuuccagaucaagggcgucgagcucaaguccggcuacaaggacuggauccucuggaucuccuucgccaucuccugcuuccuccucugcgucgcccuccucggcuucaucaugugggccugccagaagggcaacauccgcugcaacaucugcaucuga

SEQ ID NO: 106070 - RNA, 1701 nt, Artificial Sequence
  derived and/or modified CDS sequence (opt2) from hemagglutinin__InfluenzaA__AGL09780
augaagaccaucaucgcccucuccuacauccucugccucgucuucgcccagaagcuccccggcaacgacaacuccaccgccacccucugccucggccaccacgccguccccaacggcaccaucgucaagaccaucaccaacgaccgcaucgaggucaccaacgccaccgagcucguccagaacuccuccaucggcgagaucugcgacuccccccaccagauccucgacggcgagaacugcacccucaucgacgcccuccucggcgacccccagugcgacggcuuccagaacaagaagugggaccucuucgucgagcgcuccaaggccuacuccaacugcuaccccuacgacguccccgacuacgccucccuccgcucccucgucgccuccuccggcacccucgaguucgacaacgaguccuucaacugggccggcgucacccagaacggcaccuccuccgccugcauccgcggcuccaacuccuccuucuucucccgccucaacuggcucacccaccucaacuucaaguaccccgcccucaacgucaccaugcccaacaacgagcaguucgacaagcucuacaucuggggcguccaccaccccggcaccgacaaggaccagaucucccucuacgcccaguccuccggccgcaucaccgucuccaccaagcgcucccagcaggccgucauccccaacaucggcucccgcccccgcauccgcaacauccccucccgcaucuccaucuacuggaccaucgucaagcccggcgacauccuccucaucaacuccaccggcaaccucaucgccccccgcggcuacuucaagauccgcuccggcaaguccuccaucaugcgcuccgacgcccccaucggcaagugcaaguccgagugcaucacccccaacggcuccauccccaacgacaagcccuuccagaacgucaaccgcaucaccuacggcgccugcccccgcuacgucaagcaguccacccucaagcucgccaccggcaugcgcaacguccccgagaagcagacccgcggcaucuucggcgccaucgccggcuucaucgagaacggcugggagggcauggucgacggcugguacggcuuccgccaccagaacuccgagggccgcggccaggccgccgaccucaaguccacccaggccgccaucgaccagaucaacggcaagcucaaccgccucaucggcaagaccaacgagaaguuccaccagaucgagaaggaguucuccgaggucgagggccgcauccaggaccucgagaaguacgucgaggacaccaagaucgaccucugguccuacaacgccgagcuccucgucgcccucgagaaccagcacaccaucgaccucaccgacuccgagaugaacaagcucuucgagaagaccaagaagcagcuccgcgagaacgccgaggacaugggcaacggcugcuucaagaucuaccacaagugcgacaacgccugcaucggcuccauccgcaacggcaccuacgaccacgacgucuaccgcgacgaggcccucaacaaccgcuuccagaucaagggcgucgagcucaaguccggcuacaaggacuggauccucuggaucuccuucgccaucuccugcuuccuccucugcgucgcccuccucggcuucaucaugugggccugccagaagggcaacauccgcugcaacaucugcaucuga

SEQ ID NO: 106071 - RNA, 1701 nt, Artificial Sequence; identical to SEQ ID NO: 106029
  derived and/or modified CDS sequence (opt2) from hemagglutinin__InfluenzaA__AGL09781

SEQ ID NO: 106072 - RNA, 1701 nt, Artificial Sequence; identical to SEQ ID NO: 105894
  derived and/or modified CDS sequence (opt2) from hemagglutinin__InfluenzaA__AGL09782

SEQ ID NO: 106073 - RNA, 1701 nt, Artificial Sequence
  derived and/or modified CDS sequence (opt2) from hemagglutinin__InfluenzaA__AGL09783
augaagaccaucaucgcccucuccuacauccucugccucgucuucgcccagaagcuccccggcaacgacaacuccaccgccacccucugccucggccaccacgccguccccaacggcaccgucgucaagaccaucaccaacgaccgcaucgaggucaccaacgccaccgagcucguccagaacuccuccaucggcgagaucugcgacuccccccaccagauccucgacggcgagaacugcacccucaucgacgcccuccucggcgacccccagugcgacggcuuccagaacaagaagugggaccucuucgucgagcgcuccaaggccuacuccaacugcuaccccuacgacguccccgacuacgccucccuccgcucccucgucgccuccuccggcacccucgaguucaacaacgaguccuucaacuggaccggcgucacccagaacggcaccuccuccgccugcauccgccgcuccaacaacuccuucuucucccgccucaacuggcucacccaccucaacuucaaguaccccgcccucaacgucaccaugcccaacaacgagcaguucgacaagcucuacaucuggggcguccaccaccccggcaccgacaaggaccagaucuuccucuacgcccaguccuccggccgcaucaccgucuccaccaagcgcucccagcaggccgucauccccaacaucggcucccgcccccgcauccgcaacauccccucccgcaucuccaucuacuggaccaucgucaagcccggcgacauccuccucaucaacuccaccggcaaccucaucgccccccgcggcuacuucaagauccgcuccggcaaguccuccaucaugcgcuccgacgcccccaucggcaagugcaaguccgagugcaucacccccaacggcuccauccccaacgacaagcccuuccagaacgucaaccgcaucaccuacggcgccugcccccgcuacgucaagcaguccacccucaagcucgccaccggcaugcgcaacguccccgagaagcagacccgcggcaucuucggcgccaucgccggcuucaucgagaacggcugggagggcauggucgacggcugguacggcuuccgccaccagaacuccgagggccgcggccaggccgccgaccucaaguccacccaggccgccaucgaccagaucaacggcaagcucaaccgccucaucggcaagaccaacgagaaguuccaccagaucgagaaggaguucuccgaggucgagggccgcacccagaaccucgagaaguacgucgaggacaccaagaucgaccucugguccuacaacgccgagcuccucgucgcccucgagaaccagcacaccaucgaccucaccgacuccgagaugaacaagcucuucgagaagaccaagaagcagcuccgcgagaacgccgaggacaugggcaacggcugcuucaagaucuaccacaagugcgacaacgccugcaucggcuccauccgcaacggcaccuacgaccacgacgucuaccgcgacgaggcccucaacaaccgcuuccagaucaagggcgucgagcucaaguccggcuacaaggacuggauccucuggaucuccuucgccaucuccugcuuccuccucugcgucguccuccucggcuucaucaugugggccugccagaagggcaacauccgcugcaacaucugcaucuga

SEQ ID NO: 106074 - RNA, 1701 nt, Artificial Sequence; identical to SEQ ID NO: 105904
  derived and/or modified CDS sequence (opt2) from hemagglutinin__InfluenzaA__AGL09785

SEQ ID NO: 106075 - RNA, 1701 nt, Artificial Sequence
  derived and/or modified CDS sequence (opt2) from hemagglutinin__InfluenzaA__AGL09786
augaagaccaucaucgcccucuccuacauccucugccucgucuucgcccagaagcuccccggcaacgacaacuccaccgccacccucugccucggccaccacgccguccccaacggcaccaucgucaagaccaucaccaacgaccgcaucgaggucaccaacgccaccgagcucguccagaacuccuccaucggcgagaucugcgacuccccccaccagauccucgacggcgagaacugcacccucaucgacgcccuccucggcgacccccagugcgacggcuuccagaacaagaagugggaccucuucgucgagcgcuccaaggccuacuccaacugcuaccccuacgacguccccgacuacgccucccuccgcucccucgucgccuccuccggcacccucgaguucgacaacgaguccuucaacugggccggcgucacccagaacggcaccuccuccgccugcauccgcggcuccaaguccuccuucuucucccgccucaacuggcucacccaccucaacuucaaguaccccgcccucaacgucaccaugcccaacaacgagcaguucgacaagcucuacaucuggggcguccaccaccccggcaccgacaaggaccagaucucccucuacgcccaguccuccggccgcaucaccgucuccaccaagcgcucccagcaggccgucauccccaacaucggcucccgcccccgcauccgcaacauccccucccgcaucuccaucuacuggaccaucgucaagcccggcgacauccuccucaucaacuccaccggcaaccucaucgccccccgcggcuacuucaagauccgcuccggcaaguccuccaucaugcgcuccgacgcccccaucggcaagugcaaguccgagugcaucacccccaacggcuccauccccaacgacaagcccuuccagaacgucaaccgcaucaccuacggcgccugcccccgcuacgucaagcaguccacccucaagcucgccaccggcaugcgcaacguccccgagaagcagacccgcggcaucuucggcgccaucgccggcuucaucgagaacggcugggagggcauggucgacggcugguacggcuuccgccaccagaacuccgagggccgcggccaggccgccgaccucaaguccacccaggccgccaucgaccagaucaacggcaagcucaaccgccucaucggcaagaccaacgagaaguuccaccagaucgagaaggaguucuccgaggucgagggccgcauccaggaccucgagaaguacgucgaggacaccaagaucgaccucugguccuacaacgccgagcuccucgucgcccucgagaaccagcacaccaucgaccucaccgacuccgagaugaacaagcucuucgagaagaccaagaagcagcuccgcgagaacgccgaggacaugggcaacggcugcuucaagaucuaccacaagugcgacaacgccugcaucggcuccauccgcaacggcaccuacgaccacgacgucuaccgcgacgaggcccucaacaaccgcuuccagaucaagggcgucgagcucaaguccggcuacaaggacuggauccucuggaucuccuucgccaucuccugcuuccuccucugcgucgcccuccucggcuucaucaugugggccugccagaagggcaacauccgcugcaacaucugcaucuga

SEQ ID NO: 106076 - RNA, 1701 nt, Artificial Sequence
  derived and/or modified CDS sequence (opt2) from hemagglutinin__InfluenzaA__AGL09787
augaaggccauccucgucguccuccucuacaccuucgccaccgccaacgccgacacccucugcaucggcuaccacgccaacaacuccaccgacaccgucgacaccguccucgagaagaacgucaccgucacccacuccgucaaccuccucgaggacaagcacaacggcaagcucugcaagcuccgcggcgucgccccccuccaccucggcaagugcaacaucgccggcuggauccucggcaaccccgagugcgagucccucuccaccgccuccuccugguccuacaucgucgagaccuccuccuccgacaacggcaccugcuaccccggcgacuucaucaacuacgaggagcuccgcgagcagcucuccuccgucuccuccuucgagcgcuucgagaucuuccccaagaccuccuccuggcccaaccacgacuccaacaagggcgucaccgccgccugcccccacgccggcgccaaguccuucuacaagaaccucaucuggcucgucaagaagggcaacuccuaccccaagcucucccaguccuacaucaacgacaagggcaaggagguccucguccucuggggcauccaccaccccuccaccaccgccgaccagcagucccucuaccagaacgccgacgccuacgucuucgucggcaccucccgcuacuccaagaaguucaagcccgagaucgccauccgccccaagguccgcgaccaggagggccgcaugaacuacuacuggacccucgucgagcccggcgacaagaucaccuucgaggccaccggcaaccucgucgucccccgcuacgccuucaccauggagcgcaacgccggcuccggcaucaucaucuccgacacccccguccacgacugcaacaccaccugccagacccccgagggcgccaucaacaccucccuccccuuccagaacauccaccccaucaccaucggcaagugccccaaguacgucaaguccaccaagcuccgccucgccaccggccuccgcaacguccccuccauccagucccgcggccucuucggcgccaucgccggcuucaucgagggcggcuggaccggcauggucgacggcugguacggcuaccaccaccagaacgagcagggcuccggcuacgccgccgaccucaaguccacccagaacgccaucgacaagaucaccaacaaggucaacuccgucaucgagaagaugaacacccaguucaccgccgucggcaaggaguucaaccaccucgagaagcgcaucgagaaccucaacaagaaggucgacgacggcuuccucgacaucuggaccuacaacgccgagcuccucguccuccucgagaacgagcgcacccucgacuaccacgacuccaacgucaagaaccucuacgagaagguccgcaaccagcucaagaacaacgccaaggagaucggcaacggcugcuucgaguucuaccacaagugcgacaacaccugcauggaguccgucaagaacggcaccuacgacuaccccaaguacuccgaggaggccaagcucaaccgcgagaagaucgacggcgucaagcucgaguccacccgcaucuaccagauccucgccaucuacuccaccgucgccuccucccucguccucgucgucucccucggcgccaucuccuucuggaugugcuccaacggcucccuccagugccgcaucugcaucuga

SEQ ID NO: 106077 - RNA, 1701 nt, Artificial Sequence; identical to SEQ ID NO: 106076
  derived and/or modified CDS sequence (opt2) from hemagglutinin__InfluenzaA__AGL09788

SEQ ID NO: 106078 - RNA, 1701 nt, Artificial Sequence; identical to SEQ ID NO: 106076
  derived and/or modified CDS sequence (opt2) from hemagglutinin__InfluenzaA__AGL09789

SEQ ID NO: 106079 - RNA, 1701 nt, Artificial Sequence; identical to SEQ ID NO: 106030
  derived and/or modified CDS sequence (opt2) from hemagglutinin__InfluenzaA__AGL09790

SEQ ID NO: 106080 - RNA, 1701 nt, Artificial Sequence
  derived and/or modified CDS sequence (opt2) from hemagglutinin__InfluenzaA__AGL09791
augaagaccaucaucgcccucuccuacauccucugccucgucuucgcccagaagcuccccggcaacgacaacuccaccgccacccucugccucggccaccacgccguccccaacggcaccaucgucaagaccaucaccaacgaccgcaucgaggucaccaacgccaccgagcucguccagaacuccuccaucggcgagaucugcgacuccccccaccagauccucgacggcgagaacugcacccucaucgacgcccuccucggcgacccccagugcgacggcuuccagaacaagaagugggaccucuucgucgagcgcuccaaggccuacuccaacugcuaccccuacgacguccccgacuacgccucccuccgcucccucgucgccuccuccggcacccucgaguucaacaacgaguccuucaacuggaccggcgucacccagaacggcaccuccuccgccugcauccgccgcuccaacuccuccuucuucucccgccucaacuggcucacccaccucaacuucaaguaccccgcccucaacaugaccaugcccaacaacgagcaguucgacaagcucuacaucuggggcguccaccaccccggcaccgacaaggaccagaucucccucuacgcccaguccuccggccgcaucaccgucuccaccaagcgcucccagcaggccgucauccccaacaucggcucccgcccccgcauccgcaacauccccucccgcaucuccaucuacuggaccaucgucaagcccggcgacauccuccucaucaacuccaccggcaaccucaucgccccccgcggcuacuucaagauccgcuccggcaaguccuccaucaugcgcuccgacgcccccaucggcaagugcaaguccgagugcaucacccccaacggcuccauccccaacgacaagcccuuccagaacgucaaccgcaucaccuacggcgccugcccccgcuacgucaagcaguccacccucaagcucgccaccggcaugcgcaacguccccgagaagcagacccgcggcaucuucggcgccaucgccggcuucaucgagaacggcugggagggcauggucgacggcugguacggcuuccgccaccagaacuccgagggccgcggccaggccgccgaccucaaguccacccaggccgccaucgaccagaucaacggcaagcucaaccgccucaucggcaagaccaacgagaaguuccaccagaucgagaaggaguucuccgaggucgagggccgcauccaggaccucgagaaguacgucgaggacaccaagaucgaccucugguccuacaacgccgagcuccucgucgcccucgagaaccagcacaccaucgaccucaccgacuccgagaugaacaagcucuucgagaagaccaagaagcagcuccgcgagaacgccgaggacaugggcaacggcugcuucaagaucuaccacaagugcgacaacgccugcaucggcuccauccgcaacggcaccuacgaccacaacgucuaccgcgacgaggcccucaacaaccgcuuccagaucaagggcgucgagcucaaguccggcuacaaggacuggauccucuggaucuccuucgccaucuccugcuuccuccucugcgucgcccuccucggcuucaucaugugggccugccagaagggcaacauccgcugcaacaucugcaucuga

SEQ ID NO: 106081 - RNA, 1701 nt, Artificial Sequence; identical to SEQ ID NO: 106030
  derived and/or modified CDS sequence (opt2) from hemagglutinin__InfluenzaA__AGL09792

SEQ ID NO: 106082 - RNA, 1701 nt, Artificial Sequence
  derived and/or modified CDS sequence (opt2) from hemagglutinin__InfluenzaA__AGL09794
augaagaccaucaucgcccucuccuacauccucugccucgucuucgcccagaagcuccccggcaacgacaacuccaccgccacccucugccucggccaccacgccguccccaacggcaccaucgucaagaccaucaccaacgaccgcaucgaggucaccaacgccaccgagcucguccagaacuccuccaucggcgagaucugcgacuccccccaccagauccucgacggcgagaacugcacccucaucgacgcccuccucggcgacccccagugcgacggcuuccagaacaagaagugggaccucuucgucgagcgcuccaaggccuacuccaacugcuaccccuacgacguccccgacuacgccucccuccgcucccucgucgccuccuccggcacccucgaguucaacaacgaguccuucaacugggccggcgucacccagaacggcaccuccuccgccugcauccgcggcuccaacuccuccuucuucucccgccucaacuggcucacccaccucaacuucaaguaccccgcccucaacgucaccaugcccaacaacgagcaguucgacaagcucuacaucuggggcguccaccaccccggcaccgacaaggaccagaucuuccucuacgcccaguccuccggccgcaucaccgucuccaccaagcgcucccagcaggccgucauccccaacaucggcucccgcccccgcauccgcaacauccccucccgcaucuccaucuacuggaccaucgucaagcccggcgacauccuccucaucaacuccaccggcaaccucaucgccccccgcggcuacuucaagauccgcuccggcaaguccuccaucaugcgcuccgacacccccaucggcaagugcaaguccgagugcaucacccccaacggcuccauccccaacgacaagcccuuccagaacgucaaccgcaucaccuacggcgccugcccccgcuacgucaagcaguccacccucaagcucgccaccggcaugcgcaacguccccgagaagcagacccgcggcaucuucggcgccaucgccggcuucaucgagaacggcugggagggcauggucgacggcugguacggcuuccgccaccagaacuccgagggccgcggccaggccgccgaccucaaguccacccaggccgccaucgaccagaucaacggcaagcucaaccgccucaucggcaagaccaacgagaaguuccaccagaucgagaaggaguucuccgaggucgagggccgcauccaggaccucgagaaguacgucgaggacaccaagaucgaccucugguccuacaacgccgagcuccucgucgcccucgagaaccagcacaccaucgaccucaccgacuccgagaugaacaagcucuucgagaagaccaagaagcagcuccgcgagaacgccgaggacaugggcaacggcugcuucaagaucuaccacaagugcgacaacgccugcaucggcuccauccgcaacggcaccuacgaccacgacgucuaccgcgacgaggcccucaacaaccgcuuccagaucaagggcgucgagcucaaguccggcuacaaggacuggauccucuggaucuccuucgccaucuccugcuuccuccucugcgucgcccuccucggcuucaucaugugggccugccagaagggcaacauccgcugcaacaucugcaucuga

SEQ ID NO: 106083 - RNA, 1701 nt, Artificial Sequence; identical to SEQ ID NO: 106030
  derived and/or modified CDS sequence (opt2) from hemagglutinin__InfluenzaA__AGL09795

SEQ ID NO: 106084 - RNA, 1701 nt, Artificial Sequence
  derived and/or modified CDS sequence (opt2) from hemagglutinin__InfluenzaA__AGL09797
augaagaccaucaucgcccucuccuacauccucugccucgucuucucccagaagcuccccggcaacgacaacuccaccgccacccucugccucggccaccacgccguccccaacggcaccaucgucaagaccaucaccaacgaccgcaucgaggucaccaacgccaccgagcucguccagaacuccuccaucggcgagaucugcgacuccccccaccagauccucgacggcgagaacugcacccucaucgacgcccuccucggcgacccccagugcgacggcuuccagaacaagaagugggaccucuucgucgagcgcuccaaggccuacuccaacugcuaccccuacgacguccccgacuacgccucccuccgcucccucgucgccuccuccggcacccucgaguucaacaacgaguccuucaacugggccggcgucacccagaacggcaccuccuccgccugcauccgcggcuccaacuccuccuucuucucccgccucaacuggcucacccaccucaacuucaaguaccccgcccucaacgucaccaugcccaacaacgagcaguucgacaagcucuacaucuggggcguccaccaccccggcaccgacaaggaccagaucuuccucuacgcccaguccuccggccgcaucaccgucuccaccaagcgcucccagcaggccgucauccccaacaucggcucccgcccccgcauccgcaacauccccucccgcaucuccaucuacuggaccaucgucaagcccggcgacauccuccucaucaacuccaccggcaaccucaucgccccccgcggcuacuucaagauccgcuccggcaaguccuccaucaugcgcuccgacgcccccaucggcaagugcaaguccgagugcaucacccccaacggcuccauccccaacgacaagcccuuccagaacgucaaccgcaucaccuacggcgccugcccccgcuacgucaagcaguccacccucaagcucgccaccggcaugcgcaacguccccgagaagcagacccgcggcaucuucggcgccaucgccggcuucaucgagaacggcugggagggcauggucgacggcugguacggcuuccgccaccagaacuccgagggccgcggccaggccgccgaccucaaguccacccaggccgccaucgaccagaucaacggcaagcucaaccgccucaucggcaagaccaacgagaaguuccaccagaucgagaaggaguucuccgaggucgagggccgcauccaggaccucgagaaguacgucgaggacaccaagaucgaccucugguccuacaacgccgagcuccucgucgcccucgagaaccagcacaccaucgaccucaccgacuccgagaugaacaagcucuucgagaagaccaagaagcagcuccgcgagaacgccgaggacaugggcaacggcugcuucaagaucuaccacaagugcgacaacgccugcaucggcuccauccgcaacggcaccuacgaccacgacgucuaccgcgacgaggcccucaacaaccgcuuccagaucaagggcgucgagcucaaguccggcuacaaggacuggauccucuggaucuccuucgccaucuccugcuuccuccucugcgucgcccuccucggcuucaucaugugggccugccagaagggcaacauccgcugcaacaucugcaucuga

SEQ ID NO: 106085 - RNA, 1701 nt, Artificial Sequence
  derived and/or modified CDS sequence (opt2) from hemagglutinin__InfluenzaA__AGL09798
augaagaccaucaucgcccucuccuacauccucugccucgucuucgcccagaagcuccccggcaacgacaacuccaccgccacccucugccucggccaccacgccguccccaacggcaccaucgucaagaccaucaccaacgaccgcaucgaggucaccaacgccaccgagcucguccagaacuccuccaucggcgagaucugcgacuccccccaccagauccucgacggcgagaacugcacccucaucgacgcccuccucggcgacccccagugcgacggcuuccagaacaagaagugggaccucuucgucgagcgcuccaaggccuacuccaacugcuaccccuacgacguccccgacuacgccucccuccgcucccucgucgccuccuccggcacccucgaguucaacaacgaguccuucaacugggccggcgucacccagaacggcaccuccuccgccugcauccgcggcuccaacuccuccuucuucucccgccucaacuggcucacccaccucaacuucaaguaccccgcccucaacgucaccaugcccaacaacgagcaguucgacaagcucuacaucuggggcguccaccaccccggcaccgacaaggaccagaucuuccucuacgcccaguccuccggccgcaucaccgucuccaccaagcgcucccagcaggccgucauccccaacaucggcucccgcccccgcauccgcaacauccccucccgcaucuccaucuacuggaccaucgucaagcccggcgacauccuccucaucaacuccaccggcaaccucaucgccccccgcggcuacuucaagauccgcuccggcaaguccuccaucaugcgcuccgacgcccccaucggcaagugcaaguccgagugcaucacccccaacggcuccauccccaacgacaagcccuuccagaacgucaaccgcaucaccuacggcgccugcccccgcuacgucaagcaguccacccucaagcucgccaccggcaugcgcaacguccccgagaagcagacccgcggcaucuucggcgccaucgccggcuucaucgagaacggcugggagggcauggucgacggcugguacggcuuccgccaccagaacuucgagggccgcggccaggccgccgaccucaaguccacccaggccgccaucgaccagaucaacggcaagcucaaccgccucaucggcaagaccaacgagaaguuccaccagaucgagaaggaguucuccgaggucgagggccgcauccaggaccucgagaaguacgucgaggacaccaagaucgaccucugguccuacaacgccgagcuccucgucgcccucgagaaccagcacaccaucgaccucaccgacuccgagaugaacaagcucuucgagaagaccaagaagcagcuccgcgagaacgccgaggacaugggcaacggcugcuucaagaucuaccacaagugcgacaacgccugcaucggcuccauccgcaacggcaccuacgaccacuacgucuaccgcgacgaggcccucaacaaccgcuuccagaucaagggcgucgagcucaaguccggcuacaaggacuggauccucuggaucuccuucgccaucuccugcuuccuccucugcgucgcccuccucggcuucaucaugugggccugccagaagggcaacauccgcugcaacaucugcaucuga

SEQ ID NO: 106086 - RNA, 1701 nt, Artificial Sequence; identical to SEQ ID NO: 106084
  derived and/or modified CDS sequence (opt2) from hemagglutinin__InfluenzaA__AGL09799

SEQ ID NO: 106087 - RNA, 1701 nt, Artificial Sequence; identical to SEQ ID NO: 106030
  derived and/or modified CDS sequence (opt2) from hemagglutinin__InfluenzaA__AGL09800

SEQ ID NO: 106088 - RNA, 1701 nt, Artificial Sequence; identical to SEQ ID NO: 105894
  derived and/or modified CDS sequence (opt2) from hemagglutinin__InfluenzaA__AGL09801

SEQ ID NO: 106089 - RNA, 1701 nt, Artificial Sequence; identical to SEQ ID NO: 105894
  derived and/or modified CDS sequence (opt2) from hemagglutinin__InfluenzaA__AGL09802

SEQ ID NO: 106090 - RNA, 1701 nt, Artificial Sequence
  derived and/or modified CDS sequence (opt2) from hemagglutinin__InfluenzaA__AGL09803
augaagaccaucaucgcccucuccuacauccucugccucgucuucgcccagaagcuccccggcaacgacaacuccaccgccacccucugccucggccaccacgccguccccaacggcaccaucgucaagaccaucaccaacgaccgcaucgaggucaccaacgccaccgagcucguccagaacuccuccaucggcgagaucugcgacuccccccaccagauccucgacggcgagaacugcacccucaucgacgcccuccucggcgacccccagugcgacggcuuccagaacaagaagugggaccucuucgucgagcgcuccaaggccuacuccaacugcuaccccuacgacguccccgacuacgccucccuccgcucccucgucgccuccuccggcacccucgaguucaacaacgaguccuucaacuggaccggcgucacccagaacggcaccuccuccgccugcauccgccgcuccaacuccuccuucuucucccgccucaacuggcucacccaccucaacuucaaguaccccgcccucaacgucaccaugcccaacaacgagcaguucgacaagcucuacaucuggggcguccaccaccccggcaccgacaaggaccagaucuuccucuacgcccaguccuccggccgcaucaccgucuccaccaagcgcucccagcaggccgucauccccaacaucggcucccgcccccgcauccgcaacauccccucccgcaucuccaucuacuggaccaucgucaagcccggcgacauccuccucaucaacuccaccggcaaccucaucgccccccgcggcuacuucaagauccgcuccggcaaguccuccaucaugcgcuccgacgcccccaucggcaagugcaaguccgagugcaucacccccaacggcuccauccccaacgacaagcccuuccagaacgucaaccgcaucaccuacggcgccugcccccgcuacgucaagcagcgcacccucaagcucgccaccggcaugcgcaacguccccgagaagcagacccgcggcaucuucggcgccaucgccggcuucaucgagaacggcugggagggcauggucgacggcugguacggcuuccgccaccagaacuccgagggccgcggccaggccgccgaccucaaguccacccaggccgccaucgaccagaucaacggcaagcucaaccgccucaucggcaagaccaacgagaaguuccaccagaucgagaaggaguucuccgaggucgagggccgcauccaggaccucgagaaguacgucgaggacaccaagaucgaccucugguccuacaacgccgagcuccucgucgcccucgagaaccagcacaccaucgaccucaccgacuccgagaugaacaagcucuucgagaagaccaagaagcagcuccgcgagaacgccgaggacaugggcaacggcugcuucaagaucuaccacaagugcgacaacgccugcaucggcuccauccgcaacggcaccuacgaccacgacgucuaccgcgacgaggcccucaacaaccgcuuccagaucaagggcgucgagcucaaguccggcuacaaggacuggauccucuggaucuccuucgccaucuccugcuuccuccucugcgucgcccuccucggcuucaucaugugggccugccagaagggcaacauccgcugcaacaucugcaucuga

SEQ ID NO: 106091 - RNA, 1701 nt, Artificial Sequence; identical to SEQ ID NO: 105927
  derived and/or modified CDS sequence (opt2) from hemagglutinin__InfluenzaA__AGL09804

SEQ ID NO: 106092 - RNA, 1701 nt, Artificial Sequence; identical to SEQ ID NO: 106033
  derived and/or modified CDS sequence (opt2) from hemagglutinin__InfluenzaA__AGL09805

SEQ ID NO: 106093 - RNA, 1701 nt, Artificial Sequence; identical to SEQ ID NO: 106062
  derived and/or modified CDS sequence (opt2) from hemagglutinin__InfluenzaA__AGL09806

SEQ ID NO: 106094 - RNA, 1701 nt, Artificial Sequence; identical to SEQ ID NO: 106033
  derived and/or modified CDS sequence (opt2) from hemagglutinin__InfluenzaA__AGL09807

SEQ ID NO: 106095 - RNA, 1701 nt, Artificial Sequence
  derived and/or modified CDS sequence (opt2) from hemagglutinin__InfluenzaA__AGL09808
augaagaccaucaucgcccucuccuacauccucugccucgucuucgcccagaagcuccccggcaacgacaacuccaccgccacccucugccucggccaccacgccguccccaacggcaccaucgucaagaccaucaccaacgaccagaucgaggucaccaacgccaccgagcucguccagaacuccuccaucggcgagaucugcgacuccccccaccagauccucgacggcgagaacugcacccucaucgacgcccuccucggcgacccccagugcgacggcuuccagaacaagaagugggaccucuucgucgagcgcuccaaggccuacuccaacugcuaccccuacgacguccccgacuacgccucccuccgcucccucgucgccuccuccggcacccucgaguucaacaacgaguccuucaacugggccggcgucacccagaacggcaccuccuccgccugcauccgcggcuccaacuccuccuucuucucccgccucaacuggcucacccaccucaacuucaaguaccccgcccucaacgucaccaugcccaacaacgagcaguucgacaagcucuacaucuggggcguccaccaccccggcaccgacaaggaccagaucuuccucuacgcccaguccuccggccgcaucaccgucuccaccaagcgcucccagcaggccgucauccccaacgucggcucccgcccccgcauccgcaacauccccucccgcaucuccaucuacuggaccaucgucaagcccggcgacauccuccucaucaacuccaccggcaaccucaucgccccccgcggcuacuucaagauccgcuccggcaaguccuccaucaugcgcuccgacgcccccaucggcaagugcaaguccgagugcaucacccccaacggcuccauccccaacgacaagcccuuccagaacgucaaccgcaucaccuacggcgccugcccccgcuacgucaagcaguccacccucaagcucgccaccggcaugcgcaacguccccgagaagcagacccgcggcaucuucggcgccaucgccggcuucaucgagaacggcugggagggcauggucgacggcugguacggcuuccgccaccagaacuccgagggccgcggccaggccgccgaccucaaguccacccaggccgccaucgaccagaucaacggcaagcucaaccgccucaucggcaagaccaacgagaaguuccaccagaucgagaaggaguucuccgaggucgagggccgcauccaggaccucgagaaguacgucgaggacaccaagaucgaccucugguccuacaacgccgagcuccucgucgcccucgagaaccagcacaccaucgaccucaccgacuccgagaugaacaagcucuucgagaagaccaagaagcagcuccgcgagaacgccgaggacaugggcaacggcugcuucaagaucuaccacaagugcgacaacgccugcaucggcuccauccgcaacggcaccuacgaccacgacgucuaccgcgacgaggcccucaacaaccgcuuccagaucaagggcgucgagcucaaguccggcuacaaggacuggauccucuggaucuccuucgccaucuccugcuuccuccucugcgucgcccuccucggcuucaucaugugggccugccagaagggcaacauccgcugcaacaucugcaucuga

SEQ ID NO: 106096 - RNA, 1701 nt, Artificial Sequence
  derived and/or modified CDS sequence (opt2) from hemagglutinin__InfluenzaA__AGL09809
augaaggccauccucgucgucaugcucuacaccuucgccaccgccaacgccgacacccucugcaucggcuaccacgccaacaacuccaccgacaccgucgacaccguccucgagaagaacgucaccgucacccacuccgucaaccuccucgaggacaagcacaacggcaagcucugcaagcuccgcggcgucgccccccuccaccucggcaagugcaacaucgccggcuggauccucggcaaccccgagugcgagucccucuccaccgccuccuccugguccuacaucgucgagaccuccggcuccgacaacggcaccugcuaccccggcgacuucaucgacuacgaggagcuccgcgagcagcucuccuccgucuccuccuucgagcgcuucgagaucuuccccaagaccuccuccuggcccaaccacgacuccaacaagggcgucaccgccgccugcccccacgccggcgccaagggcuucuacaagaaccucaucuggcucgucaagaagggcaacuccuaccccaagcucuccaucuccuacaucaacgacaagggcaaggagguccucguccucuggggcauccaccaccccuccaccaccgccgaccagcagucccucuaccagaacgccgacaccuacgucuucgucggcaccucccgcuacuccaagaaguucaagcccgagaucgccauccgccccaagguccgcgaccaggagggccgcaugaacuacuacuggacccucgucgagcccggcgacaagaucaccuucgaggccaccggcaaccucgucgucccccgcuacgccuucgccauggagcgcaacgccggcuccggcaucaucaucuccgacacccccguccacgacugcaacaccaccugccagacccccaagggcgccaucaacaccucccuccccuuccagaacauccaccccaucaccaucggcaagugccccaaguacgucaaguccaccaagcuccgccucgccaccggccuccgcaacguccccuccauccagucccgcggccucuucggcgccaucgccggcuucaucgagggcggcuggaccggcauggucgacggcugguacggcuaccaccaccagaacgagcagggcuccggcuacgccgccgaccucaaguccacccagaacgccaucgacaagaucaccaacaaggucaacuccgucaucgagaagaugaacacccaguucaccgccgucggcaaggaguucaaccaccucgagaagcgcaucgagaaccucaacaagaaggucgacgacggcuuccucgacaucuggaccuacaacgccgagcuccucguccuccucgagaacgagcgcacccucgacuaccacgacuccaacgucaagaaccucuacgagaagguccgcaaccagcucaagaacaacgccaaggagaucggcaacggcugcuucgaguucuaccacaagugcgacaacaccugcauggaguccgucaagaacggcaccuacgacuaccccaaguacuccgaggaggccaagcucaaccgcgaggagaucgacggcgucaagcucgaguccacccgcaucuaccagauccucgccaucuacuccaccgccgccuccucccucguccucgucgucucccucggcgccaucuccuucuggaugugcuccaacggcucccuccagugccgcaucugcaucuga

SEQ ID NO: 106097 - RNA, 1701 nt, Artificial Sequence
  derived and/or modified CDS sequence (opt2) from hemagglutinin__InfluenzaA__AGL09810
augaagaccaucaucgcccucuccuacauccucugccucgucuucgcccagaagcuccccggcaacgacaacuccaccgccacccucugccucggccaccacgccguccccaacggcaccaucgucaagaccaucaccaacgaccgcaucgaggucaccaacgccaccgagcucguccagaacuccuccaucggcgagaucugcgacuccccccaccagauccucgacggcgagaacugcacccucaucgacgcccuccucggcgacccccagugcgacggcuuccagaacaagaagugggaccucuucgucgagcgcuccaaggccuacuccaacugcuaccccuacgacguccccgacuacgccucccuccgcucccucgucgccuccuccggcacccucgaguucuccaacgaguccuucaacuggaccggcgucacccagaacggcaccuccuccgccugcauccgccgcuccaacuccuccuucuucucccgccucaacuggcucacccaccucaacuucaaguaccccgcccucaacgucaccaugcccaacaacgagcaguucgacaagcucuacaucuggggcguccaccaccccggcaccgacaaggaccagaucuuccucuacgcccaguccuccggccgcaucaccgucuccaccaagcgcucccagcaggccgucauccccaacaucggcucccgcccccgcauccgcaacauccccucccgcaucuccaucuacuggaccaucgucaagcccggcgacauccuccucaucaacuccaccggcaaccucaucgccccccgcggcuacuucaagauccgcuccggcaaguccuccaucaugcgcuccgacgcccccaucggcaagugcaaguccgagugcaucacccccaacggcuccauccccaacgacaagcccuuccagaacgucaaccgcaucaccuacggcaccugcccccgcuacgucaagcaguccacccucaagcucgccaccggcaugcgcaacguccccgagaagcagacccgcggcaucuucggcgccaucgccggcuucaucgagaacggcugggagggcauggucgacggcugguacggcuuccgccaccagaacuccgagggccgcggccaggccgccgaccucaaguccacccaggccgccaucgaccagaucaacggcaagcucaaccgccucaucggcaagaccaacgagaaguuccaccagaucgagaaggaguucuccgaggucgagggccgcauccaggaccucgagaaguacgucgaggacaccaagaucgaccucugguccuacaacgccgagcuccucgucgcccucgagaaccagcacaccaucgaccucaccgacuccgagaugaacaagcucuucgagaagaccaagaagcagcuccgcgagaacgccgaggacaugggcaacggcugcuucaagaucuaccacaagugcgacaacgccugcaugggcuccauccgcaacggcaccuacgaccacgacgucuaccgcgacgaggcccucaacaaccgcuuccagaucaagggcgucgagcucaaguccggcuacaaggacuggauccucuggaucuccuucgccaucuccugcuuccuccucugcgucgcccuccucggcuucaucaugugggccugccagaagggcaacauccgcugcaacaucugcaucuga

SEQ ID NO: 106098 - RNA, 1701 nt, Artificial Sequence; identical to SEQ ID NO: 105894
  derived and/or modified CDS sequence (opt2) from hemagglutinin__InfluenzaA__AGL09811

SEQ ID NO: 106099 - RNA, 1701 nt, Artificial Sequence
  derived and/or modified CDS sequence (opt2) from hemagglutinin__InfluenzaA__AGL09812
augaagaccaucaucgcccucuccuacauccucugccucgucuucgcccagaagcuccccggcaacgacaacuccaccgccacccucugccucggccaccacgccguccccaacggcaccaucgucaagaccaucaccaacgaccgcaucgaggucaccaacgccaccgagcucguccagaacuccuccaucggcgagaucugcgacuccccccaccagauccucgacggcgagaacugcacccucaucgacgcccuccucggcgacccccagugcgacggcuuccaggacaagaagugggaccucuucgucgagcgcuccaaggccuacuccaacugcuaccccuacgacguccccgacuacgccucccuccgcucccucgucgccuccuccggcacccucgaguucaacaacgaguccuucaacugggccggcgucacccagaacggcaccuccuccgccugcauccgcggcuccaacuccuccuucuucucccgccucaacuggcucacccaccucaacuucaaguaccccgcccucaacgucaccaugcccaacaacgagcaguucgacaagcucuacaucuggggcguccaccaccccggcaccgacaaggaccagaucuuccucuacgcccaguccuccggccgcaucaccgucuccaccaagcgcucccagcaggccgucauccccaacaucggcucccgcccccgcauccgcaacauccccucccgcaucuccaucuacuggaccaucgucaagcccggcgacauccuccucaucaacuccaccggcaaccucaucgccccccgcggcuacuucaagauccgcuccggcaaguccuccaucaugcgcuccgacgcccccaucggcaagugcaaguccgagugcaucacccccaacggcuccauccccaacgacaagcccuuccagaacgucaaccgcaucaccuacggcgccugcccccgcuacgucaagcaguccacccucaagcucgccaccggcaugcgcaacguccccgagaagcagacccgcggcaucuucggcgccaucgccggcuucaucgagaacggcugggagggcauggucgacggcugguacggcuuccgccaccagaacuccgagggccgcggccaggccgccgaccucaaguccacccaggccgccaucgaccagaucaacggcaagcucaaccgccucaucggcaagaccaacgagaaguuccaccagaucgagaaggaguucuccgaggucgagggccgcauccaggaccucgagaaguacgucgaggacaccaagaucgaccucugguccuacaacgccgagcuccucgucgcccucgagaaccagcacaccaucgaccucaccgacuccgagaugaacaagcucuucgagaagaccaagaagcagcuccgcgagaacgccgaggacaugggcaacggcugcuucaagaucuaccacaagugcgacaacgccugcaucggcuccauccgcaacggcaccuacgaccacgacgucuaccgcgacgaggcccucaacaaccgcuuccagaucaagggcgucgagcucaaguccggcuacaaggacuggauccucuggaucuccuucgccaucuccugcuuccuccucugcgucgcccuccucggcuucaucaugugggccugccagaagggcaacauccgcugcaacaucugcaucuga

SEQ ID NO: 106100 - RNA, 1701 nt, Artificial Sequence; identical to SEQ ID NO: 105871
  derived and/or modified CDS sequence (opt2) from hemagglutinin__InfluenzaA__AGL09813

SEQ ID NO: 106101 - RNA, 1701 nt, Artificial Sequence; identical to SEQ ID NO: 105919
  derived and/or modified CDS sequence (opt2) from hemagglutinin__InfluenzaA__AGL09814

SEQ ID NO: 106102 - RNA, 1701 nt, Artificial Sequence
  derived and/or modified CDS sequence (opt2) from hemagglutinin__InfluenzaA__AGL09815
augaagaccaucaucgcccucuccuacauccucugccucgucuucgcccagaagcuccccggcaacgacaacuccaccgccacccucugccucggccaccacgccguccccaacggcaccaucgucaagaccaucaccaacgaccgcaucgaggucaccaacgccaccgagcucguccagaacuccuccaucggcgagaucugcgacuccccccaccagauccucgacggcgagaacugcacccucaucgacgcccuccucggcgacccccagugcgacggcuuccagaacaagaagugggaccucuucgucgagcgcuccaaggccuacuccaacugcuaccccuacgacguccccgacuacgccucccuccgcucccucgucgccuccuccggcacccucgaguucaacaacgaguccuucaacuggaccggcgucacccagaacggcaccuccuccgccugcauccgccgcuccaacuccuccuucuucucccgccucaacuggcucacccaccucaacuucaaguaccccgcccucaacgucaccaugcccaacaacgagcaguucgacaagcucuacaucuggggcguccaccaccccggcaccgacaaggaccagaucuuccucuacgcccaguccuccggccgcaucaccgucuccaccaagcgcucccagcaggccgucauccccaacaucggcucccgcccccgcauccgcuccauccccucccgcaucuccaucuacuggaccaucgucaagcccggcgacauccuccucaucaacuccaccggcaaccucaucgccccccgcggcuacuucaagauccgcuccggcaaguccuccaucaugcgcuccgacgcccccaucggcaagugcaaguccgagugcaucacccccaacggcuccauccccaacgacaagcccuuccagaacgucaaccgcaucaccuacggcgccugcccccgcuacgucaagcaguccacccucaagcucgccaccggcaugcgcaacguccccgagaagcagacccgcggcaucuucggcgccaucgccggcuucaucgagaacggcugggagggcauggucgacggcugguacggcuuccgccaccagaacuccgagggccgcggccaggccgccgaccucaaguccacccaggccgccaucgaccagaucaacggcaagcucaaccgccucaucggcaagaccaacgagaaguuccaccagaucgagaaggaguucuccgaggucgagggccgcauccaggaccucgagaaguacgucgaggacaccaagaucgaccucugguccuacaacgccgagcuccucgucgcccucgagaaccagcacaccaucgaccucaccgacuccgagaugaacaagcucuucgagaagaccaagaagcagcuccgcgagaacgccgaggacaugggcaacggcugcuucaagaucuaccacaagugcgacaacgccugcaucggcuccauccgcaacggcaccuacgaccacgacgucuaccgcgacgaggcccucaacaaccgcuuccagaucaagggcgucgagcucaaguccggcuacaaggacuggauccucuggaucuccuucgccaucuccugcuuccuccucugcgucgcccuccucggcuucaucaugugggccugccagaagggcaacauccgcugcaacaucugcaucuga

SEQ ID NO: 106103 - RNA, 1701 nt, Artificial Sequence; identical to SEQ ID NO: 105919
  derived and/or modified CDS sequence (opt2) from hemagglutinin__InfluenzaA__AGL09816

SEQ ID NO: 106104 - RNA, 1701 nt, Artificial Sequence
  derived and/or modified CDS sequence (opt2) from hemagglutinin__InfluenzaA__AGL09817
augaagaccaucaucgcccucuccuacauccucugccucgucuucgcccaggagcuccccggcaacgacgacuccaccgccacccucugccucggccaccacgccguccccaacggcaccaucgucaagaccaucaccaacgaccagaucgaggucaccaacgccaccgagcucguccaguccuccuccaccggcgagaucugcaacuccccccaccagauccucgacggcgagaacugcacccucaucgacgcccuccucggcgacccccagugcgacggcuuccagaacaagaagugggaccucuucgucgagcgcuccaaggcccacuccaacugcuaccccuacgacguccccgacuacgccucccuccgcucccucgucgccuccuccggcacccucgaguucaacuccgaguccuucaacuggaccggcgucacccagaacggcaccuccuccgccugcauccgccgcuccaacaacuccuucuucucccgccucaacuggcucacccaccucaacuucaaguaccccgcccucaacgucaccaugcccaacaacgagcaguucgacaagcucuacaucuggggcguccaccaccccggcaccgacaaggaccagaucuuccucuacgcccaggccuccggccgcaucaccgucuccaccaagcgcucccagcaggccgucauccccaacaucggcucccgcccccgcguccgcaacauccccucccgcgucuccaucuacuggaccaucgucaagcccggcgacauccuccucaucaacuccaccggcaaccucaucgccccccgcggcuacuucaagauccgcuccggcaaguccuccaucaugcgcuccgacgcccccaucggcaagugcaacuccgccugcaucacccccaacggcuccauccccaacgacaagcccuuccagaacgucaaccgcaucaccuacggcgccugcccccgcuacgucaagcagaacacccucaagcucgccaccggcaugcgcaacguccccgagaagcagacccgcggcaucuucggcgccaucgccggcuucaucgagaacggcugggagggcauggucgacggcugguacggcuuccgccaccagaacuccgagggccgcggccaggccgccgaccucaaguccacccaggccgccaucgaccagaucaacggcaagcucaaccgccucaucggcaagaccaacgagaaguuccaccagaucgagaaggaguucuccgaggucgagggccgcauccaggaccucgagaaguacgucgaggacaccaagaucgaccucugguccuacaacgccgagcuccucgucgcccucgagaaccagcacaccaucgaccucaccgacuccgagaugaacaagcucuucgagaagaccaagaagcagcuccgcgagaacgccgaggacaugggcaacggcugcuucaagaucuaccacaagugcgacaacgccugcaucggcuccauccgcaacggcaccuacgaccacgacgucuaccgcgacgaggcccucaacaaccgcuuccagaucaagggcgucgagcucaaguccggcuacaaggacuggauccucuggaucuccuucgccaucuccugcuuccuccucugcgucgcccuccucggcuucaucaugugggccugccagaagggcaacauccgcugcaacaucugcaucuga

SEQ ID NO: 106105 - RNA, 1701 nt, Artificial Sequence; identical to SEQ ID NO: 105919
  derived and/or modified CDS sequence (opt2) from hemagglutinin__InfluenzaA__AGL09818

SEQ ID NO: 106106 - RNA, 1701 nt, Artificial Sequence; identical to SEQ ID NO: 106030
  derived and/or modified CDS sequence (opt2) from hemagglutinin__InfluenzaA__AGL09819

SEQ ID NO: 106107 - RNA, 1701 nt, Artificial Sequence
  derived and/or modified CDS sequence (opt2) from hemagglutinin__InfluenzaA__AGL09820
augaagaccaucaucgcccucuccuacauccucugccucgucuucgcccagaagcuccccggcaacgacaacuccaccgccacccucugccucggccaccacgccguccccaacggcaccaucgucaagaccaucaccaacgaccagaucgaggucaccaacgccaccgagcucguccagaacuccuccaucggcgagaucugcgacuccccccaccagauccucgacggcgagaacugcacccucaucgacgcccuccucggcgacccccagugcgacggcuuccagaacaagaagugggaccucuucgucgagcgcuccaaggccuacuccaacugcuaccccuacgacguccccgacuacgccucccuccgcucccucgucgccuccuccggcacccucgaguucaacaacgaguccuucaacuggaccggcgucacccagaacggcaccuccuccgccugcauccgcggcuccaacuccuccuucuucucccgccucaacuggcucacccaccucaacuucaaguaccccgcccucaacgucaccaugcccaacaacgagcaguucgacaagcucuacaucuggggcguccaccaccccggcaccgacaaggaccagaucuuccucuacgcccaguccuccggccgcaucaccgucuccaccaagcgcucccagcaggccgucauccccaacaucggcucccgcccccgcauccgcaacauccccucccgcaucuccaucuacuggaccaucgucaagcccggcgacauccuccucaucaacuccaccggcaaccucaucgccccccgcggcuacuucaagauccgcuccggcaaguccuccaucaugcgcuccgacgcccccaucggcaagugcaaguccgagugcaucacccccaacggcuccauccccaacgacaagcccuuccagaacgucaaccgcaucaccuacggcgccugcccccgcuacgucaagcaguccacccucaagcucgccaccggcaugcgcaacguccccgagaagcagacccgcggcaucuucggcgccaucgccggcuucaucgagaacggcugggagggcauggucgacggcugguacggcuuccgccaccagaacuccgagggccgcggccaggccgccgaccucaaguccacccaggccgccaucgaccagaucaacggcaagcucaaccgccucaucggcaagaccaacgagaaguuccaccagaucgagaaggaguucuccgagaucgagggccgcauccaggaccucgagaaguacgucgaggacaccaagaucgaccucugguccuacaacgccgagcuccucgucgcccucgagaaccagcacaccaucgaccucaccgacuccgagaugaacaagcucuucgagaagaccaagaagcagcuccgcgagaacgccgaggacaugggcaacggcugcuucaagaucuaccacaagugcgacaacgccugcaucggcuccauccgcaacggcaccuacgaccacgacgucuaccgcgacgaggcccucaacaaccgcuuccagaucaagggcgucgagcucaaguccggcuacaaggacuggauccucuggaucuccuucgccaucuccugcuuccuccucugcgucgcccuccucggcuucaucaugugggccugccagaagggcaacauccgcugcaacaucugcaucuga

SEQ ID NO: 106108 - RNA, 1701 nt, Artificial Sequence
  derived and/or modified CDS sequence (opt2) from hemagglutinin__InfluenzaA__AGL09821
augaagaccaucaucgcccucuccuacauccucugccucgucuucgcccagaagcuccccggcaacgacaacuccaccgccacccucugccucggccaccacgccguccccaacggcaccaucgucaagaccaucaccaacgaccgcaucgaggucaccaacgccaccgagcucguccagaacuccuccaucggcgagaucugcgacuccccccaccagauccucgacggcgagaacugcacccucaucgacgcccuccucggcgacccccagugcgacggcuuccagaacaagaagugggaccucuucgucgagcgcuccaaggccuacuccaacugcuaccccuacgacguccccgacuacgccucccuccgcucccucgucgccuccuccggcacccucgaguucaacaacgaguccuucaacuggaccggcgucacccagaacggcaccuccuccgccugcauccgccgcuccaacuccuccuucuucucccgccucaacuggcucacccaccucaacuucaaguaccccgcccucaacgucaccaugcccaacaacgagcaguucgacaagcucuacaucuggggcguccaccaccccggcaccgacaaggaccagaucuuccucuacgcccaguccuccggccgcaucaccgucuccaccaagcgcucccagcaggccgucauccccaacaucggcucccgcccccgcauccgcaacauccccucccgcaucuccaucuacuggaccaucgucaagcccggcgacauccuccucaucaacuccaccggcaaccucaucgccccccgcggcuacuucaagauccgcuccggcaaguccuccaucaugcgcuccgacgcccccaucggcaagugcaaguccgagugcaucacccccaacggcuccauccccaacgacaagcccuuccagaacgucaaccgcaucaccuacggcgccugcccccgcuacgucaagcaguccacccucaagcucgccaccggcaugcgcaacguccccgagaagcagacccgcggcaucuucggcgccaucgccggcuucaucgagaacggcugggagggcauggucgacggcugguacggcuuccgccaccagaacuccgagggccgcggccaggccgccgaccucaaguccacccaggccgccaucgaccagaucaacggcaagcucaaccgccucaucggcaagaccaacgagaaguuccaccagaucgagaaggaguucuccgaggucgagggccgcauccaggaccucgagaaguacgucgaggacaccaagaucgaccucugguccuacaacgccgagcuccucgucgcccucgagaaccagcacaccaucgaccucaccgacuccgagaugaacaagcucuucgagaagaccaagaagcagcuccgcgagaacgccgaggacaugggcaacggcugcuucaagaucuaccacaagugcgacaacgccugcaucggcuccauccgcaacggcaccuacgaccacaacgucuaccgcgacgaggcccucaacaaccgcuuccagaucaagggcaucgagcucaaguccggcuacaaggacuggauccucuggaucuccuucgccaucuccugcuuccuccucugcgucgcccuccucggcuucaucaugugggccugccagaagggcaacauccgcugcaacaucugcaucuga

SEQ ID NO: 106109 - RNA, 1701 nt, Artificial Sequence; identical to SEQ ID NO: 106033
  derived and/or modified CDS sequence (opt2) from hemagglutinin__InfluenzaA__AGL09822

SEQ ID NO: 106110 - RNA, 1701 nt, Artificial Sequence; identical to SEQ ID NO: 106076
  derived and/or modified CDS sequence (opt2) from hemagglutinin__InfluenzaA__AGL09823

SEQ ID NO: 106111 - RNA, 1701 nt, Artificial Sequence
  derived and/or modified CDS sequence (opt2) from hemagglutinin__InfluenzaA__AGL09824
augaaggccauccucgucguccuccucuacaccuucgccaccgccaacgccgacacccucugcaucggcuaccacgccaacaacuccaccgacaccgucgacaccguccucgagaagaacgucaccgucacccacuccgucaaccuccucgaggacaagcacaacggcaagcucugcaagcuccgcggcgucgccccccuccaccucggcaagugcaacaucgccggcuggauccucggcaaccccgagugcgagucccucuccaccgccuccuccugguccuacaucgucgagaccuccuccuccgacaacggcaccugcuaccccggcgacuucaucaacuacgaggagcuccgcgagcagcucuccuccgucuccuccuucgagcgcuucgagaucuuccccaagaccuccuccuggcccaaccacgacuccaacaagggcgucaccgccgccugcccccacgccggcaccaaguccuucuacaagaaccucaucuggcucgucaagaagggcaacuccuaccccaagcucuccaaguccuacaucaacgacaagggcaaggagguccucguccucuggggcauccaccaccccuccaccaccgccgaccagcagucccucuaccagaacgccgacgccuacgucuucgucggcaccucccgcuacuccaagaaguucaagcccgagaucgccauccgccccaagguccgcgaccaggagggccgcaugaacuacuacuggacccucaucgagcccggcgacaagaucaccuucgaggccaccggcaaccucgucgucccccgcuacgccuucgccauggagcgcaacgccggcuccggcaucaucaucuccgacacccccguccacgacugcaacaccaccugccagacccccgagggcgccaucaacaccucccuccccuuccagaacauccaccccaucaccaucggcaagugccccaaguacgucaaguccaccaagcuccgccucgccaccggccuccgcaacguccccuccauccagucccgcggccucuucggcgccaucgccggcuucaucgagggcggcuggaccggcauggucgacggcugguacggcuaccaccaccagaacgagcagggcuccggcuacgccgccgaccucaaguccacccagaacgccaucgacaagaucaccaacaaggucaacuccgucaucgagaagaugaacacccaguucaccgccgucggcaaggaguucaaccaccucgagaagcgcaucgagaaccucaacaagaaggucgacgacggcuuccucgacaucuggaccuacaacgccgagcuccucguccuccucgagaacgagcgcacccucgacuaccacgacuccaacgucaagaaccucuacgagaagguccgcaaccagcucaagaacaacgccaaggagaucggcaacggcugcuucgaguucuaccacaagugcgacaacaccugcauggaguccgucaagaacggcaccuacgacuaccccaaguacuccgaggaggccaagcucaaccgcgagaagaucgacggcgucaagcucgaguccacccgcaucuaccagauccucgccaucuacuccaccgucgccuccucccucguccucgucgucucccucggcgccaucuccuucuggaugugcuccaacggcucccuccagugccgcaucugcaucuga

SEQ ID NO: 106112 - RNA, 1701 nt, Artificial Sequence; identical to SEQ ID NO: 106030
  derived and/or modified CDS sequence (opt2) from hemagglutinin__InfluenzaA__AGL09825

SEQ ID NO: 106113 - RNA, 1701 nt, Artificial Sequence; identical to SEQ ID NO: 106111
  derived and/or modified CDS sequence (opt2) from hemagglutinin__InfluenzaA__AGL09826

SEQ ID NO: 106114 - RNA, 1701 nt, Artificial Sequence; identical to SEQ ID NO: 105904
  derived and/or modified CDS sequence (opt2) from hemagglutinin__InfluenzaA__AGL09827

SEQ ID NO: 106115 - RNA, 1701 nt, Artificial Sequence
  derived and/or modified CDS sequence (opt2) from hemagglutinin__InfluenzaA__AGL09828
augaagaccaucaucgcccucuccuacauccucugccucgucuucgcccagaagcuccccggcaacgacaacuccaccgccacccucugccucggccaccacgccguccccaacggcaccaucgucaagaccaucaccaacgaccagaucgaggucaccaacgccaccgagcucguccagaacuccuccaucggcgagaucugcgacuccccccaccagauccucgacggcgagaacugcacccucaucgacgcccuccucggcgacccccagugcgacggcuuccagaacaagaagugggaccucuucgucgagcgcuccaaggccuacuccaacugcuaccccuacgacguccccgacuacgccucccuccgcucccucgucgccuccuccggcacccucgaguucaacaacgaguccuucaacugggccggcgucacccagaacggcaccuccuccgccugcauccgcggcuccaacuccuccuucuucucccgccucaacuggcucacccaccucaacuucaaguaccccgcccucaacgucaccaugcccaacaacgagcaguucgacaagcucuacaucuggggcguccaccaccccggcaccgacaaggaccagaucuuccucuacgcccaguccuccggccgcaucaccgucuccaccaagcgcucccagcaggccgucauccccaacaucggcucccgcccccgcauccgcaacauccccucccgcaucuccaucuacuggaccaucgucaagcccggcgacauccuccucaucaacuccaccggcaaccucaucgccccccgcggcuacuucaagauccgcuccggcaaguccuccaucaugcgcuccgacgcccccaucggcaagugcaaguccgagugcaucacccccaacggcuccauccccaacgacaagcccuuccagaacgucaaccgcaucaccuacggcgccugcccccgcuacgucaagcaguccacccucaagcucgccaccggcaugcgcaacguccccgagaagcagacccgcggcaucuucggcgccaucgccggcuucaucgagaacggcugggagggcauggucgacggcugguacggcuaccgccaccagaacuccgagggccgcggccaggccgccgaccucaaguccacccaggccgccaucgaccagaucaacggcaagcucaaccgccucaucggcaagaccaacgagaaguuccaccagaucgagaaggaguucuccgaggucgagggccgcauccaggaccucgagaaguacgucgaggacaccaagaucgaccucugguccuacaacgccgagcuccucgucgcccucgagaaccagcacaccaucgaccucaccgacuccgagaugaacaagcucuucgagaagaccaagaagcagcuccgcgagaacgccgaggacaugggcaacggcugcuucaagaucuaccacaagugcgacaacgccugcaucggcuccauccgcaacggcaccuacgaccacgacgucuaccgcgacgaggcccucaacaaccgcuuccagaucaagggcgucgagcucaaguccggcuacaaggacuggauccucuggaucuccuucgccaucuccugcuuccuccucugcgucgcccuccucggcuucaucaugugggccugccagaagggcaacauccgcugcaacaucugcaucuga

SEQ ID NO: 106116 - RNA, 1701 nt, Artificial Sequence
  derived and/or modified CDS sequence (opt2) from hemagglutinin__InfluenzaA__AGL09829
augaagaccaucaucgcccucuccuacauccucugccucgucuucgcccagaagcuccccggcaacgacaacuccaccgccacccucugccucggccaccacgccguccccaacggcaccaucgucaagaccaucaccaacgaccgcaucgaggucaccaacgccaccgagcucguccagaacuccuccaucggcgagaucugcgacuccccccaccagauccucgacggcgagaacugcacccucaucgacgcccuccucggcgacccccagugcgacggcuuccagaacaagaagugggaccucuucgucgagcgcuccaaggccuacuccaacugcuaccccuacgacguccccgacuacgccucccuccgcucccucgucgccuccuccggcacccucgaguucaacaacgaguccuucaacugggccggcgucacccagaacggcaccuccuccgccugcauccgcggcuccaacuccuccuucuucucccgccucaacuggcucacccaccucaacuucaaguaccccgcccucaacgucaccaugcccaacaacgagcaguucgacaagcucuacaucuggggcguccaccaccccggcaccgacaaggaccagaucuuccucuacgcccaguccuccggccgcaucaccgucuccaccaagcgcucccagcaggccgucauccccaacaucggcucccgcccccgcauccgcaacauccccucccgcaucuccaucuacuggaccaucgucaagcccggcgacauccuccucaucaacuccaccggcaaccucaucgccccccgcggcuacuucaagauccgcuccggcaaguccuccaucaugcgcuccgacgcccccaucggcaagugcaaguccgagugcaucacccccaacggcuccauccccaacgacaagcccuuccagaacgucaaccgcaucaccuacggcgccugcccccgcuacgucaagcaguccacccucaagcucgccaccggcaugcgcaacguccccgagaagcagacccgcggcaucuucggcgccaucgccggcuucaucgagaacggcugggagggcauggucgacggcugguacggcuuccgccaccagaacuccgagggccgcggccaggccgccgaccucgaguccacccaggccgccaucgaccagaucaacggcaagcucaaccgccucaucggcaagaccaacgagaaguuccaccagaucgagaaggaguucuccgaggucgagggccgcauccaggaccucgagaaguacgucgaggacaccaagaucgaccucugguccuacaacgccgagcuccucgucgcccucgagaaccagcacaccaucgaccucaccgacuccgagaugaacaagcucuucgagaagaccaagaagcagcuccgcgagaacgccgaggacaugggcaacggcugcuucaagaucuaccacaagugcgacaacgccugcaucggcuccauccgcaacggcaccuacgaccacgacgucuaccgcgacgaggcccucaacaaccgcuuccagaucaagggcgucgagcucaaguccggcuacaaggacuggauccucuggaucuccuucgccaucuccugcuuccuccucugcgucgcccuccucggcuucaucaugugggccugccagaagggcaacauccgcugcaacaucugcaucuga

SEQ ID NO: 106117 - RNA, 1701 nt, Artificial Sequence; identical to SEQ ID NO: 105919
  derived and/or modified CDS sequence (opt2) from hemagglutinin__InfluenzaA__AGL09830

SEQ ID NO: 106118 - RNA, 1701 nt, Artificial Sequence; identical to SEQ ID NO: 106029
  derived and/or modified CDS sequence (opt2) from hemagglutinin__InfluenzaA__AGL09831

SEQ ID NO: 106119 - RNA, 1701 nt, Artificial Sequence
  derived and/or modified CDS sequence (opt2) from hemagglutinin__InfluenzaA__AGL09832
augaagaccaucaucgcccucuccuacauccucugccucgucuucgcccagaagcuccccggcaacgacaacuccaccgccacccucugccucggccaccacgccguccccaacggcaccaucgucaagaccaucaccaacgaccgcaucgaggucaccaacgccaccgagcucguccagaacuccuccaucggcgagaucugcgacuccccccaccagauccucgacggcgagaacugcacccucaucgacgcccuccucggcgacccccagugcgacggcuuccagaacaagaagugggaccucuucgucgagcgcuccaaggccuacuccaacugcuaccccuacgacguccccgacuacgccucccuccgcucccucgucgccuccuccggcacccucgaguucaacaacgaguccuucaacuggaccggcgucacccagaacggcaccuccuccgccugcauccgccgcuccaacuccuccuucuucucccgccucaacuggcucacccacuccaacuucaaguaccccgcccucaacgucaccaugcccaacaacgagcaguucgacaagcucuacaucuggggcguccaccaccccggcaccgacaaggaccagaucuuccucuacgcccaguccuccggccgcaucaccgucuccaccaagcgcucccagcaggccgucauccccaacaucggcucccgcccccgcauccgcaacauccccucccgcaucuccaucuacuggaccaucgucaagcccggcgacauccuccucaucaacuccaccggcaaccucaucgccccccgcggcuacuucaagauccgcuccggcaaguccuccaucaugcgcuccgacgcccccaucggcaagugcaaguccgagugcaucacccccaacggcuccauccccaacgacaagcccuuccagaacgucaaccgcaucaccuacggcgccugcccccgcuacgucaagcaguccacccucaagcucgccaccggcaugcgcaacguccccgagaagcagacccgcggcaucuucggcgccaucgccggcuucaucgagaacggcugggagggcauggucgacggcugguacggcuuccgccaccagaacuccgagggccgcggccaggccgccgaccucaaguccacccaggccgccaucgaccagaucaacggcaagcucaaccgccucaucggcaagaccaacgagaaguuccaccagaucgagaaggaguucuccgaggucgagggccgcauccaggaccucgagaaguacgucgaggacaccaagaucgaccucugguccuacaacgccgagcuccucgucgcccucgagaaccagcacaccaucgaccucaccgacuccgagaugaacaagcucuucgagaagaccaagaagcagcuccgcgagaacgccgaggacaugggcaacggcugcuucaagaucuaccacaagugcgacaacgccugcaucggcaccauccgcaacggcaccuacgaccacaacgucuaccgcgacgaggcccucaacaaccgcuuccagaucaagggcgucgagcucaaguccggcuacaaggacuggauccucuggaucuccuucgccaucuccugcuuccuccucugcgucgcccuccucggcuucaucaugugggccugccagaagggcaacauccgcugcaacaucugcaucuga

SEQ ID NO: 106120 - RNA, 1701 nt, Artificial Sequence; identical to SEQ ID NO: 106030
  derived and/or modified CDS sequence (opt2) from hemagglutinin__InfluenzaA__AGL09833

SEQ ID NO: 106121 - RNA, 1701 nt, Artificial Sequence
  derived and/or modified CDS sequence (opt2) from hemagglutinin__InfluenzaA__AGL09881
augaagaccaucaucgcccucuccuacauccucugccucgucuucgcccagaagcuccccggcaacgacaacuccaccgccacccucugccucggccaccacgccguccccaacggcaccaucgucaagaccaucaccaacgaccgcaucgaggucaccaacgccaccgagcucguccagaacuccuccaucggcgagaucugcgacuccccccaccagauccucgacggcgagaacugcacccucaucgacgcccuccucggcgacccccagugcgacggcuuccagaacaagaagugggaccucuucgucgagcgcuccaaggccuacuccaacugcuaccccuacgacguccccgacuacgccucccuccgcucccucgucgccuccuccggcacccucgaguucaacaacgaguccuucaacugggccggcgucacccagaacggcgccuccuccgccugcauccgcggcuccaacuccuccuucuucucccgccucaacuggcucacccaccucaacuucaaguaccccgcccucaacgucaccaugcccaacaacgagcaguucgacaagcucuacaucuggggcguccaccaccccggcaccgacaaggaccagaucuuccucuacgcccaguccuccggccgcaucaccgucuccaccaagcgcucccagcaggccgucauccccaacaucggcucccgcccccgcauccgcaacauccccucccgcaucuccaucuacuggaccaucgucaagcccggcgacauccuccucaucaacuccaccggcaaccucaucgccccccgcggcuacuucaagauccgcuccggcaaguccuccaucaugcgcuccgacgcccccaucggcaagugcaaguccgagugcaucacccccaacggcuccauccccaacgacaagcccuuccagaacgucaaccgcaucaccuacggcgccugcccccgcuacgucaagcaguccacccucaagcucgccaccggcaugcgcaacguccccgagaagcagacccgcggcaucuucggcgccaucgccggcuucaucgagaacggcugggagggcauggucgacggcugguacggcuuccgccaccagaacuccgagggccgcggccaggccgccgaccucaaguccacccaggccgccaucgaccagaucaacggcaagcucaaccgccucaucggcaagaccaacgagaaguuccaccagaucgagaaggaguucuccgaggucgagggccgcauccaggaccucgagaaguacgucgaggacaccaagaucgaccucugguccuacaacgccgagcuccucgucgcccucgagaaccagcacaccaucgaccucaccgacuccgagaugaacaagcucuucgagaagaccaagaagcagcuccgcgagaacgccgaggacaugggcaacggcugcuucaagaucuaccacaagugcgacaacgccugcaucggcuccauccgcaacggcaccuacgaccacgacgucuaccgcgacgaggcccucaacaaccgcuuccagaucaagggcgucgagcucaaguccggcuacaaggacuggauccucuggaucuccuucgccaucuccugcuuccuccucugcgucgcccuccucggcuucaucaugugggccugccagaagggcaacauccgcugcaacaucugcaucuga

SEQ ID NO: 106122 - RNA, 1701 nt, Artificial Sequence; identical to SEQ ID NO: 105894
  derived and/or modified CDS sequence (opt2) from hemagglutinin__InfluenzaA__AGL09882

SEQ ID NO: 106123 - RNA, 1701 nt, Artificial Sequence; identical to SEQ ID NO: 105871
  derived and/or modified CDS sequence (opt2) from hemagglutinin__InfluenzaA__AGL09883

SEQ ID NO: 106124 - RNA, 1701 nt, Artificial Sequence; identical to SEQ ID NO: 105871
  derived and/or modified CDS sequence (opt2) from hemagglutinin__InfluenzaA__AGL09884

SEQ ID NO: 106125 - RNA, 1683 nt, Artificial Sequence; identical to SEQ ID NO: 106024
  derived and/or modified CDS sequence (opt2) from hemagglutinin__InfluenzaA__AGL44438

SEQ ID NO: 106126 - RNA, 1701 nt, Artificial Sequence
  derived and/or modified CDS sequence (opt2) from hemagglutinin__InfluenzaA__AGN69267
augaaggccauccucgucguccuccucuacaccuucaccaccggcaacgccgacacccucugcaucggcuaccacgccaacaacuccaccgacaccgucgacaccguccucgagaagaacgucaccgucacccacuccgucaaccuccucgaggaccgccacaacggcaagcucugcaagcuccgcggcgucgccccccuccaccucggcaagugcaacaucgccggcuggcuccucggcaaccccgagugcgagcuccucuucaccgccuccuccugguccuacaucgucgagaccuccaacuccgacaacggcaccugcuaccccggcgacuucaucaacuacgaggagcuccgcgagcagcucuccuccgucuccuccuucgagcgcuucgagaucuuccccaaggccuccuccuggcccaaccacgagaccaaccgcggcgucaccgccgccugccccuacgccggcgccaacuccuucuaccgcaaccucaucuggcucgucaagaagggcaacuccuaccccaagcucuccaaguccuacaucaacaacaaggagaaggagguccucguccucuggggcauccaccacccccccaccuccaccgaccagcagucccucuaccagaacgccgacgccuacgucuucgucggcuccuccaaguacuccaagaaguucaagcccgagaucgccacccgccccaagguccgcggccaggccggccgcaugaacuacuacuggacccucgucgagcccggcgacaccaucaccuucgaggccaccggcaaccucgucgucccccgcuacgccuucgccaugaagcgcggcuccggcuccggcaucaucaucuccgacacccccguccacgacugcaacaccaccugccagacccccaagggcgccaucaacaccucccuccccuuccagaacauccaccccgucaccaucggcgagugccccaaguacgucaaguccaccaagcuccgcauggccaccggccuccgcaacauccccuccauccagucccgcggccucuucggcgccaucgccggcuucaucgagggcggcuggaccggcaugaucgacggcugguacggcuaccaccaccagaacgagcagggcuccggcuacgccgccgaccgcaaguccacccagaacgccaucgacggcaucaccaacaaggucaacuccgucaucgagaagaugaacacccaguucaccgccgucggcaaggaguucaaccaccucgagaagcgcaucgagaaccucaacaagaaggucgacgacggccuccucgacgucuggaccuacaacgccgagcuccucguccuccucgagaacgagcgcacccucgacuaccacgacuccaacgucaagaaccucuacgagaagguccgcucccagcucaagaacaacgccaaggagaucggcaacggcugcuucgaguucuaccacaagugcgacgacaccugcauggaguccgucaagaacggcaccuacgacuaccccaaguacuccgaggaggccaagcucaaccgcgaggagaucgacggcgucaagcucgaguccacccgcaucuaccagauccucgccaucuacuccaccgucgccuccucccucguccuccucgucucccucggcgccaucuccuucuggaugugcuccaacggcucccuccagugccgcaucugcaucuga

SEQ ID NO: 106127 - RNA, 1701 nt, Artificial Sequence
  derived and/or modified CDS sequence (opt2) from hemagglutinin__InfluenzaA__AGN69278
augaaggccauccucgucguccuccucuacaccuucaccaccgccaacgccgacacccucugcaucggcuaccacgccaacaacuccaccgacaccgucgacaccguccucgagaagaacgucaccgucacccacuccgucaaccuccucgaggaccgccacaacggcaagcucugcaagcuccgcggcgucgccccccuccaccucggcaagugcaacaucgccggcuggcuccucggcaaccccgagugcgagcuccucuucaccgccuccuccugguccuacaucgucgagaccuccaacuccgacaacggcaccugcuaccccggcgacuucaucaacuacgaggagcuccgcgagcagcucuccuccgucuccuccuucgagcgcuucgagaucuuccccaaggccuccuccuggcccaaccacgagcccaaccgcggcgucaccgccgccugccccuacgccggcgccaacuccuucuaccgcaaccucaucuggcucgucaagaagggcaacuccuaccccaagcucuccaaguccuacaucaacaacaaggagaaggagguccucguccucuggggcauccaccacccccccaccuccaccgaccagcagucccucuaccagaacgccgacgccuacgucuucgucggcuccuccaaguacaacaagaaguucaagcccgagaucgccacccgccccaagguccgcggccaggccggccgcaugaacuacuacuggacccucgucgagcccggcgacaccaucaccuucgaggccaccggcaaccucgucgucccccgcuacgccuucgccaugaagcgcggcuccggcuccggcaucaucaucuccgacacccccguccacgacugcaacaccaccugccagacccccaagggcgccaucaacaccucccuccccuuccagaacauccaccccgucaccaucggcgagugccccaaguacgucaaguccaccaagcuccgcauggccaccggccuccgcaacauccccuccauccagucccgcggccucuucggcgccaucgccggcuucaucgagggcggcuggaccggcaugaucgacggcugguacggcuaccaccaccagaacgagcagggcuccggcuacgccgccgaccgcaaguccacccagaacgccaucgacggcaucaccaacaaggucaacuccgucaucgagaagaugaacacccaguucaccgccgucggcaaggaguucaaccaccucgagaagcgcaucgagaaccucaacaagaaggucgacgacggccuccucgacgucuggaccuacaacgccgagcuccucguccuccucgagaacgagcgcacccucgacuaccacgacuccaacgucaagaaccucuacgagaagguccgcucccagcucaagaacaacgccaaggagaucggcaacggcugcuucgaguucuaccacaagugcgacgacaccugcauggaguccgucaagaacggcaccuacgacuaccccaaguacuccgaggaggccaagcucaaccgcgaggagaucgacggcgucaagcucgaguccacccgcaucuaccagauccucgccaucuacuccaccgucgccuccucccucguccuccucgucucccucggcgccaucuccuucuggaugugcuccaacggcucccuccagugccgcaucugcaucuga

SEQ ID NO: 106128 - RNA, 1701 nt, Artificial Sequence
  derived and/or modified CDS sequence (opt2) from hemagglutinin__InfluenzaA__AGN69302
auggaggccaagcucuucguccucuucugcgccuucaccgcccucaaggccgacaccaucugcgucggcuaccacgccaacaacuccaccgacaccgucgacaccauccucgagaagaacgucaccgucacccacuccgucaaccuccucgagaacucccacaacggcaagcucugcucccucaacggcaagaucccccuccagcucggcaacugcaacgucgccggcuggauccucggcaaccccaagugcgaccuccuccucaccgccaacuccugguccuacaucaucgagaccuccaacuccaaggacggcgccugcuaccccggcgaguucgccgacuacgaggagcucaaggagcagcucuccaccgucuccuccuucgagcgcuucgagaucuuccccaaggccaccuccuggcccaaccacgacaccacccgcggcaccaccgucgccugcucccacuccggcgccaacuccuucuaccgcaaccuccucuggaucgucaagaagggcaacuccuaccccaagcucuccaaguccuacaccaacaacaagggcaaggagguccucgucaucuggggcguccaccacccccccaccgacuccgaccagcagacccucuaccagaacaaccacaccuacgucuccgucggcuccuccaaguacuacaagcgcuucacccccgagaucgucgcccgccccaagguccgcgagcaggccggccgcaugaacuacuacuggacccuccucgaccagggcgacaccaucaccuucgaggccaccggcaaccucaucgcccccuggcacgccuucgcccucaagaagggcuccuccuccggcaucaugauguccgacgcccagguccacaacugcaccaccaagugccagaccccccacggcgcccucaagggcaaccuccccuuccagaacguccaccccgucaccaucggcgagugccccaaguacgucaaguccacccagcuccgcauggccaccggccuccgcaacauccccuccauccagucccgcggccucuucggcgccaucgccggcuucaucgagggcggcuggaccggcauggucgacggcugguacggcuaccaccaccagaacgagcagggcuccggcuacgccgccgaccagaaguccacccagaucgccaucgacggcaucuccaacaaggucaacuccgucaucgagaagaugaacauccaguucaccuccgucggcaaggaguucaacucccucgagaagcgcauggagaaccucaacaagaaggucgacgacggcuuccucgacgucuggaccuacaacgccgagcuccucauccuccucgagaacgagcgcacccucgacuuccacgaccucaacgucaagaaccucuacgagaaggucaagucccagcuccgcaacaacgccaaggagaucggcaacggcugcuucgaguucuaccacaagugcgacaacgagugcauggaguccgucaagaacggcaccuacaacuaccccaaguacuccgaggaguccaagcucaaccgcgaggagaucgacggcgucaagcucgaguccaugggcauccaccagauccucgccaucuacuccaccgucgccuccucccucguccuccucgucucccucggcgccaucuccuucuggaugugcuccaacggcucccuccagugccgcgucugcaucuga

SEQ ID NO: 106129 - RNA, 1701 nt, Artificial Sequence; identical to SEQ ID NO: 106128
  derived and/or modified CDS sequence (opt2) from hemagglutinin__InfluenzaA__AGN69314

SEQ ID NO: 106130 - RNA, 1701 nt, Artificial Sequence; identical to SEQ ID NO: 106128
  derived and/or modified CDS sequence (opt2) from hemagglutinin__InfluenzaA__AGN69326

SEQ ID NO: 106131 - RNA, 1701 nt, Artificial Sequence
  derived and/or modified CDS sequence (opt2) from hemagglutinin__InfluenzaA__AGN69338
auggaggccaagcucuucguccucuucugcgccuucaccgcccucaaggccgacaccaucugcgucggcuaccacgccaacaacuccaccgacaccgucgacaccauccucgagaagaacgucaccgucacccacuccgucaaccuccucgagaacucccacaacggcaagcucugcucccucaacggcaagaucccccuccagcucggcaacugcaacgucgccggcuggauccucggcaaccccaagugcgaccuccuccucaccgccaacuccugguccuacaucaucgagaccuccaacuccaagaacggcgccugcuaccccggcgaguucgccgacuacgaggagcucaaggagcagcucuccaccgucuccuccuucgagcgcuucgagaucuuccccaaggccaccuccuggcccaaccacgacaccacccgcggcaccaccgucgccugcucccacuccggcgccaacuccuucuaccgcaaccuccucuggaucgucaagaagggcaacuccuaccccaagcucuccaaguccuacaccaacaacaagggcaaggagguccucgucaucuggggcguccaccacccccccaccgacuccgaccagcagacccucuaccagaacaaccacaccuacgucuccgucggcuccuccaaguacuacaagcgcuucacccccgagaucgucgcccgccccaagguccgcgagcaggccggccgcaugaacuacuacuggacccuccuccaccagggcgacaccaucaccuucgaggccaccggcaaccucaucgcccccuggcacgccuucgcccucaacgagggcuccuccuccggcaucaugcgcuccgacgcccagguccacaacugcaccaccaagugccagaccccccacggcgcccucaagggcaaccuccccuuccagaacguccaccccgucaccaucggcgagugccccaaguacgucaaguccacccagcuccgcauggccaccggccuccgcaacauccccuccauccagucccgcggccucuucggcgccaucgccggcuucaucgagggcggcuggaccggcauggucgacggcugguacggcuaccaccaccgcaacgagcagggcuccggcuacgccgccgaccagaaguccacccagaucgccaucgacggcaucuccaacaaggucaacuccgucaucgagaagaugaacauccaguucaccuccgucggcaaggagugcaacucccucgagaagcgcauggagaaccucaacaagaaggucgacgacggcuuccucgacgucuggaccuacaacgccgagcuccucauccuccucgagaacgagcgcacccucgacuuccacgaccucaacgucaagaaccucuacgagaaggucaagucccagcuccgcaacaacgccaaggagaucggcaacggcugcuucgaguucuaccacaagugcgacaacgagugcauggaguccgucaagaacggcaccuacaacuaccccaaguacuccgaggaguccaagcucaaccgcgaggagaucgacggcgucaagcucgaguccaugggcauccaccagauccucgccaucuacuccaccgucgccuccucccucguccuccucgucucccucggcgccaucuccuucuggaugugcuccaacggcucccuccagugccgcgucugcaucuga

SEQ ID NO: 106132 - RNA, 1701 nt, Artificial Sequence
  derived and/or modified CDS sequence (opt2) from hemagglutinin__InfluenzaA__AGO00265
augaaggcccgccuccucguccuccucugcgccaucgccgccaccgacgccgacaccaucugcaucggcuaccacgccaacaacuccaccgacaccgucgacaccauccucgagaagaacgucaccgucacccacuccgucaaccuccucgaggacucccacaacggcaagcucugccgccucaagggcaucgccccccuccagcucggcaagugcaacaucgccggcuggauccucggcaaccccgagugcgagucccuccucuccgagcgcuccugguccuacaucgucgagacccccaacuccgagaacggcaccugcuaccccggcgacuucaucgacuacgaggagcuccgcgagcagcucuccuccgucaccuccuucgagcgcuucgagaucuuccccaaggagaccuccuggcccaagcacaacaccaccaagggcgucaccgccgccugcucccacgccggcaagugcuccuucuaccgcaaccuccucuggcucaccgagaaggacggcuccuaccccaaccucaacaacuccuacgucaacaagaagggcaaggagguccucguccucuggggcguccaccaccccuccaacaucaaggaccagcagacccucuaccagaaggagaacgccuacgucuccgucgucuccuccaacuacaaccgccgcuucacccccgagaucgccgagcgccccaagguccgcggccaggccggccgcaugaacuacuacuggacccuccucgagcccggcgacaccaucaucuucgaggccaacggcaaccucaucgcccccugguacgccuucgcccucucccgcggcuucggcuccggcaucaucaccuccaacgccuccaugcacgagugcaacaccaagugccagaccccccagggcgccaucaacuccucccuccccuuccagaacauccaccccgucaccaucggcgagugccccaaguacguccgcuccaccaagcuccgcauggucaccggccuccgcaacauccccuccauccagucccgcggccucuucggcgccaucgccggcuucaucgagggcggcuggaccggcaugaucgacggcugguacggcuaccaccaccagaacgagcagggcuccggcuacgccgccgaccagaaguccacccagaacgccaucaacggcaucaccaacaaggucaacuccgucaucgagaagaugaacacccaguucaccgccgucggcaaggaguucaacaaccucgagaagcgcauggagaaccucaacaagaaggucgacgacggcuuccucgacaucuggaccuacaacgccgagcuccucguccuccucgagaacgagcgcacccucgacuuccacgacuccaacgucaagaaccucuacgagaaggucaagucccagcuccgcaacaacgccaaggagaucggcaacggcugcuucgaguucuaccacaagugcaacaacgagugcauggaguccgucaagaacggcaccuacgacuaccccaaguacuccgaggaguccaagcucaaccgcgagaagaucgacggcgucaagcucgaguccaugggcgucuaccagauccucgccaucuacuccaccgucgccuccucccucguccuccucgucucccucggcgccaucuccuucuggaugugcuccaacggcucccuccagugccgcaucugcaucuga

SEQ ID NO: 106133 - RNA, 1701 nt, Artificial Sequence
  derived and/or modified CDS sequence (opt2) from hemagglutinin__InfluenzaA__AGO00277
augaaggccaagcuccucauccuccucugcgcccucuccgccaccgacgccgacaccaucugcaucggcuaccacgccaacaacuccaccgacaccgucgacaccguccucgagaagaacgucaccgucacccacuccgucaaccuccucgaggacucccacaacggcaagcucugccgccucaagggcaucgccccccuccagcucggcaagugcaacaucgccggcuggauccucggcaaccccgagugcgagucccuccucuccaagcgcuccugguccuacaucgccgagacccccaacuccgagaacggcaccugcuaccccggcgacuucgccgacuacgaggagcuccgcgagcagcucuccuccgucuccuccuucgagcgcuucgagaucuuccccaaggagcgcuccuggcccaaccacaacaucaacaucggcgucaccgccgccugcucccacgccggcaaguccuccuucuacaagaaccuccucuggcucaccgagaaggacggcuccuaccccaaccucaacaaguccuacgucaacaagaaggagaaggagguccucguccucuggggcguccaccaccccuccaacaucgagaaccagaagacccucuaccgcaaggagaacgccuacgucuccgucgucuccuccaacuacaaccgccgcuucacccccgagaucgccgagcgccccaagguccgcggccaggccggccgcaugaacuacuacuggacccuccucgagcccggcgacaccaucaucuucgaggccaacggcaaccucaucgcccccugguacgccuucgcccucucccgcggccucggcuccggcaucaucaccuccaacgccuccauggacgagugcgacaccaagugccagaccccccagggcgccaucaacuccucccuccccuuccagaacauccaccccuucaccaucggcgagugccccaaguacguccgcuccaccaagcuccgcauggucaccggccuccgcaacauccccuccauccagucccgcggccucuucggcgccaucgccggcuucaucgagggcggcugggccggcaugaucgacggcugguacggcuaccaccaccagaacgagcagggcuccggcuacgccgccgaccagaaguccacccagaacgccaucaacggcaucaccaacaaggucaacuccgucaucgagaagaugaacacccaguucaccgccgucggcaaggaguucaacaagcucgagaagcgcauggagaaccucaacaagaaggucgacgacggcuuccucgacaucuggaccuacaacgccgagcuccucguccuccucgagaacgagcgcacccucgacuuccacgacuccaacgucaagaaccucuacgagaaggucaagaaccagcuccgcaacaacgccaaggagaucggcaacggcugcuucgaguucuaccacaagugcaacaacgagugcauggaguccgucaagaacggcaccuacgacuaccccaaguacuccgaggaguccaagcucaaccgcgagaagaucgacggcgucaagcucgaguccaugggcgucuaccagauccucgccaucuacuccaccgucgccuccucccucguccuccucgucucccucggcgccaucuccuucuggaugugcuccaacggcucccuccagugccgcaucugcaucuga

SEQ ID NO: 106134 - RNA, 1701 nt, Artificial Sequence; identical to SEQ ID NO: 97670
  derived and/or modified CDS sequence (opt2) from hemagglutinin__InfluenzaA__AGO00289

SEQ ID NO: 106135 - RNA, 1698 nt, Artificial Sequence
  derived and/or modified CDS sequence (opt2) from hemagglutinin__InfluenzaA__AGO00301
augaaggccaagcuccucauccuccucugcgcccucuccgccaccgacgccgacaccaucugcaucggcuaccacgccaacaacuccaccgacaccgucgacaccguccucgagaagaacgucaccgucacccacuccgucaaccuccucgaggacucccacaacggcaagcucugccgccucaagggcaaggccccccuccagcucggcaacugcaacaucgccggcuggguccucggcaaccccgagugcgagucccuccucuccaaccgcuccugguccuacaucgccgagacccccaacuccgagaacggcaccugcuaccccggcgacuucgccgacuacgaggagcuccgcgagcagcucuccuccgucuccuccuucgagcgcuucgagaucuuccccaaggagcgcuccuggcccaaccacaccacccgcggcgucaccgccgccugcccccacgcccgcaaguccuccuucuacaagaaccucgucuggcucaccgaggccaacggcuccuaccccaaccucucccgcuccuacgucaacaaccaggagaaggagguccucguccucuggggcguccaccaccccuccaacaucgaggagcagcgcgcccucuaccgcaaggacaacgccuacgucuccgucgucuccuccaacuacaaccgccgcuucacccccgagaucgccaagcgccccaagguccgcgaccaguccggccgcaugaacuacuacuggacccuccucgagcccggcgacaccaucaucuucgaggccaccggcaaccucaucgcccccugguacgccuucgcccucucccgcggccccggcuccggcaucaucaccuccaacgccccccucgacgagugcgacaccaagugccagaccccccagggcgccaucaacuccucccuccccuuccagaacauccaccccgucaccaucggcgagugccccaaguacguccgcuccaccaagcuccgcauggucaccggccuccgcaacauccccuccguccagucccgcggccucuucggcgccaucgccggcuucaucgagggcggcuggaccggcaugauggacggcugguacggcuaccaccaccagaacgagcagggcuccggcuacgccgccgaccagaaguccacccagaacgccaucaacggcaucaccaacaaggucaacuccgucaucgagaagaugaacacccaguucaccgccgucggcaaggaguucaacaagcucgagaagcgcauggagaaccucaacaagaaggucgacgacggcuucauggacaucuggaccuacaacgccgagcuccucguccuccucgagaacgagcgcacccucgacuuccacgacuccaacgucaagaaccucuacgagaaggucaagaaccagcuccgcaacaacgccaaggagcucggcaacggcugcuucgaguucuaccacaagugcgacaacgagugcauggaguccgucaagaacggcaccuacgacuaccccaaguacuccgaggaguccaagcucaaccgcgagaagaucgacggcgucaagcucgaguccaugggcgucuaccgcauccucgccaucuacuccaccgucgccuccucccucguccuccucgucucccucggcgccaucuccuucuggaugugcuccaacggcucccuccagugccgcaucugcaucuga

SEQ ID NO: 106136 - RNA, 1701 nt, Artificial Sequence
  derived and/or modified CDS sequence (opt2) from hemagglutinin__InfluenzaA__AGO00313
augaagaccaucaucgcccucuccuacaucuucugccagguccucgcccagaaccuccccggcaacgacaacuccaccgccacccucugccucggccaccacgccguccccaacggcacccucgucaagaccaucaccaacgaccagaucgaggucaccaacgccaccgagcucguccaguccuccuccaccggccgcaucugcgacuccccccaccgcauccucgacggcaagaacugcacccucaucgacgcccuccucggcgacccccacugcgacggcuuccagaacgagaagugggaccucuucgucgagcgcuccaaggccuucuccaacugcuaccccuacgacguccccgacuacgccucccuccgcucccucgucgccuccuccggcacccucgaguucaucaacgagggcuucaacuggaccggcgucacccagaacggcggcuccuacgccugcaagcgcggccccgacaacuccuucuucucccgccucaacuggcucuacaaguccgaguccaccuaccccguccucaacgucaccaugcccaacaacgacaacuucgacaagcucuacaucuggggcguccaccaccccuccaccgacaaggagcagaccaaccucuacguccaggccuccggccgcgucaccgucuccaccaagcgcucccagcagaccaucauccccaacgucggcucccgccccuggguccgcggccucuccuccggcaucuccaucuacuggaccaucgucaagcccggcgacauccuccucaucaacuccaacggcaaccucaucgccccccgcggcuacuucaagauccgcaccggcaaguccuccaucaugcgcuccgacgcccccaucggcaccugcuccuccgagugcaucacccccaacggcuccauccccaacgacaagcccuuccagaacgucaacaagaucaccuacggcgccugccccaaguacgucaagcagaacacccucaagcucgccaccggcaugcgcaacguccccgagaagcagacccgcggcaucuucggcgccaucgccggcuucaucgagaacggcugggagggcaugaucgacggcugguacggcuuccgccaccagaacuccgagggcaccggccaggccgccgaccucaaguccacccaggccgccaucgaccagaucaacggcaagcucaaccgcgucaucgagaagaccaacgagaaguuccaccagaucgagaaggaguucuccgaggucgagggccgcauccaggaccucgagaaguacgucgaggacaccaagaucgaccucugguccuacaacgccgagcuccucgucgcccucgagaaccagcacaccaucgaccucaccgacuccgagaugaacaagcucuucgagaagacccgccgccagcuccgcgagaacgccgaggacaugggcaacggcugcuucaagaucuaccacaagugcgacaacgccugcaucggcuccauccgcaacggcaccuacgaccacgacgucuaccgcgacgaggcccucaacaaccgcuuccagaucaagggcgucgagcucaaguccggcuacaaggacuggauccucuggaucuccuucgccaucuccugcuuccuccucugcgucguccuccucggcuucaucaugugggccugccagaagggcaacauccgcugcaacaucugcaucuga

SEQ ID NO: 106137 - RNA, 1704 nt, Artificial Sequence; identical to SEQ ID NO: 105133
  derived and/or modified CDS sequence (opt2) from hemagglutinin__InfluenzaA__AGO00325

SEQ ID NO: 106138 - RNA, 1698 nt, Artificial Sequence
  derived and/or modified CDS sequence (opt2) from hemagglutinin__InfluenzaA__AGO00337
augaaggccaaccuccucguccuccucuccgcccucgccgccgccgacgccgacaccaucugcaucggcuaccacgccaacaacuccaccgacaccgucgacaccguccucgagaagaacgucaccgucacccacuccgucaaccuccucgaggacucccacaacggcaagcucugccgccucaagggcaucgccccccuccagcucggcaagugcaacaucgccggcuggcuccucggcaaccccgagugcgacccccuccuccccguccgcuccugguccuacaucgucgagacccccaacuccgagaacggcaucugcuaccccggcgacuucaucgacuacgaggagcuccgcgagcagcucuccuccgucuccuccuucgagcgcuucgagaucuuccccaaggaguccuccuggcccaaccacaacaccaacggcgucaccgccgccugcucccacgagggcaaguccuccuucuaccgcaaccuccucuggcucaccgagaaggagggcuccuaccccaagcucaagaacuccuacgucaacaagaagggcaaggagguccucguccucuggggcauccaccacccccccaacuccaaggagcagcagaaccucuaccagaacgagaacgccuacgucuccgucgucaccuccaacuacaaccgccgcuucacccccgagaucgccgagcgccccaagguccgcgaccaggccggccgcaugaacuacuacuggacccuccucaagcccggcgacaccaucaucuucgaggccaacggcaaccucaucgcccccauguacgccuucgcccucucccgcggcuucggcuccggcaucaucaccuccaacgccuccaugcacgagugcaacaccaagugccagaccccccucggcgccaucaacuccucccuccccuaccagaacguccaccccgucaccaucggcgagugccccaaguacguccgcuccgccaagcuccgcauggucaccggccuccgcaacacccccuccauccagucccgcggccucuucggcgccaucgccggcuucaucgagggcggcuggaccggcaugaucgacggcugguacggcuaccaccaccagaacgagcagggcuccggcuacgccgccgaccagaaguccacccagaacgccaucaacggcaucaccaacaaggucaacaccgucaucgagaagaugaacauccaguucaccgccgucggcaaggaguucaacaagcucgagaagcgcauggagaaccucaacaagaaggucgacgacggcuuccucgacaucuggaccuacaacgccgagcuccucguccuccucgagaacgagcgcacccucgacuuccacgacuccaacgucaagaaccucuacgagaaggucaagucccagcucaagaacaacgccaaggagaucggcaacggcugcuucgaguucuaccacaagugcgacaacgagugcauggaguccguccgcaacggcaccuacgacuaccccaaguacuccgaggaguccaagcucaaccgcgagaaggucgacggcgucaagcucgaguccaugggcaucuaccagauccucgccaucuacuccaccgucgccuccucccucguccuccucgucucccucggcgccaucuccuucuggaugugcuccaacggcucccuccagugccgcaucugcaucuga

SEQ ID NO: 106139 - RNA, 1698 nt, Artificial Sequence; identical to SEQ ID NO: 99314
  derived and/or modified CDS sequence (opt2) from hemagglutinin__InfluenzaA__AGO00349

SEQ ID NO: 106140 - RNA, 1698 nt, Artificial Sequence
  derived and/or modified CDS sequence (opt2) from hemagglutinin__InfluenzaA__AGO00373
augaaggccaaccuccucguccuccucugcgcccucgccgccgccgacgccgacaccaucugcaucggcuaccacgccaacaacuccaccgacaccgucgacaccguccucgagaagaacgucaccgucacccacuccgucaaccuccucgaggacucccacaacggcaagcucugccgccucaagggcaucgccccccuccagcucggcaagugcaacaucgccggcuggcuccucggcaaccccgagugcgacccccuccuccccguccgcuccugguccuacaucgucgagacccccaacuccgagaacggcaucugcuaccccggcgacuucaucgacuacgaggagcuccgcgagcagcucuccuccgucuccuccuucgagcgcuucgagaucuuccccaaggaguccuccuggcccgaccacaacaccaacggcgucaccgccgccugcucccacgagggcaaguccuccuucuaccgcaaccuccucuggcucaccgagaaggaguccuccuaccccaagcucaagaacuccuacgucaacaagaagggcaaggagguccucguccucuggggcauccaccacccccccaacuccaaggagcagcagaaccucuaccagaacgagaacgccuacgucuccgucgucaccuccaacuacaaccgccgcuucacccccgagaucgccgagcgccccaagguccgcgaccaggccggccgcaugaacuacuacuggacccuccucaagcccggcgacaccaucaucuucgaggccaacggcaaccucaucgcccccauguacgccuucgcccucucccgcggcuucggcuccggcaucaucaccuccaacgccuccaugcacgagugcaacaccaagugccagaccccccucggcgccaucaacuccucccuccccuaccagaacauccaccccgucaccaucggcgagugccccaaguacguccgcuccgccaagcuccgcauggucaccggccuccgcaacauccccuccauccagucccgcggccucuucggcgccaucgccggcuucaucgagggcggcuggaccggcaugaucgacggcugguacggcuaccaccaccagaacgagcagggcuccggcuacgccgccgaccagaaguccacccagaacgccaucaacggcaucaccaacaaggucaacaccgucaucgagaagaugaacauccaguucaccgccgucggcaaggaguucaacaagcucgagaagcgcauggagaaccucaacaagaaggucgacgacggcuuccucgacaucuggaccuacaacgccgagcuccucguccuccucgagaacgagcgcacccucgacuuccacgacuccaacaugaagaaccucuacgagaaggucaagucccagcucaagaacaacgccaaggagaucggcaacggcugcuucgaguucuaccacaagugcgacaacgagugcauggaguccguccgcaacggcaccuacgacuaccccaaguacuccgaggaguccaagcucaaccgcgagaaggucgacggcgucaagcucgaguccaugggcaucuaccagauccucgccaucuacuccaccgucgccuccucccucguccuccucgucucccucggcgccaucuccuucuggaugugcuccaacggcucccuccagugccgcaucugcaucuga

SEQ ID NO: 106141 - RNA, 1698 nt, Artificial Sequence
  derived and/or modified CDS sequence (opt2) from hemagglutinin__InfluenzaA__AGO00385
augaaggccaaccuccucguccuccucugcgcccucgccgccgccgacgccgacaccaucugcaucggcuaccacgccaacaacuccaccgacaccgucgacaccguccucgagaagaacgucaccgucacccacuccgucaaccuccucgaggacucccacaacggcaagcucugccgccucaagggcaucgccccccuccagcucggcaagugcaacaucgccggcuggcuccucggcaaccccgagugcgacccccuccuccccgucggcuccugguccuacaucgucgagacccccaacuccgagaacggcaucugcuaccccggcgacuucaucgacuacgaggagcuccgcgagcagcucuccuccgucuccuccuucgagcgcuucgagaucuuccccaaggaguccuccuggcccgaccacaacaccaacggcgucaccgccgccugcucccacgagggcaaguccuccuucuaccgcaaccuccucuggcucaccgagaaggaguccuccuaccccaagcucaagaacuccuacgucaacaagaagggcaaggagguccucguccucuggggcauccaccacccccccaacuccaaggagcagcagaaccucuaccagaacgagaacgccuacgucuccgucgucaccuccaacuacaaccgccgcuucacccccgagaucgccgagcgccccaagguccgcgaccaggccggccgcaugaacuacuacuggacccuccucaagcccggcgacaccaucaucuucgaggccaacggcaaccucaucgcccccauguacgccuucgcccucucccgcggcuucggcuccggcaucaucaccuccaacgccuccaugcacgagugcaacaccaagugccagaccccccucggcgccaucaacuccucccuccccuaccagaacauccaccccgucaccaucggcgagugccccaaguacguccgcuccgccaagcuccgcauggucaccggccuccgcaacauccccuccauccagucccgcggccucuucggcgccaucgccggcuucaucgagggcggcuggaccggcaugaucgacggcugguacggcuaccaccaccagaacgagcagggcuccggcuacgccgccgaccagaaguccacccagaacgccaucaacggcaucaccaacaaggucaacaccgucaucgagaagaugaacauccaguucaccgccgucggcaaggaguucaacaagcucgagaagcgcauggagaaccucaacaagaaggucgacgacggcuuccucgacaucuggaccuacaacgccgagcuccucguccuccucgagaacgagcgcacccucgacuuccacgacuccaacgucaagaaccucuacgagaaggucaagucccagcucaagaacaacgccaaggagaucggcaacggcugcuucgaguucuaccacaagugcgacaacgagugcauggaguccguccgcaacggcaccuacgacuaccccaaguacuccgaggaguccaagcucaaccgcgagaaggucgacggcgucaagcucgaguccaugggcaucuaccagauccucgccaucuacuccaccgucgccuccucccucguccuccucgucucccucggcgccaucuccuucuggaugugcuccaacggcucccuccagugccgcaucugcaucuga

SEQ ID NO: 106142 - RNA, 1698 nt, Artificial Sequence
  derived and/or modified CDS sequence (opt2) from hemagglutinin__InfluenzaA__AGO00397
augaaggccaaccuccucguccuccucugcgcccucgccgccgccgacgccgacaccaucugcaucggcuaccacgccaacaacuccaccgacaccgucgacaccguccucgagaagaacgucaccgucacccacuccgucaaccuccucgaggacucccacaacggcaagcucugccgccucaagggcaucgccccccuccagcucggcaagugcaacaucgccggcuggcuccucggcaaccccgagugcgacccccuccuccccgucggcuccugguccuacaucgucgagacccccaacuccgagaacggcaucugcuaccccggcgacuucaucgacuacgaggagcuccgcgagcagcucuccuccgucuccuccuucgagcgcuucgagaucuuccccaaggaguccuccuggcccgaccacaacaccaacggcgucaccgccgccugcucccacgagggcaaguccuccuucuaccgcaaccuccucuggcucaccgagaaggaguccuccuaccccaagcucaagaacuccuacgucaacaagaagggcaaggagguccucguccucuggggcauccaccacccccccaacuccaaggagcagcagaaccucuaccagaacgagaacgccuacgucuccgucgucaccuccaacuacaaccgccgcuucacccccgagaucgccgagcgccccaaggucaaggaccaggccggccgcaugaacuacuacuggacccuccucaagcccggcgacaccaucaucuucgaggccaacggcaaccucaucgcccccauguacgccuucgcccucucccgcggcuucggcuccggcaucaucaccuccaacgccuccaugcacgagugcaacaccaagugccagaccccccucggcgccaucaacuccucccuccccuaccagaacauccaccccgucaccaucggcgagugccccaaguacguccgcuccgccaagcuccgcauggucaccggccuccgcaacauccccuccauccagucccgcggccucuucggcgccaucgccggcuucaucgagggcggcuggaccggcaugaucgacggcugguacggcuaccaccaccagaacgagcagggcuccggcuacgccgccgaccagaaguccacccagaacgccaucaacggcaucaccaacaaggucaacaccgucaucgagaagaugaacauccaguucaccgccgucggcaaggaguucaacaagcucgagaagcgcauggagaaccucaacaagaaggucgacgacggcuuccucgacaucuggaccuacaacgccgagcuccucguccuccucgagaacgagcgcacccucgacuuccacgacuccaacgucaagaaccucuacgagaaggucaagucccagcucaagaacaacgccaaggagaucggcaacggcugcuucgaguucuaccacaagugcgacaacgagugcauggaguccguccgcaacggcaccuacgacuaccccaaguacuccgaggaguccaagcucaaccgcgagaaggucgacggcgucaagcucgaguccaugggcaucuaccagauccucgccaucuacuccaccgucgccuccucccucguccuccucgucucccucggcgccaucuccuucuggaugugcuccaacggcucccuccagugccgcaucugcaucuga

SEQ ID NO: 106143 - RNA, 1698 nt, Artificial Sequence
  derived and/or modified CDS sequence (opt2) from hemagglutinin__InfluenzaA__AGO00409
augaaggccaaccuccucguccuccucugcgcccucgccgccgccgacgccgacaccaucugcaucggcuaccacgccaacaacuccaccgacaccgucgacaccguccucgagaagaacgucaccgucacccacuccgucaaccuccucgaggacucccacaacggcaagcucugccgccucaagggcaucgccccccuccagcucggcaagugcaacaucgccggcuggcuccucggcaaccccgagugcgacccccuccuccccgucggcuccugguccuacaucgucgagacccccaacuccgagaacggcaucugcuaccccggcgacuucaucgacuacgaggagcuccgcgagcagcucuccuccgucuccuccuucgagcgcuucgagaucuuccccaaggaguccuccuggcccgaccacaacaccaacggcgucaccgccgccugcucccacgagggcaagaacuccuucuaccgcaaccuccucuggcucaccgagaagaaguccuccuaccccgagcucaagaacuccuacgucaacaagaagggcaaggagguccucguccucuggggcauccaccacccccccaacuccaaggagcagcagaaccucuaccagaacgagaacgccuacgucuccgucgucaccuccaacuacaaccgccgcuucacccccgagaucgccgagcgccccaaggucaaggaccaggccggccgcaugaacuacuacuggacccuccucaagcccggcgacaccaucaucuucgaggccaacggcaaccucaucgcccccauguacgccuucgcccucucccgcggcuucggcuccggcaucaucaccuccaacgccuccaugcacgagugcaacaccaagugccagaccccccucggcgccaucaacuccucccuccccuaccagaacauccaccccgucaccaucggcgagugccccaaguacguccgcuccgccaagcuccgcauggucaccggccuccgcaacauccccuccauccagucccgcggccucuucggcgccaucgccggcuucaucgagggcggcuggaccggcaugaucgacggcugguacggcuaccaccaccagaacgagcagggcuccggcuacgccgccgaccagaaguccacccagaacgccaucaacggcaucaccaacaaggucaacaccgucaucgagaagaugaacauccaguucaccgccgucggcaaggaguucaacaagcucgagaagcgcauggagaaccucaacaagaaggucgacgacggcuuccucgacaucuggaccuacaacgccgagcuccucguccuccucgagaacgagcgcacccucgacuuccacgacuccaacgucaagaaccucuacgagaaggucaagucccagcucaagaacaacgccaaggagaucggcaacggcugcuucgaguucuaccacaagugcgacaacgagugcauggaguccguccgcaacggcaccuacgacuaccccaaguacuccgaggaguccaagcucaaccgcgagaaggucgacggcgucaagcucgaguccaugggcaucuaccagauccucgccaucuacuccaccgucgccuccucccucguccuccucgucucccucggcgccaucuccuucuggaugugcuccaacggcucccuccagugccgcaucugcaucuga

SEQ ID NO: 106144 - RNA, 1698 nt, Artificial Sequence
  derived and/or modified CDS sequence (opt2) from hemagglutinin__InfluenzaA__AGO00421
augaaggccaaccuccucguccuccucugcgcccucgccgccgccgacgccgacaccaucugcaucggcuaccacgccaacaacuccaccgacaccgucgacaccguccucgagaagaacgucaccgucacccacuccgucaaccuccucgaggacucccacaacggcaagcucugcaagcucaagggcaucgccccccuccagcucggcaagugcaacaucgccggcuggcuccucggcaaccccggcugcgacccccuccuccccgucggcuccugguccuacaucgucgagacccccaacuccgagaacggcaucugcuaccccggcgacuucaucgacuacgaggagcuccgcgagcagcucuccuccgucuccuccuucgagcgcuucaagaucuuccccaaggaguccuccuggcccgaccacaacaccaccggcgucaccgccgccugcucccacgagggcaagaacuccuucuaccgcaaccuccucuggcucaccaagaaggaguccuccuaccccgagcucaagaacuccuacgucaacaagaagcgcaaggagguccucguccucuggggcauccaccacccccccaacuccaaggagcagcagaaccucuaccagaacgagaacgccuacgucuccgucgucaccuccaacuacaaccgccgcuucacccccgagaucgccgagcgccccaaggucaagggccaggccggccgcaugaacuacuacuggacccuccucaagcccggcgacaccaucaucuucgaggccaacggcaaccucaucgcccccauguacgccuucgcccucucccgcggcuucggcuccggcaucaucaccuccaacgccuccaugcacgagugcaacaccaagugccagaccccccucggcgccaucaacuccucccuccccuaccagaacauccaccccgucaccaucggcgagugccccaaguacguccgcuccgccaagcuccgcauggucaccggccuccgcaacauccccuccauccagucccgcggccucuucggcgccaucgccggcuucaucgagggcggcuggaccggcaugaucgacggcugguacggcuaccaccaccagaacgagcagggcuccggcuacgccgccgaccagaaguccacccagaacgccaucaacggcaucaccaacaaggucaacaccgucaucgagaagaugaacauccaguucaccgccgucggcaaggaguucaacaagcucgagaagcgcauggagaaccucaacaagaaggucgacgacggcuuccucgacaucuggaccuacaacgccgagcuccucguccuccucgagaacgagcgcacccucgacuuccacgacuccaacgucaagaaccucuacgagaaggucaagucccagcucaagaacaacgccaaggagaucggcaacggcugcuucgaguucuaccacaagugcgacaacgagugcauggaguccguccgcaacggcaccuacgacuaccccaaguacuccgaggaguccaagcucaaccgcgagaaggucgacggcgucaagcucgaguccaugggcaucuaccagauccucgccaucuacuccaccgucgccuccucccucguccuccucgucucccucggcgccaucuccuucuggaugugcuccaacggcucccuccagugccgcaucugcaucuga

SEQ ID NO: 106145 - RNA, 1698 nt, Artificial Sequence
  derived and/or modified CDS sequence (opt2) from hemagglutinin__InfluenzaA__AGO00433
augaaggccaaccuccucguccuccucugcgcccucgccgccgccgacgccgacaccaucugcaucggcuaccacgccaacaacuccaccgacaccgucgacaccguccucgagaagaacgucaccgucacccacuccgucaaccuccucgaggacucccacaacggcaagcucugccgccucaagggcaucgccccccuccagcucggcaagugcaacaucgccggcuggcuccucggcaaccccgagugcgacccccuccuccccguccgcuccugguccuacaucgucgagacccccaacuccgagaacggcaucugcuaccccggcgacuucaucgacuacgaggagcuccgcgagcagcucuccuccgucuccuccuucgagcgcuucgagaucuuccccaaggaguccuccuggcccaaccacaacaccaacggcgucaccgccgccugcucccacgagggcaaguccuccuucuaccgcaaccuccucuggcucaccgagaaggagggcuccuaccccaagcucgagaacuccuacgucaacaagaagggcaaggagguccucguccucuggggcauccaccacccccccaacuccaaggagcagcagaaccucuaccagaacgagaacgccuacgucuccgucgucaccuccaacuacaaccgccgcuucacccccgagaucgccgagcgccccaagguccgcgaccaggccggccgcaugaacuacuacuggacccuccucaagcccggcgacaccaucaucuucgaggccaacggcaaccucaucgcccccauguacgccuucgcccucucccgcggcuucggcuccggcaucaucaccuccaacgccuccaugcacgagugcaacaccaagugccagaccccccucggcgccaucaacuccucccuccccuaccagaacauccaccccgucaccaucggcgagugccccaaguacguccgcuccgccaagcuccgcauggucaccggccuccgcaacauccccuccauccagucccgcggccucuucggcgccaucgccggcuucaucgagggcggcuggaccggcaugaucgacggcugguacggcuaccaccaccagaacgagcagggcuccggcuacgccgccgaccagaaguccacccagaacgccaucaacggcaucaccaacaaggucaacaccgucaucgagaagaugaacauccaguucaccgccgucggcaaggaguucaacaagcucgagaagcgcauggagaaccucaacaagaaggucgacgacggcuuccucgacaucuggaccuacaacgccgagcuccucguccuccucgagaacgagcgcacccucgacuuccacgacuccaacgucaagaaccucuacgagaaggucaagucccagcucaagaacaacgccaaggagaucggcaacggcugcuucgaguucuaccacaagugcgacaacgagugcauggaguccguccgcaacggcaccuacgacuaccccaaguacuccgaggaguccaagcucaaccgcgagaaggucgacggcgucaagcucgaguccaugggcaucuaccagauccucgccaucuacuccaccgucgccuccucccucguccuccucgucucccucggcgccaucuccuucuggaugugcuccaacggcucccuccagugccgcaucugcaucuga

SEQ ID NO: 106146 - RNA, 1698 nt, Artificial Sequence
  derived and/or modified CDS sequence (opt2) from hemagglutinin__InfluenzaA__AGO00445
augaaggccaaccuccucguccuccucugcgcccucgccgccgccgacgccgacaccaucugcaucggcuaccacgccaacaacuccaccgacaccgucgacaccguccucgagaagaacgucaccgucacccacuccgucaaccuccucgaggacucccacaacggcaagcucugccgccucaagggcaucgccccccuccagcucggcaagugcaacaucgccggcuggcuccucggcaaccccgagugcgacccccuccuccccguccgcuccugguccuacaucgucgagacccccaacuccgagaacggcaucugcuaccccggcgacuucaucgacuacgaggagcuccgcgagcagcucuccuccgucuccuccuucgagcgcuucgagaucuuccccaaggaguccuccuggcccaaccacaacaccaacggcgucaccgccgccugcucccacgagggcaaguccuccuucuaccgcaaccuccucuggcucaccgagaaggagggcuccuaccccacccucaagaacuccuacgucaacaagaagggcaaggagguccucguccucuggggcauccaccacccccccaacuccaaggagcagcagaaccucuaccagaacgagaacgccuacgucuccgucgucaccuccaacuacaaccgccgcuucacccccgagaucgccgagcgccccaagguccgcgaccaggccggccgcaugaacuacuacuggacccuccucaagcccggcgacaccaucaucuucgaggccaacggcaaccucaucgcccccauguacgccuucgcccucucccgcggcuucggcuccggcaucaucaccuccaacgccuccaugcacgagugcaacaccaagugccagaccccccucggcgccaucaacuccucccuccccuaccagaacauccaccccgucaccaucggcgagugccccaaguacguccgcuccgccaagcuccgcauggucaccggccuccgcaacauccccuccauccagucccgcggccucuucggcgccaucgccggcuucaucgagggcggcuggaccggcaugaucgacggcugguacggcuaccaccaccagaacgagcagggcuccggcuacgccgccgaccagaaguccacccagaacgccaucaacggcaucaccaacaaggucaacaccgucaucgagaagaugaacauccaguucaccgccgucggcaaggaguucaacaagcucgagaagcgcauggagaaccucaacaagaaggucgacgacggcuuccucgacaucuggaccuacaacgccgagcuccucguccuccucgagaacgagcgcacccucgacuuccacgacuccaacgucaagaaccucuacgagaaggucaagucccagcucaagaacaacgccaaggagaucggcaacggcugcuucgaguucuaccacaagugcgacaacgagugcauggaguccguccgcaacggcaccuacgacuaccccaaguacuccgaggaguccaagcucaaccgcgagaaggucgacggcgucaagcucgaguccaugggcaucuaccagauccucgccaucuacuccaccgucgccuccucccucguccuccucgucucccucggcgccaucuccuucuggaugugcuccaacggcucccuccagugccgcaucugcaucuga

SEQ ID NO: 106147 - RNA, 1701 nt, Artificial Sequence
  derived and/or modified CDS sequence (opt2) from hemagglutinin__InfluenzaA__AGO02696
augaaggccauccucgucgucaugcucuacaccuucgccaccgccaacgccgacacccucugcaucggcuaccacgccaacaacuccaccgacaccgucgacaccguccucgagaagaacgucaccgucacccacuccgucaaccuccucgaggacaagcacaacggcaagcucugcaagcuccgcggcgucgccccccuccaccucggcaagugcaacaucgccggcuggauccucggcaaccccgagugcgagucccucuccaccgccuccuccugguccuacaucgucgagaccuccuccuccgacaacggcaccugcuaccccggcgacuucaucgacuacgaggagcuccgcgagcagcucuccuccgucuccuccuucgagcgcuucgagaucuuccccaagaccuccuccuggcccaaccacgacuccaacaagggcgucaccgccgccugcccccacgccggcgccaagggcuucuacaagaaccucaucuggcucgucaagaagggcaacuccuaccccaagcucuccaucuccuacaucaacgacaagggcaaggagguccucguccucuggggcauccaccaccccuccaccaccgccgaccagcagucccucuaccagaacgccgacaccuacgucuucgucggcaccucccgcuacuccaagaaguucaagcccgagaucgccauccgccccaagguccgcgaccaggagggccgcaugaacuacuacuggacccucgucgagcccggcgacaagaucaccuucgaggccaccggcaaccucgucgucccccgcuacgccuucgccauggagcgcaacgccggcuccggcaucaucaucuccgacacccccguccacgacugcaacaccaccugccagacccccaagggcgccaucaacaccucccuccccuuccagaacauccaccccaucaccaucggcaagugccccaaguacgucaaguccaccaagcuccgccucgccaccggccuccgcaacguccccuccauccagucccgcggccucuucggcgccaucgccggcuucaucgagggcggcuggaccggcauggucgacggcugguacggcuaccaccaccagaacgagcagggcuccggcuacgccgccgaccucaaguccacccagaacgccaucgacaagaucaccaacaaggucaacuccgucaucgagaagaugaacacccaguucaccgccgucggcaaggaguucaaccaccucgagaagcgcaucgagaaccucaacaagaaggucgacgacggcuuccucgacaucuggaccuacaacgccgagcuccucguccuccucgagaacgagcgcacccucgacuaccacgacuccaacgucaagaaccucuacgagaagguccgcaaccagcucaagaacaacgccaaggagaucggcaacggcugcuucgaguucuaccacaagugcgacaacaccugcauggaguccgucaagaacggcaccuacgacuaccccaaguacuccgaggaggccaagcucaaccgcgaggagaucgacggcgucaagcucgaguccacccgcaucuaccagauccucgccaucuacuccaccgccgccuccucccucguccucgucgucucccucggcgccaucuccuucuggaugugcuccaacggcucccuccagugccgcaucugcaucuga

SEQ ID NO: 106148 - RNA, 1701 nt, Artificial Sequence; identical to SEQ ID NO: 106076
  derived and/or modified CDS sequence (opt2) from hemagglutinin__InfluenzaA__AGO02697

SEQ ID NO: 106149 - RNA, 1701 nt, Artificial Sequence; identical to SEQ ID NO: 105894
  derived and/or modified CDS sequence (opt2) from hemagglutinin__InfluenzaA__AGO02698

SEQ ID NO: 106150 - RNA, 1701 nt, Artificial Sequence; identical to SEQ ID NO: 105894
  derived and/or modified CDS sequence (opt2) from hemagglutinin__InfluenzaA__AGO02699

SEQ ID NO: 106151 - RNA, 1701 nt, Artificial Sequence
  derived and/or modified CDS sequence (opt2) from hemagglutinin__InfluenzaA__AGO02700
augaaggccauccucgucguccuccucuacaccuucgccaccgccaacgccgacacccucugcaucggcuaccacgccaacaacuccaccgacaccgucgacaccguccucgagaagaacgucaccgucacccacuccgucaaccuccucgaggacaagcacaacggcaagcucugcaagcuccgcggcgucgccccccuccaccucggcaagugcaacaucgccggcuggauccucggcaaccccgagugcgagucccucuccaccgccuccuccugguccuacaucgucgagaccuccuccuccgacaacggcaccugcuaccccggcgacuucaucaacuacgaggagcuccgcgagcagcucuccuccgucuccuccuucgagcgcuucgagaucuuccccaagaccuccuccuggcccaaccacgacuccaacaagggcgucaccgccgccugcccccaggccggcgccaaguccuucuacaagaaccucaucuggcucgucaagaagggcaacuccuaccccaagcucuccaaguccuacaucaacgacaagggcaaggagguccucguccucuggggcauccaccaccccuccaccuccgccgaccagcagucccucuaccagaacgccgacgccuacgucuucgucggcaccuccaaguacuccaagaaguucaagcccgagaucgccguccgccccaagguccgcgaccaggagggccgcaugaacuacuacuggacccucgucgagcccggcgacaagaucaccuucgaggccaccggcaaccuccucgucccccgcuacgccuucgccauggagcgcaacgccggcuccggcaucaucaucuccgacacccccguccacgacugcaacaccaccugccagacccccaagggcgccaucaacaccucccuccccuuccagaacauccaccccaucaccaucggcaagugccccaaguacgucaaguccaccaagcuccgccucgccaccggccuccgcaacguccccuccauccagucccgcggccucuucggcgccaucgccggcuucaucgagggcggcuggaccggcauggucgacggcugguacggcuaccaccaccagaacgcccagggcuccggcuacgccgccgaccucaaguccacccagaacgccaucgacaagaucaccaacaaggucaacuccgucaucgagaagaugaacacccaguucaccgccgucggcaaggaguucaaccaccucgagaagcgcaucgagaaccucaacaagaaggucgacgacggcuuccucgacaucuggaccuacaacgccgagcuccucguccuccucgagaacgagcgcacccucgacuaccacgacuccaacgucaagaaccucuacgagaagguccgcucccagcucaagaacaacgccaaggagaucggcaacggcugcuucgaguucuaccacaagugcgacaacaccugcauggaguccgucaagaacggcaccuacgacuacccccgcuacuccgaggaggccaagcucaaccgcgaggagaucgacggcaucaagcucgaguccacccgcaucuaccagauccucgccaucuacuccaccgucgccuccucccucguccucaucgucucccucggcgccaucuccuucuggaugugcuccaacggcucccuccagugccgcaucugcaucuga

SEQ ID NO: 106152 - RNA, 1701 nt, Artificial Sequence
  derived and/or modified CDS sequence (opt2) from hemagglutinin__InfluenzaA__AGO02701
augaaggccauccucgucguccuccucuacaccuucgccaccgccaacgccgacacccucugcaucggcuaccacgccaacaacuccaccgacaccgucgacaccguccucgagaagaacgucaccgucacccacuccgucaaccuccucgaggacaagcacaacggcaagcucugcaagcuccgcggcgucgccccccuccaccucggcaagugcaacaucgccggcuggauccucggcaaccccgagugcgagucccucuccaccgccuccuccugguccuacaucgucgagaccuccuccuccgacaacggcaccugcuaccccggcgacuucaucaacuacgaggagcuccgcgagcagcucuccuccgucucccacuucgagcgcuucgagaucuuccccaagaccuccuccuggcccaaccacgacuccaacaagggcgucaccgccgccugcccccacgccggcgccaaguccuucuacaagaaccucaucuggcucgucaagaagggcaacuccuaccccaagcucuccaaguccuacaucaacgacaagggcaaggagguccucguccucuggggcauccaccaccccuccaccuccgccgaccagcagucccucuaccagaacgccgacgccuacgucuucgucggcaccuccaaguacuccaagaaguucaagcccgagaucgccguccgccccaagguccgcgaccaggagggccgcaugaacuacuacuggacccucgucgagcccggcgacaagaucaccuucgaggccaccggcaaccuccucgucccccgcuacgccuucgccauggagcgcaacgccggcuccggcaucaucaucuccgacacccccguccacgacugcaacaccaccugccagacccccaagggcgccaucaacaccucccuccccuuccagaacauccaccccaucaccaucggcaagugccccaaguacgucaaguccaccaagcuccgccucgccaccggccuccgcaacguccccuccauccagucccgcggccucuucggcgccaucgccggcuucaucgagggcggcuggaccggcauggucgacggcugguacggcuaccaccaccagaacggccagggcuccggcuacgccgccgaccucaaguccacccagaacgccaucgacaagaucaccaacaaggucaacuccgucaucgagaagaugaacacccaguucaccgccgucggcaaggaguucaaccaccucgagaagcgcaucgagaaccucaacaagaaggucgacgacggcuuccucgacaucuggaccuacaacgccgagcuccucguccuccucgagaacgagcgcacccucgacuaccacgacuccaacgucaagaaccucuacgagaagguccgcucccagcucaagaacaacgccaaggagaucggcaacggcugcuucgaguucuaccacaagugcgacaacaccugcauggaguccgucaagaacggcaccuacgacuaccccaaguacuccgaggaggccaagcucaaccgcgaggagaucgacggcgucaagcucgaguccacccgcaucuaccagauccucgccaucuacuccaccgucgccuccucccucguccucgucgucucccucggcgccaucuccuucuggaugugcuccaacggcucccuccagugccgcaucugcaucuga

SEQ ID NO: 106153 - RNA, 1683 nt, Artificial Sequence; identical to SEQ ID NO: 106024
  derived and/or modified CDS sequence (opt2) from hemagglutinin__InfluenzaA__AGO51374

SEQ ID NO: 106154 - RNA, 1701 nt, Artificial Sequence
  derived and/or modified CDS sequence (opt2) from hemagglutinin__InfluenzaA__AGO86686
augaagaccaucaucgcccucuccuacauccucugccucgccuucgcccagaagcuccccggcaacgacaacuccaccgccacccucugccucggccaccacgccguccccaacggcacccucgucaagaccaucaccaacgaccagaucgaggucaccaacgccaccgagcucguccaguccuccuccaccggccgcaucugcgacuccccccaccagauccucgacggcgagaacugcacccucaucgacgcccuccucggcgacccccacugcgacggcuuccagaacaaggagugggaccucuucgucgagcgcuccaaggccuacuccaacugcuaccccuacgacguccccgacuacgccucccuccgcucccucgucgccuccuccggcacccucgaguucaacaacgaguccuucaacuggaccggcgucgcccagaacggcaccuccuccgccugcaagcgccgcuccaucaaguccuucuucucccgccucaacuggcuccaccagcucgagaaccgcuaccccgcccucaacgucaccaugcccaacaacgacaaguucgacaagcucuacaucuggggcguccaccaccccuccaccgacuccgaccagaucuccgucuacgcccaggccuccggccgcgucaccgucuccaccaagcgcucccagcagaccgucauccccaacaucggcucccgccccuggguccgcggcaucuccucccgcaucuccaucuacuggaccaucgucaagcccggcgacauccuccucaucaacuccaccggcaaccucaucgccccccgcggcuacuucaagauccgcuccggcaaguccuccaucaugcgcuccgacgcccccaucggcaagugcaacuccgagugcaucacccccaacggcuccauccccaacgacaagcccuuccagaacgucaaccgcaucaccuacggcgccugcccccgcuacgucaagcagaacacccucaagcucgccaccggcaugcgcaacguccccgagaagcagacccgcggcaucuucggcgccaucgccggcuucaucgagaacggcugggagggcaugauggacggcugguacggcuuccgccaccagaacuccgagggcaccggccaggccgccgaccucaaguccacccaggccgccaucaaccagaucaacggcaagcucaacaagcucaucgagaagaccaacgagaaguuccaccagaucgagaaggaguucuccgaggucgagggccgcauccaggaccucgagaaguacgucgaggacaccaagaucgaccucugguccuacaacgccgagcuccucgucgcccucgagaaccagcacaccaucgaccucaccgacuccgagaugaacaagcucuucgagcgcacccgcaagcagcuccgcgagaacgccgaggacaugggcaacggcugcuucaagaccuaccacaagugcgacaacgccugcaucggcuccauccgcaacggcaccuacgaccacgacgucuaccgcgacgaggcccucaacaaccgcuuccagaucaagggcgucgagcucaaguccggcuacaaggacuggauccucuggaucuccuucgccaucuccugcuuccuccucugcgucguccuccucggcuucaucaugugggccugccagaagggcaacauccgcugcaacaucugcaucuga

SEQ ID NO: 106155 - RNA, 1701 nt, Artificial Sequence; identical to SEQ ID NO: 106076
  derived and/or modified CDS sequence (opt2) from hemagglutinin__InfluenzaA__AGQ16240

SEQ ID NO: 106156 - RNA, 1701 nt, Artificial Sequence; identical to SEQ ID NO: 106076
  derived and/or modified CDS sequence (opt2) from hemagglutinin__InfluenzaA__AGQ16241

SEQ ID NO: 106157 - RNA, 1701 nt, Artificial Sequence
  derived and/or modified CDS sequence (opt2) from hemagglutinin__InfluenzaA__AGQ16242
augaaggccauccucgucguccuccucuacaccuucgccaccgccaacgccgacacccucugcaucggcuaccacgccaacaacuccaccgacaccgucgacaccguccucgagaagaacgucaccgucacccacuccgucaaccuccucgaggacaagcacaacggcaagcucugcaagcuccgcggcgucgccccccuccaccucggcaagugcaacaucgccggcuggauccucggcaaccccgagugcgagucccucuccaccgccuccuccugguccuacaucgucgagaccuccuccuccgacaacggcaccugcuaccccggcgacuucaucaacuacgaggagcuccgcgagcagcucuccuccgucuccuccuucgagcgcuucgagaucuuccccaagaccuccuccuggcccaaccacgacuccaacaagggcgucaccgccgccugcccccacgccggcgccaaguccuucuacaagaaccucaucuggcucgucaagaagggcaacuccuaccccaagcucuccaccuccuacaucaacgacaagggcaaggagauccucguccucuggggcauccaccaccccuccaccaccgccgaccagcagucccucuaccagaacgccgacgccuacgucuucgucggcaccucccgcuacuccaagaaguucaagcccgagaucgccauccgccccaagguccgcgaccaggagggccgcaugaacuacuacuggacccucgucgagcccggcgacaagaucaccuucgaggccaccggcaaccucgucgucccccgcuacgccuucgccauggagcgcaacgccggcuccggcaucaucaucuccgacacccccguccacgacugcaacaccaccugccagacccccgagggcgccaucaacaccucccuccccuuccagaacauccaccccaucaccaucggcaagugccccaaguacgucaaguccaccaagcuccgccucgccaccggccuccgcaacguccccuccauccagucccgcggccucuucggcgccaucgccggcuucaucgagggcggcuggaccggcauggucgacggcugguacggcuaccaccaccagaacgagcagggcuccggcuacgccgccgaccucaaguccacccagaacgccaucgacaagaucaccaacaaggucaacuccgucaucgagaagaugaacacccaguucaccgccgucggcaaggaguucaaccaccucgagaagcgcaucgagaaccucaacaagaaggucgacgacggcuuccucgacaucuggaccuacaacgccgagcuccucguccuccucgagaacgagcgcacccucgacuaccacgacuccaacgucaagaaccucuacgagaagguccgcaaccagcucaagaacaacgccaaggagaucggcaacggcugcuucgaguucuaccacaagugcgacaacaccugcauggaguccgucaagaacggcaccuacgacuaccccaaguacuccgaggaggccaagcucaaccgcgagaagaucgacggcgucaagcucgaguccacccgcaucuaccagauccucgccaucuacuccaccgucgccuccucccucguccucgucgucucccucggcgccaucuccuucuggaugugcuccaacggcucccuccagugccgcaucugcaucuga

SEQ ID NO: 106158 - RNA, 1701 nt, Artificial Sequence; identical to SEQ ID NO: 106096
  derived and/or modified CDS sequence (opt2) from hemagglutinin__InfluenzaA__AGQ16243

SEQ ID NO: 106159 - RNA, 1701 nt, Artificial Sequence
  derived and/or modified CDS sequence (opt2) from hemagglutinin__InfluenzaA__AGQ16245
augaaggccauccucgucguccuccucuacaccuucgccaccgccaacgccgacacccucugcaucggcuaccacgccaacaacuccaccgacaccgucgacaccguccucgagaagaacgucaccgucacccacuccgucaaccuccucgaggacaagcacaacggcaagcucugcaagcuccgcggcgucgccccccuccaccucggcaagugcaacaucgccggcuggauccucggcaaccccgagugcgagucccucuccaccgccuccuccugguccuacaucgucgagaccuccuccuccgacaacggcaccugcuaccccggcgacuucaucaacuacgaggagcuccgcgagcagcucuccuccgucuccuccuucgagcgcuucgagaucuuccccaagaccuccuccuggcccaaccacgacuccaacaagggcgucaccgccgccugcccccacgccggcgccaaguccuucuacaagaaccucaucuggcucgucaagaagggcaacuccuaccccaagcucuccaaguccuacaucaacgacaagggcaaggagguccucguccucuggggcauccaccaccccuccaccaccgccgaccagcagucccucuaccagaacgccgacgccuacgucuucgucggcaccucccgcuacuccaagaaguucaagcccgagaucgccauccgccccaagguccgcgaccaggagggccgcaugaacuacuacuggacccucaucgagcccggcgacaagaucaccuucgaggccaccggcaaccucgucgucccccgcuacgccuucgccauggagcgcaacgccggcuccggcaucaucaucuccgacacccccguccacgacugcaacaccaccugccagacccccgagggcgccaucaacaccucccuccccuuccagaacauccaccccaucaccaucggcaagugccccaaguacgucaaguccaccaagcuccgccucgccaccggccuccgcaacguccccuccauccagucccgcggccucuucggcgccaucgccggcuucaucgagggcggcuggaccggcauggucgacggcugguacggcuaccaccaccagaacgagcagggcuccggcuacgccgccgaccucaaguccacccagaacgccaucgacaagaucaccaacaaggucaacuccgucaucgagaagaugaacacccaguucaccgccgucggcaaggaguucaaccaccucgagaagcgcaucgagaaccucaacaagaaggucgacgacggcuuccucgacaucuggaccuacaacgccgagcuccucguccuccucgagaacgagcgcacccucgacuaccacgacuccaacgucaagaaccucuacgagaagguccgcaaccagcucaagaacaacgccaaggagaucggcaacggcugcuucgaguucuaccacaagugcgacaacaccugcauggaguccgucaagaacggcaccuacgacuaccccaaguacuccgaggaggccaagcucaaccgcgagaagaucgacggcgucaagcucgaguccacccgcaucuaccagauccucgccaucuacuccaccgucgccuccucccucguccucgucgucucccucggcgccaucuccuucuggaugugcuccaacggcucccuccagugccgcaucugcaucuga

SEQ ID NO: 106160 - RNA, 1701 nt, Artificial Sequence; identical to SEQ ID NO: 106096
  derived and/or modified CDS sequence (opt2) from hemagglutinin__InfluenzaA__AGQ16247

SEQ ID NO: 106161 - RNA, 1701 nt, Artificial Sequence
  derived and/or modified CDS sequence (opt2) from hemagglutinin__InfluenzaA__AGQ16248
augcaggccauccucgucguccuccucuacaccuucgccaccgccaccgccgacacccucugcaucggcuaccacgccaacaacuccaccgacaccgucgacaccguccucgagaagaacgucaccgucacccacuccgucaaccuccucgaggacaagcacaacggcaagcucugcaagcuccgcggcgucgccccccuccaccucggcaagugcaacaucgccggcuggauccucggcaaccccgagugcgagucccucuccaccgccuccuccugguccuacaucgucgagaccuccuccuccgacaacggcaccugcuaccccggcgacuucaucaacuacgaggagcuccgcgagcagcucuccuccgucuccuccuucgagcgcuucgagaucuuccccaagaccuccuccuggcccaaccacgacuccaacaagggcgucaccgccgccugcccccacgccggcgccaaguccuucuacaagaaccucaucuggcucgucaagaagggcaacuccuaccccaagcucucccaguccuacaucaacgacaagggcaaggagguccucguccucuggggcauccaccaccccuccaccaccgccgaccagcagucccucuaccagaacgccgacgccuacgucuucgucggcaccucccgcuacuccaagaaguucaagcccgagaucgccauccgccccaagguccgcgaccaggagggccgcaugaacuacuacuggacccucgucgagcccggcgacaagaucaccuucgaggccaccggcaaccucgucgucccccgcuacgccuucaccauggagcgcaacgccggcuccggcaucaucaucuccgacacccccauccacgacugcaacaccaccugccagacccccgagggcgccaucaacaccucccuccccuuccagaacauccaccccaucaccaucggcaagugccccaaguacgucaaguccaccaagcuccgccucgccaccggccuccgcaacguccccuccauccagucccgcggccucuucggcgccaucgccggcuucaucgagggcggcuggaccggcauggucgacggcugguacggcuaccaccaccagaacgagcagggcuccggcuacgccgccgaccucaaguccacccagaacgccaucgacaagaucaccaacaaggucaacuccgucaucgagaagaugaacacccaguucaccgccgucggcaaggaguucaaccaccucgagaagcgcaucgagaaccucaacaagaaggucgacgacggcuuccucgacaucuggaccuacaacgccgagcuccucguccuccucgagaacgagcgcacccucgacuaccacgacuccaacgucaagaaccucuacgagaagguccgcaaccagcucaagaacaacgccaaggagaucggcaacggcugcuucgaguucuaccacaagugcgacaacaccugcauggaguccgucaagaacggcaccuacgacuaccccaaguacuccgaggaggccaagcucaaccgcgagaagaucgacggcgucaagcucgaguccacccgcaucuaccagauccucgccaucuacuccaccgucgccuccucccucguccucgucgucucccucggcgccaucuccuucuggaugugcuccaacggcucccuccagugccgcaucugcaucuga

SEQ ID NO: 106162 - RNA, 1701 nt, Artificial Sequence; identical to SEQ ID NO: 105894
  derived and/or modified CDS sequence (opt2) from hemagglutinin__InfluenzaA__AGQ16329

SEQ ID NO: 106163 - RNA, 1701 nt, Artificial Sequence; identical to SEQ ID NO: 105919
  derived and/or modified CDS sequence (opt2) from hemagglutinin__InfluenzaA__AGQ16331

SEQ ID NO: 106164 - RNA, 1701 nt, Artificial Sequence; identical to SEQ ID NO: 105894
  derived and/or modified CDS sequence (opt2) from hemagglutinin__InfluenzaA__AGQ16332

SEQ ID NO: 106165 - RNA, 1701 nt, Artificial Sequence; identical to SEQ ID NO: 105894
  derived and/or modified CDS sequence (opt2) from hemagglutinin__InfluenzaA__AGQ16333

SEQ ID NO: 106166 - RNA, 1701 nt, Artificial Sequence
  derived and/or modified CDS sequence (opt2) from hemagglutinin__InfluenzaA__AGQ16335
augaagaccaucaucgcccucuccuacauccucugccucgucuucgcccagaagcuccccggcaacgacaacuccaccgccacccucugccucggccaccacgccguccccaacggcaccaucgucaagaccaucaccaacgaccgcaucgaggucaccaacgccaccgagcucguccagaacuccuccaucggcgagaucugcgacuccccccaccagguccucgacggcgagaacugcacccucaucgacgcccuccucggcgacccccagugcgacggcuuccagaacaagaagugggaccucuucgucgagcgcuccaaggccuacuccaacugcuaccccuacgacguccccgacuacgccucccuccgcucccucgucgccuccuccggcacccucgaguucaacaacgaguccuucaacuggaccggcgucacccagaacggcaccuccuccgccugcauccgccgcuccaacuccuccuucuucucccgccucaacuggcucacccaccucaacuucaaguaccccgcccucaacgucaccaugcccaacaacgagcaguucgacaagcucuacaucuggggcguccaccaccccggcaccgacaaggaccagaucuuccucuacgcccaguccuccggccgcaucaccgucuccaccaagcgcucccagcaggccgucauccccaacaucggcucccgcccccgcauccgcaacauccccucccgcaucuccaucuacuggaccaucgucaagcccggcgacauccuccucaucaacuccaccggcaaccucaucgccccccgcggcuacuucaagauccgcuccggcaaguccuccaucaugcgcuccgacgcccccaucggcaagugcaaguccgagugcaucacccccaacggcuccauccccaacgacaagcccuuccagaacgucaaccgcaucaccuacggcgccugcccccgcuacgucaagcagaacacccucaagcucgccaccggcaugcgcaacguccccgagaagcagacccgcggcaucuucggcgccaucgccggcuucaucgagaacggcugggagggcauggucgacggcugguacggcuuccgccaccagaacuccgagggccgcggccaggccgccgaccucaaguccacccaggccgccaucgaccagaucaacggcaagcucaaccgccucaucggcaagaccaacgagaaguuccaccagaucgagaaggaguucuccgaggucgagggccgcauccaggaccucgagaaguacgucgaggacaccaagaucgaccucugguccuacaacgccgagcuccucgucgcccucgagaaccagcacaccaucgaccucaccgacuccgagaugaacaagcucuucgagaagaccaagaagcagcuccgcgagaacgccgaggacaugggcaacggcugcuucaagaucuaccacaagugcgacaacgccugcaucggcuccauccgcaacggcaccuacgaccacgacgucuaccgcgacgaggcccucaacaaccgcuuccagaucaagggcgucgagcucaaguccggcuacaaggacuggauccucuggaucuccuucgccaucuccugcuuccuccucugcgucgcccuccucggcuucaucaugugggccugccagaagggcaacauccgcugcaacaucugcaucuga

SEQ ID NO: 106167 - RNA, 1701 nt, Artificial Sequence
  derived and/or modified CDS sequence (opt2) from hemagglutinin__InfluenzaA__AGQ16336
augaagaccaucaucgcccucuccuacauccucugccucgucuucgcccagaagcuccccggcaacgacaacuccaccgccacccucugccucggccaccacgccguccccaacggcaccaucgucaagaccaucaccaacgaccgcaucgaggucaccaacgccaccgagcucguccagaacuccuccaucggcgagaucugcgacuccccccaccagauccucgacggcgagaacugcacccucaucgacgcccuccucggcgacccccagugcgacggcuuccagaacaagaagugggaccucuucgucgagcgcuccaaggccuacuccaacugcuaccccuacgacguccccgacuacgccucccuccgcucccucgucgccuccuccggcacccucgaguucaacaacgaguccuucaacuggaccggcgucacccagaacggcaccuccuccgccugcauccgccgcuccaaccgcuccuucuucucccgccucaacuggcucacccaccucaacuucaaguaccccgcccucaacgucaccaugcccaacaacgagcaguucgacaagcucuacaucuggggcguccaccaccccggcaccgacaaggaccagaucuuccucuacgcccaguccuccggccgcaucaccgucuccaccaagcgcucccagcaggccgucauccccaacaucggcucccgcccccgcauccgcaacauccccucccgcaucuccaucuacuggaccaucgucaagcccggcgacauccuccucaucaacuccaccggcaaccucaucgccccccgcggcuacuucaagauccgcuccggcaaguccuccaucaugcgcuccgacgcccccaucggcaagugcaaguccgagugcaucacccccaacggcuccauccccaacgacaagcccuuccagaacgucaaccgcaucaccuacggcgccugcccccgcuacgucaagcaguccacccucaagcucgccaccggcaugcgcaacguccccgagaagcagacccgcggcaucuucggcgccaucgccggcuucaucgagaacggcugggagggcauggucgacggcugguacggcuuccgccaccagaacuccgagggccgcggccaggccgccgaccucaaguccacccaggccgccaucgaccagaucaacggcaagcucaaccgccucaucggcaagaccaacgagaaguuccaccagaucgagaaggaguucuccgaggucgagggccgcauccaggaccucgagaaguacgucgaggacaccaagaucgaccucugguccuacaacgccgagcuccucgucgcccucgagaaccagcacaccaucgaccucaccgacuccgagaugaacaagcucuucgagaagaccaagaagcagcuccgcgagaacgccgaggacaugggcaacggcugcuucaagaucuaccacaagugcgacaacgccugcaucggcuccauccgcaacggcaccuacgaccacgacgucuaccgcgacgaggcccucaacaaccgcuuccagaucaagggcgucgagcucaaguccggcuacaaggacuggauccucuggaucuccuucgccaucuccugcuuccuccucugcgucgcccuccucggcuucaucaugugggccugccagaagggcaacauccgcugcaacaucugcaucuga

SEQ ID NO: 106168 - RNA, 1701 nt, Artificial Sequence; identical to SEQ ID NO: 106166
  derived and/or modified CDS sequence (opt2) from hemagglutinin__InfluenzaA__AGQ16337

SEQ ID NO: 106169 - RNA, 1701 nt, Artificial Sequence; identical to SEQ ID NO: 105904
  derived and/or modified CDS sequence (opt2) from hemagglutinin__InfluenzaA__AGQ16338

SEQ ID NO: 106170 - RNA, 1701 nt, Artificial Sequence
  derived and/or modified CDS sequence (opt2) from hemagglutinin__InfluenzaA__AGQ16339
augaagaccaucaucgcccucuccuacauccucugccucgucuucgcccagaagcuccccggcaacgacaacuccaccgccacccucugccucggccaccacgccguccccaacggcaccaucgucaagaccaucaccaacgaccgcaucgaggucaccaacgccaccgagcucguccagaacuccuccaucggcgagaucugcgacuccccccaccagauccucgacggcgagaacugcacccucaucgacgcccuccucggcgacccccagugcgacggcuuccagaacaagaagugggaccucuucgucgagcgcuccaaggccuacuccaacugcuaccccuacgacguccccgacuacgccucccuccgcucccucgucgccuccuccggcacccucgaguucaacaacgaguccuucaacugggccggcgucacccagaacggcaccuccuccgccugcauccgcggcuccaacuccuccuucuucucccgccucaacuggcucacccaccucaacuucaaguaccccgcccucaacgucaccaugcccaacaacgagcaguucgacaagcucuacaucuggggcguccaccaccccggcaccgacaaggaccagaucuuccucuacgcccaguccuccggccgcaucaccgucuccaccaagcgcucccagcaggccgucauccccaacaucggcucccgcccccgcauccgcaacauccccucccgcaucuccaucuacuggaccaucgucaagcccggcgacauccuccucaucaacuccaccggcaaccucaucgccccccgcggcuacuucaagauccgcuccggcaaguccuccaucaugcgcuccgacgcccccaucggcaagugcaaguccgagugcaucacccccaacggcuccauccccaacgacaagcccuuccagaacgucaaccgcaucaccuacggcgccugcccccgcuacgucaagcaguccacccucaagcucgccaccggcaugcgcaacguccccgagaagcagacccgcggcaucuucggcgccaucgccggcuucaucgagaacggcugggagggcaugauggacggcugguacggcuuccgccaccagaacuccgagggccgcggccaggccgccgaccucaaguccacccaggccgccaucgaccagaucaacggcaagcucaaccgccucaucggcaagaccaacgagaaguuccaccagaucgagaaggaguucuccgaggucgagggccgcauccaggaccucgagaaguacgucgaggacaccaagaucgaccucugguccuacaacgccgagcuccucgucgcccucgagaaccagcacaccaucgaccucaccgacuccgagaugaacaagcucuucgagaagaccaagaagcagcuccgcgagaacgccgaggacaugggcaacggcugcuucaagaucuaccacaagugcgacaacgccugcaucggcuccauccgcaacggcaccuacgaccacgacgucuaccgcgacgaggcccucaacaaccgcuuccagaucaagggcgucgagcucaaguccggcuacaagaacuggauccucuggaucuccuucgccaucuccugcuuccuccucugcgucgcccuccucggcuucaucaugugggccugccagaagggcaacauccgcugcaacaucugcaucuga

SEQ ID NO: 106171 - RNA, 1701 nt, Artificial Sequence; identical to SEQ ID NO: 106030
  derived and/or modified CDS sequence (opt2) from hemagglutinin__InfluenzaA__AGQ16340

SEQ ID NO: 106172 - RNA, 1701 nt, Artificial Sequence; identical to SEQ ID NO: 105894
  derived and/or modified CDS sequence (opt2) from hemagglutinin__InfluenzaA__AGQ16341

SEQ ID NO: 106173 - RNA, 1701 nt, Artificial Sequence; identical to SEQ ID NO: 105904
  derived and/or modified CDS sequence (opt2) from hemagglutinin__InfluenzaA__AGQ16342

SEQ ID NO: 106174 - RNA, 1701 nt, Artificial Sequence
  derived and/or modified CDS sequence (opt2) from hemagglutinin__InfluenzaA__AGQ16343
augaagaccaucaucgcccucuccuacauccucugccucgucuucgcccagaagcuccccggcaacgacaacuccaccgccacccucugccucggccaccacgccguccccaacggcaccaucgucaagaccaucaccaacgaccgcaucgaggucaccaacgccaccgagcucguccagaacuccuccaucggcgagaucugcgacuccccccaccagauccucgacggcgagaacugcacccucaucgacgcccuccucggcgacccccagugcgacggcuuccagaacaagaagugggaccucuucgucgagcgcuccaaggccuacuccaacugcuaccccuacgacguccccgacuacgccucccuccgcucccucgucgccuccuccggcacccucgaguucaacaacgaguccuucaacugggccggcgucacccagaacggcaccuccuccgccugcauccgcggcuccaacuccuccuucuucucccgccucaacuggcucacccaccucaacuucaaguaccccgcccucaacgucaccaugcccaacaacgagcaguucgacaagcucuacaucuggggcguccaccaccccggcaccgacaaggaccagaucuuccucuacgcccaguccuccggccgcaucaccgucuccaccaagcgcucccagcaggccgucauccccaacaucggcucccgcccccgcauccgcgacauccccucccgcaucuccaucuacuggaccaucgucaagcccggcgacauccuccucaucaacuccaccggcaaccucaucgccccccgcggcuacuucaagauccgcuccggcaaguccuccaucaugcgcuccgacgcccccaucggcaagugcaaguccgagugcaucacccccaacggcuccauccccaacgacaagcccuuccagaacgucaaccgcaucaccuacggcgccugcccccgcuacgucaagcaguccacccucaagcucgccaccggcaugcgcaacguccccgagaagcagacccgcggcaucuucggcgccaucgccggcuucaucgagaacggcugggagggcauggucgacggcugguacggcuuccgccaccagaacuccgagggccgcggccaggccgccgaccucaaguccacccaggccgccaucgaccagaucaacggcaagcucaaccgccucaucggcaagaccaacgagaaguuccaccagaucgagaaggaguucuccgaggucgagggccgcauccaggaccucgagaaguacgucgaggacaccaagaucgaccucugguccuacaacgccgagcuccucgucgcccucgagaaccagcacaccaucgaccucaccgacuccgagaugaacaagcucuucgagaagaccaagaagcagcuccgcgagaacgccgaggacaugggcaacggcugcuucaagaucuaccacaagugcgacaacgccugcaucggcuccauccgcaacggcaccuacgaccacgacgucuaccgcgacgaggcccucaacaaccgcuuccagaucaagggcgucgagcucaaguccggcuacaaggacuggauccucuggaucuccuucgccaucuccugcuuccuccucugcgucgcccuccucggcuucaucaugugggccugccagaagggcaacauccgcugcaacaucugcaucuga

SEQ ID NO: 106175 - RNA, 1701 nt, Artificial Sequence; identical to SEQ ID NO: 105904
  derived and/or modified CDS sequence (opt2) from hemagglutinin__InfluenzaA__AGQ16344

SEQ ID NO: 106176 - RNA, 1701 nt, Artificial Sequence; identical to SEQ ID NO: 105894
  derived and/or modified CDS sequence (opt2) from hemagglutinin__InfluenzaA__AGQ16345

SEQ ID NO: 106177 - RNA, 1701 nt, Artificial Sequence
  derived and/or modified CDS sequence (opt2) from hemagglutinin__InfluenzaA__AGQ16346
augaagaccaucaucgcccucuccuacauccucugccucgucuucgcccagaagcuccccggcaacgacaacuccaccgccacccucugccucggccaccacgccguccccaacggcaccaucgucaagaccaucaccaacgaccgcaucgaggucaccaacgccaccgagcucguccagaacuccuccaucggcgagaucugcgacuccccccaccagauccucgacggcgagaacugcacccucaucgacgcccuccucggcgacccccagugcgacggcuuccagaacaagaagugggaccucuucgucgagcgcuccaaggccuacuccaacugcuaccccuacgacguccccgacuacgccucccuccgcucccucgucgccuccuccggcacccucgaguucaacaacgaguccuucaacuggaccggcgucacccagaacggcaccuccuccgccugcauccgccgcuccaacuccuccuucuucucccgccucaacuggcucacccaccucaacuucaaguaccccgcccucaacgucaccaugcccaacaacgagcaguucgacaagcucuacaucuggggcguccaccaccccggcaccgacaaggaccagaucuuccucuacgcccaguccuccggccgcaucaccgucuccaccaagcgcucccagcaggccgucauccccaacaucggcucccgcccccgcauccgcaacauccccucccgcaucuccaucuacuggaccaucgucaagcccggcgacauccuccucaucaacuccaccggcaaccucaucgccccccgcggcuacuucaagauccgcuccggcaaguccuccaucaugcgcuccgacgcccccaucggcaagugccgcuccgagugcaucacccccaacggcuccauccccaacgacaagcccuuccagaacgucaaccgcaucaccuacggcgccugcccccgcuacgucaagcaguccacccucaagcucgccaccggcaugcgcaacguccccgagaagcagacccgcggcaucuucggcgccaucgccggcuucaucgagaacggcugggagggcauggucgacggcugguacggcuuccgccaccagaacuccgagggccgcggccaggccgccgaccucaaguccacccaggccgccaucgaccagaucaacggcaagcucaaccgccucaucggcaagaccaacgagaaguuccaccagaucgagaaggaguucuccgaggucgagggccgcauccaggaccucgagaaguacgucgaggacaccaagaucgaccucugguccuacaacgccgagcuccucgucgcccucgagaaccagcacaccaucgaccucaccgacuccgagaugaacaagcucuucgagaagaccaagaagcagcuccgcgagaacgccgaggacaugggcaacggcugcuucaagaucuaccacaagugcgacaacgccugcaucggcuccauccgcaacggcaccuacgaccacaacgucuaccgcgacgaggcccucaacaaccgcuuccagaucaagggcgucgagcucaaguccggcuacaaggacuggauccucuggaucuccuucgccaucuccugcuuccuccucugcgucgcccuccucggcuucaucaugugggccugccagaagggcaacauccgcugcaacaucugcaucuga

SEQ ID NO: 106178 - RNA, 1701 nt, Artificial Sequence; identical to SEQ ID NO: 105894
  derived and/or modified CDS sequence (opt2) from hemagglutinin__InfluenzaA__AGQ16347

SEQ ID NO: 106179 - RNA, 1701 nt, Artificial Sequence; identical to SEQ ID NO: 106030
  derived and/or modified CDS sequence (opt2) from hemagglutinin__InfluenzaA__AGQ16348

SEQ ID NO: 106180 - RNA, 1701 nt, Artificial Sequence; identical to SEQ ID NO: 105894
  derived and/or modified CDS sequence (opt2) from hemagglutinin__InfluenzaA__AGQ16349

SEQ ID NO: 106181 - RNA, 1701 nt, Artificial Sequence
  derived and/or modified CDS sequence (opt2) from hemagglutinin__InfluenzaA__AGQ16350
augaagaccaucaucgcccucuccuacauccucugccucgucuucgcccagaagcuccccggcaacgacaacuccaccgccacccucugccucggccaccacgccguccccaacggcaccaucgucaagaccaucaccaacgaccgcaucgaggucaccaacgccaccgagcucguccagaacuccuccaucggcgagaucugcgacuccccccaccagauccucgacggcgagaacugcacccucaucgacgcccuccucggcgacccccagugcgacggcuuccagaacaagaagugggaccucuucgucgagcgcuccaaggccuacuccaacugcuaccccuacgacguccccgacuacgccucccuccgcucccucgucgccuccuccggcacccucgaguucaacaacgaguccuucaacuggaccggcgucacccagaacggcaccuccuccgccugcauccgccgcuccaacuccuccuucuucucccgccucaacuggcucacccaccucaacuucaaguaccccgcccucaacgucaccaugcccaacaacgagcaguucgacaagcucuacaucuggggcguccaccaccccggcaccgacaaggaccagaucuuccucuacgcccaguccuccggccgcaucaccgucuccaccaagcgcucccagcaggccgucauccccaacaucggcucccgcccccgcauccgcaacauccccucccgcaucuccaucuacuggaccaucgucaagcccggcgacauccuccucaucaacuccaccggcaaccucaucgccccccgcggcuacuucaagauccgcuccggcaaguccuccaucaugcgcuccgacgcccccaucggcaagugcaaguccgagugcaucacccccaacggcuccauccccaacgacaagcccuuccagaacgucaaccgcaucaccuacggcgccugcccccgcuacgucaagcaguccacccucaagcucgccaccggcaugcgcaacguccccgagaagcagacccgcggcaucuucggcgccaucgccggcuucaucgagaacggcugggagggcauggucgacggcugguacggcuuccgccaccagaacuccgagggccgcggccaggccgccgaccucaaguccacccaggccgccaucgaccagaucaacggcaagcucaaccgccucaucggcaagaccaacgagaaguuccaccagaucgagaaggaguucuccgaggucgagggccgcauccaggaccucgagaaguacgucgaggacaccaagaucgaccucugguccuacaacgccgagcuccucgucgcccucgagaaccagcacaccaucgaccucaccgacuccgagaugaacaagcucuucgagaagaccaagaagcagcuccgcgagaacgccgaggacaugggcaacggcugcuucaagaucuaccacaagugcgacaacgccugcaucggcuccauccgcaacggcaccuacgaccacaacgucuaccgcgacgaggcccucaacaaccgcuuccagaucaagggcgucgagcucaaguccggcuacaaggacuggauccucuggaucuccuucgccaucuccugcuuccuccucugcgucgcccuccucggcuucaucauguggaccugccagaagggcaacauccgcugcaacaucugcaucuga

SEQ ID NO: 106182 - RNA, 1701 nt, Artificial Sequence
  derived and/or modified CDS sequence (opt2) from hemagglutinin__InfluenzaA__AGQ47719
augaaggccauccuccucguccuccucugcaccuucaccgccaccaacgccgacacccucugcaucggcuaccacgccaacaacuccaccgacaccgucgacaccguccucgagaagaacgucaccgucacccacuccgucaaccuccucgaggaccgccacaacggcaagcucugcaagcucggcggcaucgccccccuccaccucggcaagugcaacaucgccggcuggcuccucggcaaccccgagugcgagcuccucuucaccgucuccuccugguccuacaucgucgagaccuccaacuccgacaacggcaccugcuaccccggcgacuucaucaacuacgaggagcuccgcgagcagcucuccuccgucuccuccuucgagcgcuucgagaucuuccccaagaccuccuccuggcccgaccacgagaccaaccgcggcgucaccgccgccugccccuacgccggcgccaacuccuucuaccgcaaccucaucuggcucgucaagaagggcaacuccuaccccaagcucuccaaguccuacgucaacaacaagggcaaggagguccucguccucuggggcauccaccacccccccaccuccaccgaccagcagucccucuaccagaacgccgacgccuacgucuucgucggcuccuccaaguacaaccgcaaguucaagcccgagaucgccgcccgccccaagguccgcggccaggccggccgcaugaacuacuacuggacccucaucgagcccggcgacaccaucaccuucgaggccaccggcaaccucgucgucccccgcuacgccuucgccaugaaccgcggcuccggcuccggcaucaucaucuccgacgcccccauccacgacugcaacaccaagugccagacccccaagggcgccaucaacaccucccuccccuuccagaacauccaccccgucaccaucggcgagugccccaaguacgucaaguccaccaagcuccgcauggccaccggccuccgcaacauccccuccauccagucccgcggccucuucggcgccaucgccggcuucaucgagggcggcuggaccggcaugaucgacggcugguacggcuaccaccaccagaacggccagggcuccggcuacgccgccgaccagaaguccacccagaacgccaucgacggcaucaccaacaaggucaacuccgucaucgagaagaugaacacccaguucaccgccgucggcaaggaguucaaccaccucgagaagcgcaucgagaaccucaacaagaaggucgacgacggcuuccucgacgucuggaccuacaacgccgagcuccucguccuccucgagaacgagcgcacccucgacuuccacgacuccaacgucaagaaccucuacgagaagguccgcucccagcuccgcaacaacgccaaggagaucggcaacggcugcuucgaguucuaccacaagugcgacgacaccugcauggaguccgucaagaacggcaccuacgacuaccccaaguacuccgaggaguccaagcucaaccgcgaggagaucgacggcgucaagcucgaguccacccgcaucuaccagauccucgccaucuacuccaccgccgccuccucccucguccuccucgucucccucggcgccaucuccuucuggaugugcuccaacggcucccuccagugccgcaucugcaucuga

SEQ ID NO: 106183 - RNA, 1698 nt, Artificial Sequence; identical to SEQ ID NO: 98151
  derived and/or modified CDS sequence (opt2) from hemagglutinin__InfluenzaA__AGQ47728

SEQ ID NO: 106184 - RNA, 1701 nt, Artificial Sequence
  derived and/or modified CDS sequence (opt2) from hemagglutinin__InfluenzaA__AGQ47740
augaaggcccgccuccucguccuccucugcgcccucgccgccaccgacgccgacaccaucugcaucggcuaccacgccaacaacuccaccgacaccgucgacacccuccucgagaagaacgucaccgucacccacuccgucaaccuccucgaggacucccacaacggcaagcucugcaagcucaagggcaucgccccccuccagcucggcaagugcaacaucgccggcuggcuccucggcaaccccgagugcgacucccuccuccccgcccgcuccugguccuacaucgucgagacccccaacuccgagaacggcgccugcuaccccggcgacuucaucgacuacgaggagcuccgcgagcagcucuccuccgucuccucccucgagcgcuucgagaucuuccccaaggaguccuccuggcccaaccacaacaccaucaagggcgucaccgccuccugcucccaccgcggccaguccuccuucuaccgcaaccuccucuggcucaccaagaagggcgacuccuaccccaagcucaacaacuccuacgucaacaacaagggcaaggagguccucguccucuggggcguccaccaccccuccuccuccaacgagcagcagucccucuaccgcaacgagaacgccuacgucuccgucgucuccuccaacuacaaccgccgcuucacccccgagaucgccgcccgccccaagguccgcgaccagaccggccgcaugaacuacuacuggacccuccucgagcccggcgacaccaucauguucgaggccaccggcaaccucaucgcccccugguacgccuucgcccucucccgcggcuucggcuccggcaucaucaccuccaacgccuccaugcacgagugcaacaccaagugccagaccccccagggcgccaucaacuccucccuccccuuccagaacauccaccccgucaccaucggcgagugccccaaguacguccgcuccaccaagcuccgcauggucaccggccuccgcaacauccccuccauccagucccgcggccucuucggcgccaucgccggcuucaucgagggcggcuggaccggcaugaucgacggcugguacggcuaccaccaccagaacgagcagggcuccggcuacgccgccgaccagaaguccacccagaacgccaucaacggcaucaccaacaaggucaacuccgucaucgagaagaugaacacccaguucaccgccgucggcaaggaguucaacaaccucgagaagcgcauggagaaccucaacaagaaggucgacgacggcuuccucgacaucuggaccuacaacgccgagcuccucguccuccucgagaacgagcgcacccucgacuuccacgaccucaacgucaagaaccucuacgagaaggucaagucccagcucaagaacaacgccaaggagaucggcaacggcugcuucgaguucuaccacaagugcgacaacgagugcauggaguccguccgcaacggcaccuacgacuaccccaaguacuccgaggaguccaagcucaaccgcgagaagaucgacggcgucaagcucgaguccaugggcgucuaccagauccucgccaucuacuccaccgucgccuccucccucguccuccucgucucccucggcgccaucuccuucuggaugugcuccaacggcucccuccagugccgcaucugcaucuga

SEQ ID NO: 106185 - RNA, 1701 nt, Artificial Sequence
  derived and/or modified CDS sequence (opt2) from hemagglutinin__InfluenzaA__AGQ47752
augaaggccaagcuccucauccuccucugcgcccucuccgccaccgacgccgacaccaucugcaucggcuaccacgccaacaacuccaccgacaccgucgacaccguccucgagaagaacgucaccgucacccacuccgucaaccuccucgaggacucccacaacggcaagcucugccgccucaagggcaaggccccccuccagcucggcaagugcaacaucgccggcuggguccucggcaaccccgagugcgagucccuccucuccaaccgcuccugguccuacaucgccgagacccccaacuccgagaacggcaucugcuaccccggcgacuucgccgacuacgaggagcuccgcgagcagcucuccuccgucuccuccuucgagcgcuucgagaucuuccccaaggagcgcuccuggcccaagcacaacaccauccgcggcgucaccgccgccugcucccacgccggcaaguccuccuucuacaagaaccucgucuggcucaccgaggccaacggcuccuaccccgcccucuccaccuccuacgucaacaaccaggagaaggagguccucguccucuggggcguccaccaccccuccaacaucgaggagcagcgcacccucuaccgcaaggacaacgccuacgucuccgucgucuccuccaacuacaaccgccgcuucacccccgagaucgccaagcgccccaagguccgcgaccagcccggccgcaugaacuacuacuggacccuccucgagcccggcgacaccaucaucuucgaggccaccggcaaccucaucgcccccugguacgccuucgcccucucccgcggccccggcuccggcaucaucaccuccaacgcccccauggacgagugcgacaccaagugccagaccccccagggcgccaucaacuccucccuccccuuccagaacauccaccccgucaccaucggcgagugccccaaguacguccgcuccaccaagcuccgcauggucaccggccuccgcaacauccccuccauccagucccgcggccucuucggcgccaucgccggcuucaucgagggcggcuggaccggcaugauggacggcugguacggcuaccaccaccagaacgagcagggcuccggcuacgccgccgaccagaaguccacccagaacgccaucaacggcaucaccaacaaggucaacuccgucaucgagaagaugaacacccaguucaccgccgucggcaaggaguucaacaagcucgagaagcgcauggagaaccucaacaagaaggucgacgacggcuuccucgacaucuggaccuacaacgccgagcuccucguccuccucgagaacgagcgcacccucgacuuccacgacuccaacgucaagaaccucuacgagaaggucaagaaccagcuccgcaacaacgccaaggagcucggcaacggcugcuucgaguucuaccacaagugcgacaacgagugcauggaguccgucaagaacggcaccuacgacuaccccaaguacuccgaggaguccaagcucaaccgcgagaagaucgacggcgucaagcucgaguccaugggcgucuaccgcauccucgccaucuacuccaccgucgccuccucccucguccuccucgucucccucggcgccaucuccuucuggaugugcuccaacggcucccuccagugccgcaucugcaucuga

SEQ ID NO: 106186 - RNA, 1701 nt, Artificial Sequence
  derived and/or modified CDS sequence (opt2) from hemagglutinin__InfluenzaA__AGQ47764
augaaggccaagcuccucauccuccucugcgcccucaccgccaccgacgccgacaccaucugcaucggcuaccacgccaacaacuccaccgacaccgucgacaccguccucgagaagaacgucaccgucacccacuccgucaaccuccucgaggacucccacaacggcaagcucugccgccucaagggcaucgccccccuccagcucggcaagugcaacaucgccggcuggauccucggcaaccccgagugcgagucccuccucuccaagcgcuccugguccuacaucgccgagacccccaacuccgagaacggcgccugcuaccccggcgacuucgccgacuacgaggagcuccgcgagcagcucuccuccgucuccuccuucgagcgcuucgagaucuuccccaaggagcgcuccuggcccaagcacaacaucacccgcggcgucaccgccgccugcucccacgccggcaaguccuccuucuacaagaaccuccucuggcucaccgagaccgacggcuccuaccccaagcucuccaaguccuacgucaacaacaaggagaaggagguccucguccucuggggcguccaccaccccuccaacaucgaggaccagaagacccucuaccgcaaggagaacgccuacgucuccgucgucuccuccaacuacaaccgccgcuucacccccgagaucgccgagcgccccaagguccgcggccaggccggccgcaucaacuacuacuggacccuccucgagcccggcgacaccaucaucuucgaggccaacggcaaccucaucgcccccugguacgccuucgcccucucccgcgacuucggcuccggcaucaucaccuccaacgccuccauggacgagugcgacaccaagugccagaccccccagggcgccaucaacuccucccuccccuuccagaacauccaccccgucaccaucggcgagugccccaaguacgucaaguccaccaagcuccgcauggucaccggccuccgcaacauccccuccauccagucccgcggccucuucggcgccaucgccggcuucaucgagggcggcuggaccggcaugaucgacggcugguacggcuaccaccaccagaacgagcagggcuccggcuacgccgccgaccagaaguccacccagaacgccaucaacggcaucaccaacaaggucaacuccgucaucgagaagaugaacacccaguucaccgccgucggcaaggaguucaacaagcucgagaagcgcauggagaaccucaacaagaaggucgacgacggcuuccucgacaucuggaccuacaacgccgagcuccucguccuccucgagaacgagcgcacccucgacuuccacgacuccaacgucaagaaccucuacgagaaggucaagaaccagcuccgcaacaacgccaaggagaucggcaacggcugcuucgaguucuaccacaagugcaacaacgagugcauggaguccgucaagaacggcaccuacgacuaccccaaguacuccgaggaguccaagcucaaccgcgagaagaucgacggcgucaagcucgaguccaugggcgucuaccagauccucgccaucuacuccaccgucgccuccucccucguccuccucgucucccucggcgccaucuccuucuggaugugcuccaacggcucccuccagugccgcaucugcaucuga

SEQ ID NO: 106187 - RNA, 1701 nt, Artificial Sequence
  derived and/or modified CDS sequence (opt2) from hemagglutinin__InfluenzaA__AGQ47776
augaaggccaagcuccucauccuccucugcgcccucuccgccaccgacgccgacaccaucugcaucggcuaccacgccaacaacuccaccgacaccgucgacaccguccucgagaagaacgucaccgucacccacuccgucaaccuccucgaggacucccacaacggcaagcucugccgccucaagggcaucgccccccuccagcucggcaagugcaacaucgccggcuggauccucggcaaccccgagugcgagucccuccucuccaagcgcuccugguccuacaucgccgagacccccaacuccgagaacggcaccugcuaccccggcgacuucgccgacuacgaggagcuccgcgagcagcucuccuccgucuccuccuucgagcgcuucgagaucuuccccaaggagcgcuccuggcccaagcacaacaucaacaucggcgucaccgccgccugcucccacgccggcaaguccuccuucuacaagaaccuccucuggcucaccgagaaggacggcuccuaccccaaccucaacaaguccuacgucaacaagaaggagaaggagguccucguccucuggggcguccaccaccccuccaacaucgaggaccagaagacccucuaccgcaaggagaacgccuacgucuccgucgucuccuccaacuacaaccgccgcuucacccccgagaucgccgagcgccccaagguccgcggccaggccggccgcaugaacuacuacuggacccuccucgagcccggcgacaccaucaucuucgaggccaacggcaaccucaucgcccccugguacgccuucgcccucucccgcggccucggcuccggcaucaucaccuccaacgccuccauggacgagugcgacaccaagugccagaccccccagggcgccaucaacuccucccuccccuuccagaacauccaccccuucaccaucggcgagugccccaaguacguccgcuccaccaagcuccgcauggucaccggccuccgcaacauccccuccauccagucccgcggccucuucggcgccaucgccggcuucaucgagggcggcuggaccggcaugaucgacggcugguacggcuaccaccaccagaacgagcagggcuccggcuacgccgccgaccagaaguccacccagaacgccaucaacggcaucaccaacaaggucaacuccgucaucgagaagaugaacacccaguucaccgccgucggcaaggaguucaacaagcucgagaagcgcauggagaaccucaacaagaaggucgacgacggcuuccucgacaucuggaccuacaacgccgagcuccucguccuccucgagaacgagcgcacccucgacuuccacgacuccaacgucaagaaccucuacgagaaggucaagaaccagcuccgcaacaacgccaaggagaucggcaacggcugcuucgaguucuaccacaagugcaacaacgagugcauggaguccgucaagaacggcaccuacgacuaccccaaguacuccgaggaguccaagcucaaccgcgagaagaucgacggcgucaagcucgaguccaugggcgucuaccagauccucgccaucuacuccaccgucgccuccucccucguccuccucgucucccucggcgccaucuccuucuggaugugcuccaacggcucccuccagugccgcaucugcaucuga

SEQ ID NO: 106188 - RNA, 1701 nt, Artificial Sequence
  derived and/or modified CDS sequence (opt2) from hemagglutinin__InfluenzaA__AGQ47788
augaaggccaagcuccucguccuccucugcgcccucuccgccaccgacgccgacaccaucugcaucggcuaccacgccaacaacuccaccgacaccgucgacaccguccucgagaagaacgucaccgucacccacuccgucaaccuccucgaggacucccacaacggcaagcucugccgccucaagggcaucgccccccuccagcucggcaagugcaacaucgccggcuggauccucggcaaccccgagugcgagucccucuucuccaagaaguccugguccuacaucgccgagacccccaacuccgagaacggcaccugcuaccccggcuacuucgccgacuacgaggagcuccgcgagcagcucuccuccgucuccuccuucgagcgcuucgagaucuuccccaaggagcgcuccuggcccaagcacaacgucacccgcggcgucaccgccgccugcucccacaagggcaaguccuccuucuaccgcaaccuccucuggcucaccgagaaggacggcuccuaccccaaccucuccaaguccuacgucaacaacaaggagaaggagguccucguccucuggggcguccaccaccccuccaacaucgaggaccagaagacccucuaccgcaaggagaacgccuacgucuccgucgucuccuccaacuacaaccgccgcuucacccccgagaucgccgagcgccccaagguccgcggccaggccggccgcaucaacuacuacuggacccuccucgagcccggcgacaccaucaucuucgaggccaacggcaaccucaucgcccccuggcacgccuucgcccucucccgcggcuucggcuccggcaucaucaccuccaacgccuccauggacgagugcgacaccaagugccagaccccccagggcgccaucaacuccucccuccccuuccagaacauccaccccgucaccaucggcgagugccccaaguacguccgcuccaccaagcuccgcauggucaccggccuccgcaacauccccuccauccagucccgcggccucuucggcgccaucgccggcuucaucgagggcggcuggaccggcaugaucgacggcugguacggcuaccaccaccagaacgagcagggcuccggcuacgccgccgaccagaaguccacccagaacgccaucaacggcaucaccaacaaggucaacuccgucaucgagaagaugaacacccaguucaccgccgucggcaaggaguucaacaagcucgagaagcgcauggagaaccucaacaagaaggucgacgacggcuuccucgacaucuggaccuacaacgccgagcuccucguccuccucgagaacgagcgcacccucgacuuccacgacuccaacgucaagaaccucuacgagaaggucaagucccagcucaagaacaacgccaaggagaucggcaacggcugcuucgaguucuaccacaagugcaacaacgagugcauggaguccgucaagaacggcaccuacgacuaccccaaguacuccgaggaguccaagcucaaccgcgagaagaucgacggcgucaagcucgaguccaugggcgucuaccagauccucgccaucuacuccaccgucgccuccucccucguccuccucgucucccucggcgccaucuccuucuggaugugcuccaacggcucccuccagugccgcaucugcaucuga

SEQ ID NO: 106189 - RNA, 1701 nt, Artificial Sequence
  derived and/or modified CDS sequence (opt2) from hemagglutinin__InfluenzaA__AGQ47800
augaaggcccgccuccucguccuccucugcgcccucgccgccaccgacgccgacaccaucugcaucggcuaccacgccaacaacuccaccgacaccgucgacaccauccucgagaagaacgucaccgucacccacuccgucaaccuccucgaggacucccacaacggcaagcucugccgccucaagggcaucgccccccuccagcucggcaagugcaacaucgccggcuggauccucggcaaccccgagugcgagucccuccucuccgagcgcuccugguccuacaucgucgagauccccaacuccgagaacggcaccugcuaccccggcgacuucaccgacuacgaggagcuccgcgagcagcucuccuccgucuccuccuucgagcgcuucgagaucuuccccaaggaguccuccuggcccaagcacaacaccgcccgcggcgucaccgccgccugcucccacgccggcaaguccuccuucuaccgcaaccuccucuggcucaccgagaaggacggcuccuaccccaaccucaagaacuccuacgucaacaagaagggcaaggagguccucguccucuggggcguccaccaccccuccuccaucaaggagcagcagacccucuaccagaaggagaacgccuacgucuccgucgucuccuccaacuacaaccgccgcuucacccccgagaucgccgagcgccccaagguccgcgaccaggccggccgcaugaacuacuacuggacccuccucgagcccggcgacaccaucaucuucgaggccaacggcaaccucaucgcccccugguacgccuucgcccucucccgcggcuucggcuccggcaucaucaccuccaacgccuccaugcacgagugcgacaccaagugccagaccccccagggcgccaucaacuccucccuccccuuccagaacauccaccccgucaccaucggcgagugccccaaguacguccgcuccaccaagcuccgcauggucaccggccuccgcaacauccccuccauccagucccgcggccucuucggcgccaucgccggcuucaucgagggcggcuggaccggcaugaucgacggcugguacggcuaccaccaccagaacgagcagggcuccggcuacgccgccgaccagaaguccacccagaacgccaucaacggcaucaccaacaaggucaacuccgucaucgagaagaugaacacccaguucaccgccgucggcaaggaguucaacaaccucgagaagcgcauggagaaccucaacaagaaggucgacgacggcuuccucgacaucuggaccuacaacgccgagcuccucauccuccucgagaacgagcgcacccucgacuuccacgacuccaacgucaagaaccucuacgagaaggucaagucccagcuccgcaacaacgccaaggagaucggcaacggcugcuucgaguucuaccacaagugcaacaacgagugcauggaguccgucaagaacggcaccuacgacuaccccaaguacuccgaggaguccaagcucaaccgcgagaagaucgacggcgucaagcucgaguccaugggcgucuaccagauccucgccaucuacuccaccgucgccuccucccucguccuccucgucucccucggcgccaucuccuucuggaugugcuccaacggcucccuccagugccgcaucugcaucuga

SEQ ID NO: 106190 - RNA, 1701 nt, Artificial Sequence
  derived and/or modified CDS sequence (opt2) from hemagglutinin__InfluenzaA__AGQ47811
augaaggccaagcuccucguccuccucugcgcccucuccgccaccgacgccgacaccaucugcaucggcuaccacgccaacaacuccaccgacaccgucgacaccguccucgagaagaacgucaccgucacccacuccgucaaccuccucgaggacucccacaacggcaagcucugccgccucaagggcaucgccccccuccagcucggcaagugcaacaucgccggcuggauccucggcaaccccgagugcgagucccucuucuccaagaaguccugguccuacaucgccgagacccccaacuccgagaacggcaccugcuaccccggcuucuucgccgacuacgaggagcuccgcgagcagcucuccuccgucuccuccuucgagcgcuucgagaucuuccccaaggagcgcuccuggcccaagcacaacgucacccgcggcgucaccgccgccugcucccacaagggcaaguccuccuucuaccgcaaccuccucuggcucaccgagaagaacggcuccuaccccaaccucuccaaguccuacgucaacaacaaggagaaggagguccucguccucuggggcguccaccaccccuccaacaucgaggaccagaagaccaucuaccgcaaggagaacgccuacgucuccgucgucuccuccaacuacaaccgccgcuucacccccgagaucgccgagcgccccaagguccgcggccaggccggccgcaucaacuacuacuggacccuccucgagcccggcgacaccaucaucuucgaggccaacggcaaccucaucgcccccuggcacgccuucgcccucucccgcggcuucggcuccggcaucaucaccuccaacgccuccauggacgagugcgacaccaagugccagaccccccagggcgccaucaacuccucccuccccuuccagaacauccaccccgucaccaucggcgagugccccaaguacguccgcuccaccaagcuccgcauggucaccggccuccgcaacauccccuccauccagucccgcggccucuucggcgccaucgccggcuucaucgagggcggcuggaccggcaugaucgacggcugguacggcuaccaccaccagaacgagcagggcuccggcuacgccgccgaccagaaguccacccagaacgccaucgacggcaucaccaacaaggucaacuccgucaucgagaagaugaacacccaguucaccgccgucggcaaggaguucaacaagcucgagaagcgcauggagaaccucaacaagaaggucgacgacggcuuccucgacaucuggaccuacaacgccgagcuccucguccuccucgagaacgagcgcacccucgacuuccacgacuccaacgucaagaaccucuacgagaaggucaagucccagcucaagaacaacgccaaggagaucggcaacggcugcuucgaguucuaccacaagugcaacaacgagugcauggaguccgucaagaacggcaccuacgacuaccccaaguacuccgaggaguccaagcucaaccgcgagaagaucgacggcgucaagcucgaguccaugggcgucuaccagauccucgccaucuacuccaccgucgccuccucccucguccuccucgucucccucggcgccaucuccuucuggaugugcuccaacggcucccuccagugccgcaucugcaucuga

SEQ ID NO: 106191 - RNA, 1701 nt, Artificial Sequence
  derived and/or modified CDS sequence (opt2) from hemagglutinin__InfluenzaA__AGQ47823
augaaggccaagcuccucguccuccucugcgccuucaccgccaccuacgccgacaccaucugcaucggcuaccacgccaacaacuccaccgacaccgucgacaccguccucgagaagaacgucaccgucacccacuccgucaaccuccucgaggacucccacaacggcaagcucugccgccucaagggcaucgccccccuccagcucggcaacugcuccgucgccggcuggauccucggcaaccccaagugcgagucccucuucuccaaggaguccugguccuacaucgccgagacccccaaccccgagaacggcaccugcuaccccggcuacuucgccgacuacgaggagcuccgcgagcagcucuccuccgucuccuccuucgagcgcuucgagaucuuccccaaggaguccuccuggcccaaccacaccgucaccaagggcgucaccaccuccugcucccacaacggcaaguccuccuucuaccgcaaccuccucuggcucaccgagaagaacggccucuaccccaaccucuccaaguccuacgucaacaacaaggagaaggagguccucguccucuggggcguccaccaccccuccaacauccgcgaccagcgcgccaucuaccacaccgagaacgccuacgucuccgucgucuccucccacuacucccgccgcuucacccccgagaucgccaagcgccccaagguccgcggccaggagggccgcaucaacuacuacuggacccuccucgagcccggcgacaccaucaucuucgaggccaacggcaaccucaucgcccccugguacgccuucgcccucucccgcggcuucggcuccggcaucaucaccuccaacgccuccauggacgagugcgacgccaagugccagaccccccagggcgccaucaacuccucccuccccuuccagaacguccaccccgucaccaucggcgagugccccaaguacguccgcuccaccaagcuccgcauggucaccggccuccgcaacauccccuccauccagucccgcggccucuucggcgccaucgccggcuucaucgagggcggcuggaccggcaugaucgacggcugguacggcuaccaccaccagaacgagcagggcuccggcuacgccgccgaccagaaguccacccagaacgccaucaacggcaucaccaacaaggucaacuccgucaucgagaagaugaacacccaguucaccgccgucggcaaggaguucaacaagcucgagcgccgcauggagaaccucaacaagaaggucgacgacggcuuccucgacaucuggaccuacaacgccgagcuccucguccuccucgagaacggccgcacccucgacuuccacgacuccaacgucaagaaccucuacgagaaggucaagucccagcucaagaacaacgccaaggagaucggcaacggcugcuucgaguucuaccacaagugcaacaacgagugcauggaguccgucaagaacggcaccuacgacuaccccaaguacuccgaggaguccaagcucaaccgcggcaagaucgacggcgucaagcucgaguccaugggcgucuaccagauccucgccaucuacuccaccgucgccuccucccucguccuccucgucucccucggcgccaucuccuucuggaugugcuccaacggcucccuccagugccgcaucugcaucuga

SEQ ID NO: 106192 - RNA, 1701 nt, Artificial Sequence
  derived and/or modified CDS sequence (opt2) from hemagglutinin__InfluenzaA__AGQ47835
augaagaccaucaucgcccucuccuacaucuucugccucguccucggccaggacuuccccggcaacgacaacuccaccgccacccucugccucggccaccacgccguccccaacggcaccaucgucaagaccaucaccaacgaccagaucgaggucaccaacgccaccgagcucguccaguccuccuccaccggcaagaucugcaacaacccccaccgcauccucgacggcaucaacugcacccucaucgacgcccuccucggcgacccccacugcgacggcuuccagaacgagaccugggaccucuucgucgagcgcuccaaggccuucuccaacugcuaccccuacuacguccccgacuacgccucccuccgcucccucgucgccuccuccggcacccucgaguucaucaacgagggcuucaacuggaccggcgucacccagaacggcggcuccaacgccugcaagcgcggccccaacuccggcuucuucucccgccucaacuggcucuacaaguccggcaccaccuaccccguccucaacgucaccaugcccaacaacgacaacuucgacaagcucuacaucuggggcguccaccaccccuccaccgaccaggagcagaccaaccucuacguccaggccuccggccgcgucaccgucuccaccaagcgcucccagcagaccaucacccccaacaucggcucccgccccuggguccgcggccucuccucccgcaucuccaucuacuggaccaucgucaagcccggcgacauccucgucaucaacuccaacggcaaccucaucgccccccgcggcuacuucaagaugcgcaccggcaaguccuccaucaugcgcuccgacgcccccaucggcaccugcaucuccgagugcaucacccccaacggcuccauccccaacgacaagcccuuccagaacgucaacaagaucaccuacggcgccugccccaaguacgucaagcagaacacccucaagcucgccaccggcaugcgcaacguccccgagaagcagacccgcggcaucuucggcgccaucgccggcuucaucgagaacggcugggagggcauggucgacggcugguacggcuuccgccaccagaacuccgagggcaccggccaggccgccgaccucaaguccacccaggccgccaucgaccagaucaacggcaagcucaaccgcgucaucgagaagaccaacgagaaguuccaccagaucgagaaggaguucuccgaggucgagggccgcauccaggaccucgagaaguacgucgaggacaccaagaucgaccucugguccuacaacgccgagcuccucgucgcccucgagaaccagcacaccaucgaccucaccgacuccgagaugaacaagcucuucgagaagacccgccgccagcuccgcgagaacgccgaggacaugggcaacggcugcuucaagaucuaccacaagugcgacaacgccugcaucggcuccauccgcaacggcaccuacgaccacgacgucuaccgcgacgaggcccucaacaaccgcuuccagaucaagggcgucgagcucaaguccggcuacaaggacuggauccucuggaucuccuucgccaucuccugcuuccuccucugcgucguccuccucggcuucaucaugugggccugccagaagggcaacauccgcugcaacaucugcaucuga

SEQ ID NO: 106193 - RNA, 1701 nt, Artificial Sequence
  derived and/or modified CDS sequence (opt2) from hemagglutinin__InfluenzaA__AGQ47847
augaaggcccgccuccucauccuccucugcgcccucgccgccaccgacgccgacaccaucugcaucggcuaccacgccaacaacuccaccgacaccgucgacaccguccucgagaagaacgucaccgucacccacuccgucaaccuccucgaggacucccacaacggcaagcucugccgccucaagggcaucgccccccuccagcucggcaagugcaacaucgccggcuggcuccucggcaaccccgagugcgacucccuccuccccgccuccuccugguccuacaucgucgagacccccaacuccaagaacggcaucugcuaccccggcgacuucaucgacuacgaggagcuccgcgagcagcucuccuccgucuccuccuucgagcgcuucgagaucuuccccaaggaguccuccuggcccaagcacaacaccaccaagggcgucaccgccgccugcucccacgccggcaaguccuccuucuaccgcaaccuccucuggcucaccaagaaggaggacuccuaccccaagcucuccaacuccuacgucaacaagaagggcaaggagguccucguccucuggggcguccaccaccccuccaacuccaaggagcagcagacccucuaccagaacgagaacgccuacgucuccgucgucuccuccaacuacaaccgccgcuucacccccgagaucgccgagcgccccaagguccgcgaccaggccggccgcaugaacuacuacuggacccuccucgagcccggcgacaccaucaucuucgaggccaacggcaaccucaucgcccccugguacgccuucgcccucucccgcggcuucggcuccggcaucaucaccuccaacgccuccaugcacgagugcaacaccaagugccagaccccccagggcgccaucaacuccucccuccccuuccagaacauccaccccgucaccaucggcgagugccccaaguacgucaaguccgccaagcuccgcauggucaccggccuccgcaacauccccuccauccagucccgcggccucuucggcgccaucgccggcuucaucgagggcggcuggaccggcaugaucgacggcugguacggcuaccaccaccagaacgagcagggcuccggcuacgccgccgaccagaaguccacccagaacgccaucaacggcaucaccaacaaggucaacuccgucaucgagaagaugaacacccaguucaccgccgucggcaaggaguucaacaaccucgagaagcgcauggagaaccucaacaagaaggucgacgacggcuuccucgacaucuggaccuacaacgccgagcuccucguccuccucgagaacgagcgcacccucgacuuccacgacuccaacgucaagaaccucuacgagaaggucaagauccagcucaagaacaacgccaaggagaucggcaacggcugcuucgaguucuaccacaagugcgacaacgagugcauggaguccguccgcaacggcaccuacgacuaccccaaguacuccaaggaguccaagcucaaccgcgagaagaucgacggcgucaagcucgagcccaugggcgucuaccagauccucgccaucuacuccaccgucgccuccucccucguccuccucgucucccucggcgccaucuccuucuggaugugcuccaacggcucccuccagugccgcaucugcaucuga

SEQ ID NO: 106194 - RNA, 1701 nt, Artificial Sequence
  derived and/or modified CDS sequence (opt2) from hemagglutinin__InfluenzaA__AGQ47870
augaaggccauccuccucguccuccucugcaccuucgccgccaccaacgccgacacccucugcaucggcuaccacgccaacaacuccaccgacaccgucgacaccguccucgagaagaacgucaccgucacccacuccgucaaccuccucgaggaccgccacaacggcaagcucugcaagcucggcggcaucgccccccuccaccucggcaagugcaacaucgccggcuggcuccucggcaaccccgagugcgagcuccuccucaccgucuccuccugguccuacaucgucgagaccuccaacuccgacaacggcaccugcuaccccggcgacuucaucaacuacgaggagcuccgcgagcagcucuccuccgucuccuccuucgagcgcuucgagaucuuccccaagaccuccuccuggcccaaccacgagaccaaccgcggcgucaccgccgccugccccuacgccggcgccaacuccuucuaccgcaaccucaucuggcucgucaagaagggcaacuccuaccccaagcucuccaaguccuacgucaacaacaagggcaaggagguccucguccucuggggcauccaccacccccccaccuccaccgaccagcagucccucuaccagaacgccgacgccuacgucuucgucggcuccuccaaguacaaccgcaaguucaagcccgagaucgccgcccgccccaagguccgcggccaggccggccgcaugaacuacuacuggacccucaucgagcccggcgacaccaucaccuucgaggccaccggcaaccucgucgucccccgcuacgccuucgccaugaaccgcggcuccggcuccggcaucaucaucuccgacgcccccguccacgacugcaacaccaagugccagacccccaagggcgccaucaacaccucccuccccuuccagaacauccaccccgucaccaucggcgagugccccaaguacgucaaguccaccaagcuccgcauggccaccggccuccgcaacauccccuccauccagucccgcggccucuucggcgccaucgccggcuucaucgagggcggcuggaccggcaugaucgacggcugguacggcuaccaccaccagaacgagcagggcuccggcuacgccgccgaccagcgcuccacccagaacgccaucgacggcaucaccaacaaggucaacuccgucaucgagaagaugaacacccaguucaccgccgucggcaaggaguucaaccaccucgagaagcgcaucgagaaccucaacaagaaggucgacgacggcuuccucgacaucuggaccuacaacgccgagcuccucguccuccucgagaacgagcgcacccucgacuuccacgacuccaacgucaagaaccucuacgagaagguccgcucccagcuccgcaacaacgccaaggagaucggcaacggcugcuucgaguucuaccacaagugcgacgacaccugcauggaguccgucaagaacggcaccuacgacuaccccaaguacuccgaggaguccaagcucaaccgcgaggagaucgacggcgucaagcucgaguccacccgcaucuaccagauccucgccaucuacuccaccgucgccuccucccucguccuccucgucucccucggcgccaucuccuucuggaugugcuccaacggcucccuccagugccgcaucugcaucuga

SEQ ID NO: 106195 - RNA, 1701 nt, Artificial Sequence
  derived and/or modified CDS sequence (opt2) from hemagglutinin__InfluenzaA__AGQ47882
augaaggccauccuccucguccuccucugcaccuucgccgccaccaacgccgacacccucugcaucggcuaccacgccaacaacuccaccgacaccgucgacaccguccucgagaagaacgucaccgucacccacuccgucaaccuccucgaggaccgccacaacggcaagcucugcaagcucggcggcaucgccccccuccaccucggcaagugcaacaucgccggcuggcuccucggcaaccccgagugcgagcuccuccucaccgucuccuccugguccuacaucgucgagaccuccaacuccgacaacggcaccugcuaccccggcgacuucaucaacuacgaggagcuccgcgagcagcucuccuccgucuccuccuucgagcgcuucgagaucuuccccaagaccuccuccuggcccaaccacgagaccaaccgcggcgucaccgccgccugccccuacgccggcgccaacuccuucuaccgcaaccucaucuggcucgucaagaaggagaacuccuaccccaagcucuccaaguccuacgucaacaacaagggcaaggagguccucguccucuggggcauccaccacccccccaccuccaccgaccagcagucccucuaccagaacgccgacgccuacgucuucgucggcuccuccaaguacaaccgcaaguucaagcccgagaucgccgcccgccccaagguccgcggccaggccggccgcaugaacuacuacuggacccucaucgagcccggcgacaccaucaccuucgaggccaccggcaaccucgucgucccccgcuacgccuucgccaugaaccgcggcuccggcuccggcaucaucaucuccgacgcccccguccacgacugcaacaccaagugccagacccccaagggcgccaucaacaccucccuccccuuccagaacauccaccccgucaccaucggcgagugccccaaguacgucaaguccaccaagcuccgcauggccaccggccuccgcaacauccccuccauccagucccgcggccucuucggcgccaucgccggcuucaucgagggcggcuggaccggcaugaucgacggcugguacggcuaccaccaccagaacgagcagggcuccggcuacgccgccgaccagcgcuccacccagaacgccaucgacggcaucaccaacaaggucaacuccgucaucgagaagaugaacacccaguucaccgccgucggcaaggaguucaaccaccucgagaagcgcaucgagaaccucaacaagaaggucgacgacggcuuccucgacaucuggaccuacaacgccgagcuccucguccuccucgagaacgagcgcacccucgacuuccacgacuccaacgucaagaaccucuacgagaagguccgcucccagcuccgcaacaacgccaaggagaucggcaacggcugcuucgaguucuaccacaagugcgacgacaccugcauggaguccgucaagaacggcaccuacgacuaccccaaguacuccgaggaguccaagcucaaccgcgaggagaucgacggcgucaagcucgaguccacccgcaucuaccagauccucgccaucuacuccaccgucgccuccucccucguccuccucgucucccucggcgccaucuccuucuggaugugcuccaacggcucccuccagugccgcaucugcaucuga

SEQ ID NO: 106196 - RNA, 1701 nt, Artificial Sequence; identical to SEQ ID NO: 105131
  derived and/or modified CDS sequence (opt2) from hemagglutinin__InfluenzaA__AGQ47894

SEQ ID NO: 106197 - RNA, 1701 nt, Artificial Sequence
  derived and/or modified CDS sequence (opt2) from hemagglutinin__InfluenzaA__AGQ47906
augaagaccaucaucgcccucuccuacaucuucugccucgcccucggccaggaccuccccggcaacgacaacuccaccgccacccucugccucggccaccacgccguccccaacggcacccucgucaagaccaucaccgacgaccagaucgaggucaccaacgccaccgagcucguccaguccuccuccaccggcaagaucugcaacaacccccaccgcauccucgacggcaucgacugcacccucaucgacgcccuccucggcgacccccacugcgacgucuuccagaacgagaccugggaccucuucgucgagcgcuccaaggccuucuccaacugcuaccccuacgacguccccgacuacgccucccuccgcucccucgucgccuccuccggcacccucgaguucaucaccgagggcuucaccuggaccggcgucacccagaacggcggcuccaacgccugcaagcgcggccccggcuccggcuucuucucccgccucaacuggcucaccaaguccggcuccaccuaccccguccucaacgucaccaugcccaacaacgacaacuucgacaagcucuacaucuggggcauccaccaccccuccaccaaccaggagcagaccucccucuacguccaggccuccggccgcgucaccgucuccacccgccgcucccagcagaccaucauccccaacaucggcucccgccccuggguccgcggccucuccucccgcaucuccaucuacuggaccaucgucaagcccggcgacguccucgucaucaacuccaacggcaaccucaucgccccccgcggcuacuucaagaugcgcaccggcaaguccuccaucaugcgcuccgacgcccccaucgacaccugcaucuccgagugcaucacccccaacggcuccauccccaacgacaagcccuuccagaacgucaacaagaucaccuacggcgccugccccaaguacgucaagcagaacacccucaagcucgccaccggcaugcgcaacguccccgagaagcagacccgcggccucuucggcgccaucgccggcuucaucgagaacggcugggagggcaugaucgacggcugguacggcuuccgccaccagaacuccgagggcaccggccaggccgccgaccucaaguccacccaggccgccaucgaccagaucaacggcaagcucaaccgcgucaucgagaagaccaacgagaaguuccaccagaucgagaaggaguucuccgaggucgagggccgcauccaggaccucgagaaguacgucgaggacaccaagaucgaccucugguccuacaacgccgagcuccucgucgcccucgagaaccagcacaccaucgaccucaccgacuccgagaugaacaagcucuucgagaagacccgccgccagcuccgcgagaacgccgaggacaugggcaacggcugcuucaagaucuaccacaagugcgacaacgccugcaucgaguccauccgcaacggcaccuacgaccacgacgucuaccgcgacgaggcccucaacaaccgcuuccagaucaagggcgucgagcucaaguccggcuacaaggacuggauccucuggaucuccuucgccaucuccugcuuccuccucugcgucguccuccucggcuucaucaugugggccugccagcgcggcaacauccgcugcaacaucugcaucuga

SEQ ID NO: 106198 - RNA, 1701 nt, Artificial Sequence
  derived and/or modified CDS sequence (opt2) from hemagglutinin__InfluenzaA__AGQ47918
augaagaccaucaucgcccucuccuacaucuucugccucgcccucggccaggaccuccccggcaacgacaacaacaccgccacccucugccucggccaccacgccguccccaacggcacccucgucaagaccaucaccgacgaccagaucgaggucaccaacgccaccgagcucguccaguccuccuccaccggcaagaucugcaacaacccccaccgcauccucgacggcaucgacugcacccucaucgacgcccuccucggcgacccccacugcgacgucuuccagaacgagaccugggaccucuucgucgagcgcuccaaggccuucuccaacugcuaccccuacgacguccccgacuacgccucccuccgcucccucgucgccuccuccggcacccucgaguucaucaccgagggcuucaccuggaccggcgucacccagaacggcggcuccaacgccugcaagcgcggccccggcuccggcuucuucucccgccucaacuggcucaccaaguccggcuccaccuaccccguccucaacgucaccaugcccaacaacgacaacuucgacaagcucuacaucuggggcguccaccaccccuccaccaaccaggagcagaccucccucuacguccaggccuccggccgcgucaccgucuccacccgccgcucccagcagaccaucauccccaacaucggcucccgccccuggguccgcggccucuccucccgcaucuccaucuacuggaccaucgucaagcccggcgacguccucgucaucaacuccaacggcaaccucaucgccccccgcggcuacuucaagaugcgcaccggcaaguccuccaucaugcgcuccgacgcccccaucgacaccugcaucuccgagugcaucacccccaacggcuccauccccaacgacaagcccuuccagaacgucaacaagaucaccuacggcgccugccccaaguacgucaagcagaacacccucaagcucgccaccggcaugcgcaacguccccgagaagcagacccgcggccucuucggcgccaucgccggcuucaucgagaacggcugggagggcaugaucgacggcugguacggcuuccgccaccagaacuccgagggcaccggccaggccgccgaccucaaguccacccaggccgccaucgaccagaucaacggcaagcucaaccgcgucaucgagaagaccaacgagaaguuccaccagaucgagaaggaguucuccgaggucgagggccgcauccaggaccucgagaaguacgucgaggacaccaagaucgaccucugguccuacaacgccgagcuccucgucgcccucgagaaccagcacaccaucgaccucaccgacuccgagaugaacaagcucuucgagaagacccgccgccagcuccgcgagaacgccgaggacaugggcaacggcugcuucaagaucuaccacaagugcgacaacgccugcaucgaguccauccgcaacggcaccuacgaccacgacgucuaccgcgacgaggcccucaacaaccgcuuccagaucaagggcgucgagcucaaguccggcuacaaggacuggauccucuggaucuccuucgccaucuccugcuuccuccucugcgucguccuccucggcuucaucaugugggccugccagcgcggcaacauccgcugcaacaucugcaucuga

SEQ ID NO: 106199 - RNA, 1701 nt, Artificial Sequence
  derived and/or modified CDS sequence (opt2) from hemagglutinin__InfluenzaA__AGQ47930
augaaggccaaccuccucguccuccucugcgcccucgccgccgccgacgccgacaccaucugcaucggcuaccacgccaacaacuccaccgacaccgucgacaccgcccucgagaagaacgucaccgucacccacuccgucaaccuccucgaggacucccacaacggcaagcucugccgccucaagggcaucgccccccuccagcucggcaagugcaacaucgccggcuggcuccucggcaaccccgagugcgacccccuccuccccguccgcuccugguccuacaucgucgagacccccaacuccgagaacggcaucugcuaccccggcgacuucaucgacuacgaggagcuccgcgagcagcucuccuccgucuccuccuucgagcgcuucgagaucuuccccaaggaguccuccuggcccaaccacaacaccaacaagggcgucaccgccgccugcucccacgccggcaaguccuccuucuaccgcaaccuccucuggcucaccgagaaggagggcuccuaccccaagcucaagaacuccuacgucaacaagaagggcaaggagguccucguccucuggggcauccaccaccccuccaacuccaaggaccagcagaaccucuaccagaacgagaacgccuacgucuccgucgucaccuccaacuacaaccgccgcuucacccccgagaucgccgagcgccccaagguccgcgaccaggccggccgcaugaacuacuacuggacccuccucaagcccggcgacaccaucaucuucgaggccaacggcaaccucaucgcccccauguacgccuucgcccucucccgcggcuucggcuccggcaucaucaccuccaacgccuccaugcacgagugcaacaccaagugccagaccccccucggcgccaucaacuccucccuccccuuccagaacauccaccccgucaccaucggcgagugccccaaguacguccgcuccgccaagcuccgcauggucaccggccuccgcaacauccccuccauccagucccgcggccucuucggcgccaucgccggcuucaucgagggcggcuggaccggcaugaucgacggcugguacggcuaccaccaccagaacgagcagggcuccggcuacgccgccgaccagaaguccacccagaacgccaucaacggcaucaccaacaaggucaacuccgucaucgagaagaugaacauccaguucaccgccgucggcaaggaguucaacaagcucgagaagcgcauggagaaccucaacaagaaggucgacgacggcuuccucgacaucuggaccuacaacgccgagcuccucguccuccucgagaacgagcgcacccucgacuuccacgacuccaacgucaagaaccucuacgagaaggucaagucccagcucaagaacaacgccaaggagaucggcaacggcugcuucgaguucuaccacaagugcgacaacgagugcauggaguccguccgcaacggcaccuacgacuaccccaaguacuccgaggaguccaagcucaaccgcgagaaggucgacggcgucaagcucgaguccaugggcaucuaccagauccucgccaucuacuccaccgucgccuccucccucguccuccucgucucccucggcgccaucuccuucuggaugugcuccaacggcucccuccagugccgcaucugcaucuga

SEQ ID NO: 106200 - RNA, 1698 nt, Artificial Sequence; identical to SEQ ID NO: 99314
  derived and/or modified CDS sequence (opt2) from hemagglutinin__InfluenzaA__AGQ47942

SEQ ID NO: 106201 - RNA, 1698 nt, Artificial Sequence
  derived and/or modified CDS sequence (opt2) from hemagglutinin__InfluenzaA__AGQ47954
augaaggccaaccuccucguccuccucugcgcccucgccgccgccgacgccgacaccaucugcaucggcuaccacgccaacaacuccaccgacaccgucgacaccguccucgagaagaacgucaccgucacccacuccgucaaccuccucgaggacucccacaacggcaagcucugccgccucaagggcaucgccccccuccagcucggcaagugcaacaucgccggcuggcuccucggcaaccccgagugcgacccccuccuccccguccgcuccugguccuacaucgucgagacccccaacuccgagaacggcaucugcuaccccggcgacuucaucgacuacgaggagcuccgcgagcagcucuccuccgucuccuccuucgagcgcuucgagaucuuccccaaggaguccuccuggcccaaccacaacaccaacggcgucaccgccgccugcucccacgagggcaaguccuccuucuaccgcaaccuccucuggcucaccgagaaggagggcuccuaccccaagcucaagaacuccuacgucaacaagaagggcaaggagguccucguccucuggggcauccaccacccccccaacuccaaggagcagcagaaccucuaccgcaacgagaacgccuacgucuccgucgucaccuccaacuacaaccgccgcuucacccccgagaucgccgagcgccccaagguccgcgaccaggccggccgcaugaacuacuacuggacccuccucaagcccggcgacaccaucaucuucgaggccaacggcaaccucaucgcccccauguacgccuucgcccucucccgcggcuucggcuccggcaucaucaccuccaacgccuccaugcacgagugcaacaccaagugccagaccccccucggcgccaucaacuccucccuccccuaccagaacauccaccccgucaccaucggcgagugccccaaguacguccgcuccgccaagcuccgcauggucaccggccuccgcaacauccccuccauccagucccgcggccucuucggcgccaucgccggcuucaucgagggcggcuggaccggcaugaucgacggcugguacggcuaccaccaccagaacgagcagggcuccggcuacgccgccgaccagaaguccacccagaacgccaucaacggcaucaccaacaaggucaacaccgucaucgagaagaugaacauccaguucaccgccgucggcaaggaguucaacaagcucgagaagcgcauggagaaccucaacaagaaggucgacgacggcuuccucgacaucuggaccuacaacgccgagcuccucguccuccucgagaacgagcgcacccucgacuuccacgacuccaacgucaagaaccucuacgagaaggucaagucccagcucaagaacaacgccaaggagaucggcaacggcugcuucgaguucuaccacaagugcgacaacgagugcauggaguccguccgcaacggcaccuacgacuaccccaaguacuccgaggaguccaagcucaaccgcgagaaggucgacggcgucaagcucgaguccaugggcaucuaccagauccucgccaucuacuccaccgucgccuccucccucguccuccucgucucccucggcgccaucuccuucuggaugugcuccaacggcucccuccagugccgcaucugcaucuga

SEQ ID NO: 106202 - RNA, 1698 nt, Artificial Sequence
  derived and/or modified CDS sequence (opt2) from hemagglutinin__InfluenzaA__AGQ47966
augaaggccaaccuccucguccuccucugcgcccucgccgccgccgacgccgacaccaucugcaucggcuaccacgccaacaacuccaccgacaccgucgacaccguccucgagaagaacgucaccgucacccacuccgucaaccuccucgaggacucccacaacggcaagcucugccgccucaagggcaucgccccccuccagcucggcaagugcaacaucgccggcuggcuccucggcaaccccgagugcgacccccuccuccccgucggcuccugguccuacaucgucgagacccccaacuccgagaacggcaucugcuaccccggcgacuucaucgacuacgaggagcuccgcgagcagcucuccuccgucuccuccuucgagcgcuucgagaucuuccccaaggaguccuccuggcccgaccacaacaccaacggcgucaccgccgccugcucccacgagggcaagaacuccuucuaccgcaaccuccucuggcucaccgagaaggaguccuccuaccccaagcucaagaacuccuacgucaacaagaagggcaaggagguccucguccucuggggcauccaccacccccccaacuccaaggagcagcagaaccucuaccagaacgagaacgccuacgucuccgucgucaccuccaacuacaaccgccgcuucacccccgagaucgccgagcgccccaaggucaaggaccaggccggccgcaugaacuacuacuggacccuccucaagcccggcgacaccaucaucuucgaggccaacggcaaccucaucgcccccauguacgccuucgcccucucccgcggcuucggcuccggcaucaucaccuccaacgccuccaugcacgagugcaacaccaagugccagaccccccucggcgccaucaacuccucccuccccuaccagaacauccaccccgucaccaucggcgagugccccaaguacguccgcuccgccaagcuccgcauggucaccggccuccgcaacauccccuccauccagucccgcggccucuucggcgccaucgccggcuucaucgagggcggcuggaccggcaugaucgacggcugguacggcuaccaccaccagaacgagcagggcuccggcuacgccgccgaccagaaguccacccagaacgccaucaacggcaucaccaacaaggucaacaccgucaucgagaagaugaacauccaguucaccgccgucggcaaggaguucaacaagcucgagaagcgcauggagaaccucaacaagaaggucgacgacggcuuccucgacaucuggaccuacaacgccgagcuccucguccuccucgagaacgagcgcacccucgacuuccacgacuccaacgucaagaaccucuacgagaaggucaagucccagcucaagaacaacgccaaggagaucggcaacggcugcuucgaguucuaccacaagugcgacaacgagugcauggaguccguccgcaacggcaccuacgacuaccccaaguacuccgaggaguccaagcucaaccgcgagaaggucgacggcgucaagcucgaguccaugggcaucuaccagauccucgccaucuacuccaccgucgccuccucccucguccuccucgucucccucggcgccaucuccuucuggaugugcuccaacggcucccuccagugccgcaucugcaucuga

SEQ ID NO: 106203 - RNA, 1698 nt, Artificial Sequence
  derived and/or modified CDS sequence (opt2) from hemagglutinin__InfluenzaA__AGQ47978
augaaggccaaccuccucguccuccucugcgcccucgccgccgccgacgccgacaccaucugcaucggcuaccacgccaacaacuccaccgacaccgucgacaccguccucgagaagaacgucaccgucacccacuccgucaaccuccucgaggacucccacaacggcaagcucugccgccucaagggcaucgccccccuccagcucggcaagugcaacaucgccggcuggcuccucggcaaccccgagugcgacccccuccuccccgucggcuccugguccuacaucgucgagacccccaacuccgagaacggcaucugcuaccccggcgacuucaucgacuacgaggagcuccgcgagcagcucuccuccgucuccuccuucgagcgcuucgagaucuuccccaaggaguccuccuggcccgaccacaacaccaacggcgucaccgccgccugcucccacgagggcaagaacuccuucuaccgcaaccuccucuggcucaccaagaaggaguccuccuaccccgagcucaagaacuccuacgucaacaagaagggcaaggagguccucguccucuggggcauccaccacccccccaacuccaaggagcagcagaaccucuaccagaacgagaacgccuacgucuccgucgucaccuccaacuacaaccgccgcuucacccccgagaucgccgagcgccccaaggucaaggaccaggccggccgcaugaacuacuacuggacccuccucaagcccggcgacaccaucaucuucgaggccaacggcaaccucaucgcccccauguacgccuucgcccucucccgcggcuucggcuccggcaucaucaccuccaacgccuccaugcacgagugcaacaccaagugccagaccccccucggcgccaucaacuccucccuccccuaccagaacauccaccccgucaccaucggcgagugccccaaguacguccgcuccgccaagcuccgcauggucaccggccuccgcaacauccccuccauccagucccgcggccucuucggcgccaucgccggcuucaucgagggcggcuggaccggcaugaucgacggcugguacggcuaccaccaccagaacgagcagggcuccggcuacgccgccgaccagaaguccacccagaacgccaucaacggcaucaccaacaaggucaacaccgucaucgagaagaugaacauccaguucaccgccgucggcaaggaguucaacaagcucgagaagcgcauggagaaccucaacaagaaggucgacgacggcuuccucgacaucuggaccuacaacgccgagcuccucguccuccucgagaacgagcgcacccucgacuuccacgacuccaacgucaagaaccucuacgagaaggucaagucccagcucaagaacaacgccaaggagaucggcaacggcugcuucgaguucuaccacaagugcgacaacgagugcauggaguccguccgcaacggcaccuacgacuaccccaaguacuccgaggaguccaagcucaaccgcgagaaggucgacggcgucaagcucgaguccaugggcaucuaccagauccucgccaucuacuccaccgucgccuccucccucguccuccucgucucccucggcgccaucuccuucuggaugugcuccaacggcucccuccagugccgcaucugcaucuga

SEQ ID NO: 106204 - RNA, 1698 nt, Artificial Sequence
  derived and/or modified CDS sequence (opt2) from hemagglutinin__InfluenzaA__AGQ47990
augaaggccaaccuccucguccuccucugcgcccucgccgccgccgacgccgacaccaucugcaucggcuaccacgccaacaacuccaccgacaccgucgacaccguccucgagaagaacgucaccgucacccacuccgucaaccuccucgaggacucccacaacggcaagcucugccgccucaagggcaucgccccccuccagcucggcaagugcaacaucgccggcuggcuccucggcaaccccgagugcgacccccuccuccccgucggcuccugguccuacaucgucgagacccccaacuccgagaacggcaucugcuaccccggcgacuucaucgacuacgaggagcuccgcgagcagcucuccuccgucuccuccuucgagcgcuucaagaucuuccccaaggaguccuccuggcccgaccacaacaccaacggcgucaccgccgccugcucccacgagggcaagaacuccuucuaccgcaaccuccucuggcucaccaagaaggaguccuccuaccccgagcucaagaacuccuacgucaacaagaagggcaaggagguccucguccucuggggcauccaccacccccccaacuccaaggagcagcagaaccucuaccagaacgagaacgccuacgucuccgucgucaccuccaacuacaaccgccgcuucacccccgagaucgccgagcgccccaaggucaaggaccaggccggccgcaugaacuacuacuggacccuccucaagcccggcgacaccaucaucuucgaggccaacggcaaccucaucgcccccauguacgccuucgcccucucccgcggcuucggcuccggcaucaucaccuccaacgccuccaugcacgagugcaacaccaagugccagaccccccucggcgccaucaacuccucccuccccuaccagaacauccaccccgucaccaucggcgagugccccaaguacguccgcuccgccaagcuccgcauggucaccggccuccgcaacauccccuccauccagucccgcggccucuucggcgccaucgccggcuucaucgagggcggcuggaccggcaugaucgacggcugguacggcuaccaccaccagaacgagcagggcuccggcuacgccgccgaccagaaguccacccagaacgccaucaacggcaucaccaacaaggucaacaccgucaucgagaagaugaacauccaguucaccgccgucggcaaggaguucaacaagcucgagaagcgcauggagaaccucaacaagaaggucgacgacggcuuccucgacaucuggaccuacaacgccgagcuccucguccuccucgagaacgagcgcacccucgacuuccacgacuccaacgucaagaaccucuacgagaaggucaagucccagcucaagaacaacgccaaggagaucggcaacggcugcuucgaguucuaccacaagugcgacaacgagugcauggaguccguccgcaacggcaccuacgacuaccccaaguacuccgaggaguccaagcucaaccgcgagaaggucgacggcgucaagcucgaguccaugggcaucuaccagauccucgccaucuacuccaccgucgccuccucccucguccuccucgucucccucggcgccaucuccuucuggaugugcuccaacggcucccuccagugccgcaucugcaucuga

SEQ ID NO: 106205 - RNA, 1698 nt, Artificial Sequence
  derived and/or modified CDS sequence (opt2) from hemagglutinin__InfluenzaA__AGQ48002
augaaggccaaccuccucguccuccucugcgcccucgccgccgccgacgccgacaccaucugcaucggcuaccacgccaacaacuccaccgacaccgucgacaccguccucgagaagaacgucaccgucacccacuccgucaaccuccucgaggacucccacaacggcaagcucugccgccucaagggcaucgccccccuccagcucggcaagugcaacaucgccggcuggcuccucggcaaccccgagugcgacccccuccuccccgucggcuccugguccuacaucgucgagacccccaacuccgagaacggcaucugcuaccccggcgacuucaucgacuacgaggagcuccgcgagcagcucuccuccgucuccuccuucgagcgcuucaagaucuuccccaaggaguccuccuggcccgaccacaacaccaacggcgucaccgccgccugcucccacgagggcaagaacuccuucuaccgcaaccuccucuggcucaccaagaaggaguccuccuaccccgagcucaagaacuccuacgucaacaagaagcgcaaggagguccucguccucuggggcauccaccacccccccaacuccaaggagcagcagaaccucuaccagaacgagaacgccuacgucuccgucgucaccuccaacuacaaccgccgcuucacccccgagaucgccgagcgccccaaggucaaggaccaggccggccgcaugaacuacuacuggacccuccucaagcccggcgacaccaucaucuucgaggccaacggcaaccucaucgcccccauguacgccuucgcccucucccgcggcuucggcuccggcaucaucaccuccaacgccuccaugcacgagugcaacaccaagugccagaccccccucggcgccaucaacuccucccuccccuaccagaacauccaccccgucaccaucggcgagugccccaaguacguccgcuccgccaagcuccgcauggucaccggccuccgcaacauccccuccauccagucccgcggccucuucggcgccaucgccggcuucaucgagggcggcuggaccggcaugaucgacggcugguacggcuaccaccaccagaacgagcagggcuccggcuacgccgccgaccagaaguccacccagaacgccaucaacggcaucaccaacaaggucaacaccgucaucgagaagaugaacauccaguucaccgccgucggcaaggaguucaacaagcucgagaagcgcauggagaaccucaacaagaaggucgacgacggcuuccucgacaucuggaccuacaacgccgagcuccucguccuccucgagaacgagcgcacccucgacuuccacgacuccaacgucaagaaccucuacgagaaggucaagucccagcucaagaacaacgccaaggagaucggcaacggcugcuucgaguucuaccacaagugcgacaacgagugcauggaguccguccgcaacggcaccuacgacuaccccaaguacuccgaggaguccaagcucaaccgcgagaaggucgacggcgucaagcucgaguccaugggcaucuaccagauccucgccaucuacuccaccgucgccuccucccucguccuccucgucucccucggcgccaucuccuucuggaugugcuccaacggcucccuccagugccgcaucugcaucuga

SEQ ID NO: 106206 - RNA, 1698 nt, Artificial Sequence
  derived and/or modified CDS sequence (opt2) from hemagglutinin__InfluenzaA__AGQ48014
augaaggccaaccuccucguccuccucugcgcccucgccgccgccgacgccgacaccaucugcaucggcuaccacgccaacaacuccaccgacaccgucgacaccguccucgagaagaacgucaccgucacccacuccgucaaccuccucgaggacucccacaacggcaagcucugccgccucaagggcaucgccccccuccagcucggcaagugcaacaucgccggcuggcuccucggcaaccccggcugcgacccccuccuccccgucggcuccugguccuacaucgucgagacccccaacuccgagaacggcaucugcuaccccggcgacuucaucgacuacgaggagcuccgcgagcagcucuccuccgucuccuccuucgagcgcuucaagaucuuccccaaggaguccuccuggcccgaccacaacaccaacggcgucaccgccgccugcucccacgagggcaagaacuccuucuaccgcaaccuccucuggcucaccaagaaggaguccuccuaccccgagcucaagaacuccuacgucaacaagaagcgcaaggagguccucguccucuggggcauccaccacccccccaacuccaaggagcagcagaaccucuaccagaacgagaacgccuacgucuccgucgucaccuccaacuacaaccgccgcuucacccccgagaucgccgagcgccccaaggucaaggaccaggccggccgcaugaacuacuacuggacccuccucaagcccggcgacaccaucaucuucgaggccaacggcaaccucaucgcccccauguacgccuucgcccucucccgcggcuucggcuccggcaucaucaccuccaacgccuccaugcacgagugcaacaccaagugccagaccccccucggcgccaucaacuccucccuccccuaccagaacauccaccccgucaccaucggcgagugccccaaguacguccgcuccgccaagcuccgcauggucaccggccuccgcaacauccccuccauccagucccgcggccucuucggcgccaucgccggcuucaucgagggcggcuggaccggcaugaucgacggcugguacggcuaccaccaccagaacgagcagggcuccggcuacgccgccgaccagaaguccacccagaacgccaucaacggcaucaccaacaaggucaacaccgucaucgagaagaugaacauccaguucaccgccgucggcaaggaguucaacaagcucgagaagcgcauggagaaccucaacaagaaggucgacgacggcuuccucgacaucuggaccuacaacgccgagcuccucguccuccucgagaacgagcgcacccucgacuuccacgacuccaacgucaagaaccucuacgagaaggucaagucccagcucaagaacaacgccaaggagaucggcaacggcugcuucgaguucuaccacaagugcgacaacgagugcauggaguccguccgcaacggcaccuacgacuaccccaaguacuccgaggaguccaagcucaaccgcgagaaggucgacggcgucaagcucgaguccaugggcaucuaccagauccucgccaucuacuccaccgucgccuccucccucguccuccucgucucccucggcgccaucuccuucuggaugugcuccaacggcucccuccagugccgcaucugcaucuga

SEQ ID NO: 106207 - RNA, 1698 nt, Artificial Sequence
  derived and/or modified CDS sequence (opt2) from hemagglutinin__InfluenzaA__AGQ48026
augaaggccaaccuccucguccuccucugcgcccucgccgccgccgacgccgacaccaucugcaucggcuaccacgccaacaacuccaccgacaccgucgacaccguccucgagaagaacgucaccgucacccacuccgucaaccuccucgaggacucccacaacggcaagcucugcaagcucaagggcaucgccccccuccagcucggcaagugcaacaucgccggcuggcuccucggcaaccccggcugcgacccccuccuccccgucggcuccugguccuacaucgucgagacccccaacuccgagaacggcaucugcuaccccggcgacuucaucgacuacgaggagcuccgcgagcagcucuccuccgucuccuccuucgagcgcuucaagaucuuccccaaggaguccuccuggcccgaccacaacaccaacggcgucaccgccgccugcucccacgagggcaagaacuccuucuaccgcaaccuccucuggcucaccaagaaggaguccuccuaccccgagcucaagaacuccuacgucaacaagaagcgcaaggagguccucguccucuggggcauccaccacccccccaacuccaaggagcagcagaaccucuaccagaacgagaacgccuacgucuccgucgucaccuccaacuacaaccgccgcuucacccccgagaucgccgagcgccccaaggucaaggaccaggccggccgcaugaacuacuacuggacccuccucaagcccggcgacaccaucaucuucgaggccaacggcaaccucaucgcccccauguacgccuucgcccucucccgcggcuucggcuccggcaucaucaccuccaacgccuccaugcacgagugcaacaccaagugccagaccccccucggcgccaucaacuccucccuccccuaccagaacauccaccccgucaccaucggcgagugccccaaguacguccgcuccgccaagcuccgcauggucaccggccuccgcaacauccccuccauccagucccgcggccucuucggcgccaucgccggcuucaucgagggcggcuggaccggcaugaucgacggcugguacggcuaccaccaccagaacgagcagggcuccggcuacgccgccgaccagaaguccacccagaacgccaucaacggcaucaccaacaaggucaacaccgucaucgagaagaugaacauccaguucaccgccgucggcaaggaguucaacaagcucgagaagcgcauggagaaccucaacaagaaggucgacgacggcuuccucgacaucuggaccuacaacgccgagcuccucguccuccucgagaacgagcgcacccucgacuuccacgacuccaacgucaagaaccucuacgagaaggucaagucccagcucaagaacaacgccaaggagaucggcaacggcugcuucgaguucuaccacaagugcgacaacgagugcauggaguccguccgcaacggcaccuacgacuaccccaaguacuccgaggaguccaagcucaaccgcgagaaggucgacggcgucaagcucgaguccaugggcaucuaccagauccucgccaucuacuccaccgucgccuccucccucguccuccucgucucccucggcgccaucuccuucuggaugugcuccaacggcucccuccagugccgcaucugcaucuga

SEQ ID NO: 106208 - RNA, 1698 nt, Artificial Sequence
  derived and/or modified CDS sequence (opt2) from hemagglutinin__InfluenzaA__AGQ48038
augaaggccaaccuccucguccuccucugcgcccucgccgccgccgacgccgacaccaucugcaucggcuaccacgccaacaacuccaccgacaccgucgacaccguccucgagaagaacgucaccgucacccacuccgucaaccuccucgaggacucccacaacggcaagcucugcaagcucaagggcaucgccccccuccagcucggcaagugcaacaucgccggcuggcuccucggcaaccccggcugcgacccccuccuccccgucggcuccugguccuacaucgucgagacccccaacuccgagaacggcaucugcuaccccggcgacuucaucgacuacgaggagcuccgcgagcagcucuccuccgucuccuccuucgagcgcuucaagaucuuccccaaggaguccuccuggcccgaccacaacaccaacggcgucaccgccgccugcucccacgagggcaagaacuccuucuaccgcaaccuccucuggcucaccaagaaggaguccuccuaccccgagcucaagaacuccuacgucaacaagaagcgcgaggagguccucguccucuggggcauccaccacccccccaacuccgaggagcagcagaaccucuaccagaacgagaacgccuacgucuccgucgucaccuccaacuacaaccgccgcuucacccccgagaucgccgagcgccccaaggucaagggccaggccggccgcaugaacuacuacuggacccuccucaagcccggcgacaccaucaucuucgaggccaacggcaaccucaucgcccccauguacgccuucgcccucucccgcggcuucggcuccggcaucaucaccuccaacgccuccaugcacgagugcaacaccaagugccagaccccccucggcgccaucaacuccucccuccccuaccagaacauccaccccgucaccaucggcgagugccccaaguacguccgcuccgccaagcuccgcauggucaccggccuccgcaacauccccuccauccagucccgcggccucuucggcgccaucgccggcuucaucgagggcggcuggaccggcaugaucgacggcugguacggcuaccaccaccagaacgagcagggcuccggcuacgccgccgaccagaaguccacccagaacgccaucaacggcaucaccaacaaggucaacaccgucaucgagaagaugaacauccaguucaccgccgucggcaaggaguucaacaagcucgagaagcgcauggagaaccucaacaagaaggucgacgacggcuuccucgacaucuggaccuacaacgccgagcuccucguccuccucgagaacgagcgcacccucgacuuccacgacuccaacgucaagaaccucuacgagaaggucaagucccagcucaagaacaacgccaaggagaucggcaacggcugcuucgaguucuaccacaagugcgacaacgagugcauggaguccguccgcaacggcaccuacgacuaccccaaguacuccgaggaguccaagcucaaccgcgagaaggucgacggcgucaagcucgaguccaugggcaucuaccagauccucgccaucuacuccaccgucgccuccucccucguccuccucgucucccucggcgccaucuccuucuggaugugcuccaacggcucccuccagugccgcaucugcaucuga

SEQ ID NO: 106209 - RNA, 1698 nt, Artificial Sequence
  derived and/or modified CDS sequence (opt2) from hemagglutinin__InfluenzaA__AGQ48050
augaaggccaaccuccucguccuccucugcgcccucgccgccgccgacgccgacaccaucugcaucggcuaccacgccaacaacuccaccgacaccgucgacaccguccucgagaagaacgucaccgucacccacuccgucaaccuccucgaggacucccacaacggcaagcucugcaagcucaagggcaucgccccccuccagcucggcaagugcaacaucgccggcuggcuccucggcaaccccggcugcgacccccuccuccccgucggcuccugguccuacaucgucgagacccccaacuccgagaacggcaucugcuaccccggcgacuucaucgacuacgaggagcuccgcgagcagcucuccuccgucuccuccuucgagcgcuucaagaucuuccccaaggaguccuccuggcccgaccacaacaccaacggcgucaccgccgccugcucccacgagggcaagaacuccuucuaccgcaaccuccucuggcucaccaagaaggaguccuccuaccccgagcucaagaacuccuacgucaacaagaagcgcgaggagguccucguccucuggggcauccaccacccccccgacuccgaggagcagcagaaccucuaccagaacgagaacgccuacgucuccgucgucaccuccaacuacaaccgccgcuucacccccgagaucgccgagcgccccaaggucaagggccaggccggccgcaugaacuacuacuggacccuccucaagcccggcgacaccaucaucuucaaggccaacggcaaccucaucgcccccauguacgccuucgcccucucccgcggcuucggcuccggcaucaucaccuccaacgccuccaugcacgagugcaacaccaagugccagaccccccucggcgccaucaacuccucccuccccuaccagaacauccaccccgucaccaucggcgagugccccaaguacguccgcuccgccaagcuccgcauggucaccggccuccgcaacauccccuccauccagucccgcggccucuucggcgccaucgccggcuucaucgagggcggcuggaccggcaugaucgacggcugguacggcuaccaccaccagaacgagcagggcuccggcuacgccgccgaccagaaguccacccagaacgccaucaacggcaucaccaacaaggucaacaccgucaucgagaagaugaacauccaguucaccgccgucggcaaggaguucaacaagcucgagaagcgcauggagaaccucaacaagaaggucgacgacggcuuccucgacaucuggaccuacaacgccgagcuccucguccuccucgagaacgagcgcacccucgacuuccacgacuccaacgucaagaaccucuacgagaaggucaagucccagcucaagaacaacgccaaggagaucggcaacggcugcuucgaguucuaccacaagugcgacaacgagugcauggaguccguccgcaacggcaccuacgacuaccccaaguacuccgaggaguccaagcucaaccgcgagaaggucgacggcgucaagcucgaguccaugggcaucuaccagauccucgccaucuacuccaccgucgccuccucccucguccuccucgucucccucggcgccaucuccuucuggaugugcuccaacggcucccuccagugccgcaucugcaucuga

SEQ ID NO: 106210 - RNA, 1689 nt, Artificial Sequence
  derived and/or modified CDS sequence (opt2) from hemagglutinin__InfluenzaA__AGQ80946
auggccaucaucuaccucauccuccucuucaccgccguccgcggcgaccagaucugcaucggcuaccacuccaacaacuccaccgagaaggucgacaccauccucgagcgcaacgucaccgucacccacgcccaggacauccucgagaagacccacaacggcaagcucugcaagcucaacggcauccccccccucgagcucggcgacugcuccaucgccggcuggcuccucggcaaccccgagugcgaccgccuccucaccguccccgagugguccuacaucauggagaaggagaacccccgcaacggccucugcuaccccggcuccuucaacgacuacgaggagcucaagcaccuccucuccuccgucacccacuucgagaaggucaagauccuccccaaggaccgcuggacccagcacaccaccaccggcggcucccgcgccugcgccgucuccggcaaccccuccuucuuccgcaacauggucuggcucaccaagaagggccccaacuaccccgucgccaagggcuccuacaacaacaccuccggcgaccagaugcucaucaucuggggcguccaccaccccaacgacgaggccgagcagcgcacccucuaccagaacgucggcaccuacgucuccgucggcaccuccacccucaacaagcgcuccguccccgagaucgccacccgccccaaggucaacggccagggcggccgcauggaguucuccuggaccauccucgacguccucgacaccaucaacuucgaguccaccggcaaccucaucgcccccgaguacggcuucaagaucuccaagcgcggcuccuccggcaucaugaagaccgagggcacccucgagaacugcgagaccaagugccagaccccccucggcgccaucaacaccacccuccccuuccacaacauccacccccucaccaucggcgagugccccaaguacgucaaguccgagcgccucguccucgccaccggccuccgcaacgucccccagaucgagucccgcggccucuucggcgccaucgccggcuucaucgagggcggcuggcagggcauggucgacggcugguacggcuaccaccacuccaacgaccagggcuccggcuacgccgccgacaaggaguccacccagaaggccaucgacggcaucaccaacaaggucaacuccgucaucgagaagaugaacacccaguucgaggccgucggcaaggaguucuccaaccucgagaagcgccucgagaaccucaacaagaagauggaggacggcuuccucgacgucuggaccuacaacgccgagcuccucguccucauggagaacgagcgcacccucgacuuccacgacuccaacgucaagaaccucuacgacaagguccgcaugcagcuccgcgacaacgccaaggagcucggcaacggcugcuucgaguucuaccacaagugcgacgacgagugcaugaacuccgucaagaacggcaccuacgacuaccccaaguacgaggaggaguccaagcucaaccgcaacgagaucaagggcgucaagcucuccaacaugggcgucuaccagauccucgccaucuacgccaccgucgccggcucccucucccucgccaucaugaucgccggcaucucccucuggaugugcuccaacggcucccuccagugccgcaucugcaucuga

SEQ ID NO: 106211 - RNA, 1689 nt, Artificial Sequence
  derived and/or modified CDS sequence (opt2) from hemagglutinin__InfluenzaA__AGQ80947
auggccaucaucuaccucauccuccucuucgccaccguccgcggcgaccagaucugcaucggcuaccacuccaacaacuccaccgagaaggucgacaccauccucgagcgcaacaucaccgucacccacgcccaggacauccucgagaagacccacaacggcaagcucugcaagcucaacggcauccccccccucgagcucggcaacugcuccaucgccggcuggcuccucggcaaccccgagugcgaccgccuccucaccguccccgagugguccuacaucauggagaaggagaacccccgcgacggccucugcuaccccggcuccuucaacgacuacgaggagcucaagcaccuccucuccuccgucacccacuucgagaaggucaagauccuccccaaggaccgcuggacccagcacaccaccaccggcggcucccgcgccugcgccgucuccggcaaccccuccuucuuccgcaacauggucuggcucaccaagaagggcuccaacuaccccaucgccaagggcuccuacaacaacaccuccggcgagcagaugcucaucaucuggggcguccaccaccccaacgacgacgccgagcagcgcacccucuaccagaacgucggcaccuacgucuccgucggcaccuccacccucaacaagcgcuccauccccgagaucgccacccgccccaaggucaacggccagggcggccgcauggaguucuccuggaccauccucgacaugcucgacaccaucaacuucgaguccaccggcaaccucaucgcccccgaguacggcuucaagaucuccaagcgcggcuccuccggcaucaugaagaccgagggcacccucgagaacugcgagaccaagugccagaccccccucggcgccaucaacaccacccuccccuuccacaacauccacccccucaccaucggcgagugccccaaguacgucaaguccgagcgccucguccucgccaccggccuccgcaacgucccccagaucgagucccgcggccucuucggcgccaucgccggcuucaucgagggcggcuggcagggcauggucgacggcugguacggcuaccaccacuccaacgaccagggcuccggcuacgccgccgacaaggaguccacccagaaggccaucgacggcaucaccaacaaggucaacuccgucaucgagaagaugaacacccaguucgaggccgucggcaaggaguucaacaaccucgagaagcgccucgagaaccucaacaagaagauggaggacggcuuccucgacgucuggaccuacaacgccgagcuccucguccucauggagaacgagcgcacccucgacuuccacgacuccaacgucaagaaccucuacgacaagguccgcaugcagcucaaggacaacgccaaggagcucggcaacggcugcuucgaguucuaccacaagugcgacgacgagugcaugaacuccgucaagaacggcaccuacgacuaccccaaguacgaggaggaguccaagcucaaccgcaacgagaucaagggcgucaagcucuccaacaugggcgucuaccagauccucgccaucuacgccaccgucgccggcucccucucccucgccaucaugaucgccggcgucucccucuggaugugcuccaacggcucccuccagugccgcaucugcaucuga

SEQ ID NO: 106212 - RNA, 1689 nt, Artificial Sequence
  derived and/or modified CDS sequence (opt2) from hemagglutinin__InfluenzaA__AGQ80948
auggccaucaucuaccucauccuccucuucgccgccguccgcggcgaccagaucugcaucggcuaccacuccaacaacuccaccgagaaggucgacaccauccucgagcgcaacgucaccgucacccacgcccaggacauccucgagaagacccacaacggcaagcucugcaagcucaacggcauccccccccucgagcucggcaacugcuccaucgccggcuggcuccucggcaaccccgagugcgaccgccuccucaccguccccgagugguccuacaucauggagaaggagaacccccgcaacggccucugcuaccccggcuccuucaacgacuacgaggagcucaagcaccuccucuccuccgucacccacuucgagaaggucaagauccuccccaaggaccgcuggacccagcacaccaccaccggcggcucccgcgccugcgccgucuucggcaaccccuccuucuuccgcaacauggucuggcucaccaagaagggcuccaacuaccccaucgccaagggcuccuacaacaacaccuccggcgagcagaugcucaucaucuggggcguccaccaccccaacgacgacgccgagcagcgcacccucuaccagaacgucggcaccuacgucuccgucggcaccuccacccucaacaagcgcuccauccccgagaucgccacccgccccaaggucaacggccagggcggccgcauggaguucuccuggaccauccucgacaugcucgacaccaucaacuucgaguccaccggcaaccucaucgcccccgaguacggcuucaagaucuccaagcgcggcuccuccggcaucaugaagaccgagggcacccucgagaacugcgagaccaagugccagaccccccucggcgccaucaacaccacccuccccuuccacaacauccacccccucaccaucggcgagugccccaaguacgucaaguccgagcgccucguccucgccaccggccuccgcaacgucccccagaucgagucccgcggccucuucggcgccaucgccggcuucaucgagggcggcuggcagggcauggucgacggcugguacggcuaccaccacuccaacgaccagggcuccggcuacgccgccgacaaggaguccacccagaaggccaucgacggcaucaccaacaaggucaacuccgucaucgagaagaugaacacccaguucgaggccgucggcaaggaguucaacaaccucgagaagcgccucgagaaccucaacaagaagauggaggacggcuuccucgacgucuggaccuacaacgccgagcuccucguccucauggagaacgagcgcacccucgacuuccacgacuccaacgucaagaaccucuacgacaagauccgcaugcagcucaaggacaacgccaaggagcucggcaacggcugcuucgaguucuaccacaagugcgacgacgagugcaugaacuccgucaagaacggcaccuacgacuaccccaaguacgaggaggaguccaagcucaaccgcaacgagaucaagggcgucaagcucuccaacaugggcgucuaccagauccucgccaucuacgccaccgucgccggcucccucucccucgccaucaugaucgccggcaucucccucuggaugugcuccaacggcucccuccagugccgcaucugcaucuga

SEQ ID NO: 106213 - RNA, 1689 nt, Artificial Sequence
  derived and/or modified CDS sequence (opt2) from hemagglutinin__InfluenzaA__AGQ80949
auggccaucaucuaccucauccuccucuucgccgccguccgcggcgaccagaucugcaucggcuaccacuccaacaacuccaccgagaaggucgacaccauccucgagcgcaacgucaccgucacccacgcccaggacauccucgagaagacccacaacggcaagcucugcaagcucaacggcauccccccccucgagcucggcgacugcuccaucgccggcuggcuccucggcaaccccgagugcgaccgccuccucaccguccccgagugguccuacaucauggagaaggagaacccccgcaacggccucugcuaccccggcuccuucaacgacuacgaggagcucaagcaccuccucuccuccgucacccacuucgagaaggucaagauccuccccaaggaccgcuggacccagcacaccaccaccggcggcucccgcgccugcgccgucuccggcaaccccuccuucuuccgcaacauggucuggcucaccaagaagggcuccaacuaccccaucgccaagggcuccuacaacaacaccuccggcgagcagaugcucaucaucuggggcguccaccaccccaacgacgacgccgagcagcgcacccucuaccagaacgucggcaccuacgucuccgucggcaccuccacccucaacaagcgcuccauccccgagaucgccacccgccccaaggucaacggccagggcggccgcauggaguucuccuggaccauccucgacaugcucgacaccaucaacuucgaguccaccggcaaccucaucgcccccgaguacggcuucaagaucuccaagcgcggcuccuccggcaucaugaagaccgagggcacccucgagaacugcgagaccaagugccagaccccccucggcgccaucaacaccacccuccccuuccacaacauccacccccucaccaucggcgagugccccaaguacgucaaguccgagcgccucguccucgccaccggccuccgcaacgucccccagaucgagucccgcggccucuucggcgccaucgccggcuucaucgagggcggcuggcagggcauggucgacggcugguacggcuaccaccacuccaacgaccagggcuccggcuacgccgccgacaaggaguccacccagaaggccaucgacggcaucaccaacaaggucaacuccgucaucgagaagaugaacacccaguucgaggccgucggcaaggaguucaacaaccucgagaagcgccucgagaaccucaacaagaagauggaggacggcuuccucgacgucuggaccuacaacgccgagcuccucguccucauggagaacgagcgcacccucgacuuccacgacuccaacgucaagaaccucuacgacaagauccgcaugcagcucaaggacaacgccaaggagcucggcaacggcugcuucgaguucuaccacaagugcgacgacgagugcaugaacuccgucaagaacggcaccuacgacuaccccaaguacgaggaggaguccaagcucaaccgcaacgagaucaagggcgucaagcucuccaacaugggcgucuaccagauccucgccaucuacgccaccgucgccggcucccucucccucgccaucaugaucgccggcaucucccucuggaugugcuccaacggcucccuccagugccgcaucugcaucuga

SEQ ID NO: 106214 - RNA, 1701 nt, Artificial Sequence
  derived and/or modified CDS sequence (opt2) from hemagglutinin__InfluenzaA__AGQ80950
augaagaccaucaucgcccucuccuacaucuucugccucgccuucggccagaaccuccccggcaacgacuccuccaccgccacccucugccucggccaccacgccguccucaacggcaccaucgucaagaccaucaccgacgaccagaucgaggucaccaacgccaccgagcucguccaguccuccuccaccggcaagaucugcaacaacccccacaagauccucgacggccgcgacugcacccucaucgacgcccuccucggcgacccccacugcgacgucuuccaggacgagaccugggaccucuucgucgagcgcuccuccgccuucuccaacugcuaccccuacgacguccccgacuacgccucccuccgcucccucgucgccuccuccggcacccucgaguucaucaccgagggcuucaccuggaccggcgucucccagaacggcggcuccggcgccugcaagcgcggccccgccaacggcuucuucucccgccucaacuggcucaccaaguccggcaacgccuaccccguccucaacgucaccaugcccaacuccgacaacuucgacaagcucuacaucuggggcguccaccaccccuccaccaaccaggagcagaccaaccucuacguccaggccuccggccgcgucaccgucuccacccgccgcucccagcagaccaucauccccaacaucggcucccgccccuggguccgcggccaguccggccgcaucuccaucuacuggaccaucgucaagcccggcgacguccucgucaucaacuccaacggcaaccucaucgccccccgcggcuacuucaagaugcgcaccggcaaguccuccaucaugcgcuccgacgcccccaucgagaccugcaucuccgagugcaucacccccaacggcuccauccccaacgacaagcccuuccagaacgucaacaagaucaccuacggcgccugccccaaguacgucaagcagaacacccucaagcucgccaccggcaugcgcaacguccccgagaagcagacccgcggccucuucggcgccaucgccggcuucaucgagaacggcugggagggcaugaucgacggcugguacggcuuccgccaccagaacuccgagggcaccggccaggccgccgaccucaaguccacccaggccgccaucgaccagaucaacggcaagcucaaccgcgucaucgagaagaccaacgagaaguuccaccagaucgagaaggaguucuccgaggucgagggccgcauccaggaccucgagaaguacgucgaggacaccaagaucgaccucugguccuacaacgccgagcuccucgucgcccucgagaaccagcacaccaucgaccucaccgacuccgagaugaacaagcucuucgagaagacccgccgccagcuccgcgagaacgccgaggacaugggcaacggcugcuucaagaucuaccacaagugcgacaacgccugcaucgaguccauccgcaacggcaccuacgaccacgacaucuaccgcgacgaggcccucaacaaccgcuuccagaucaagggcgucgagcucaaguccggcuacaaggacuggauccucuggaucuccuucgccaucuccugcuuccuccucugcgucguccuccucggcuucaucaugugggccugccagcgcggcaacauccgcugcaacaucugcaucuga

SEQ ID NO: 106215 - RNA, 1695 nt, Artificial Sequence
  derived and/or modified CDS sequence (opt2) from hemagglutinin__InfluenzaA__AGQ80951
augcucuccaucgucauccucuuccuccucgucgccgaguccuccucccagaacuacaccggcaaccccgucaucugcaugggccaccacgccgucgccaacggcaccauggucaagacccucaccgacgaccaggucgaggucgucaccgcccaggagcucgucgagucccagaaccuccccgagcucugccccuccccccuccgccucgucgacggccagaccugcgacaucaucaacggcgcccucggcucccccggcugcgaccaccucaacggcgccgagugggacaucuucaucgagcgccccaacgccauggacaccugcuaccccuucgacguccccgacuaccagucccuccgcuccauccucgccaacaacggcaaguucgaguucaucgccgaggaguuccagugguccaccgucaagcagaacggcaaguccggcgccugcaagcgcgccaacgucaacgacuucuucaaccgccucaacuggcucgucaaguccgacggcaacgccuacccccuccagaaccucaccaaggucaacaacggcgacuacgcccgccucuacaucuggggcguccaccaccccuccaccgacaccgagcagaccaaccucuacaagaacaaccccggccgcgucaccgucuccaccaagaccucccagaccuccgucguccccaacaucggcucccgccccuggguccgcggccaguccggccgcaucuccuucuacuggaccaucgucgagcccggcgaccucaucgucuucaacaccaucggcaaccucaucgccccccgcggccacuacaagcucaacucccagaagaaguccaccauccucaacaccgccacccccaucggcuccugcgucuccaagugccacaccgacaagggcucccucuccaccaccaagcccuuccagaacaucucccgcgucgccaucggcgacugccccaaguacgucaagcagggcucccucaagcucgccaccggcaugcgcaacauccccgagaaggccucccgcggccucuucggcgccaucgccggcuucaucgagaacggcuggcagggccucaucgacggcugguacggcuuccgccaccagaacgccgagggcaccggcaccgccgccgaccucaaguccacccaggccgccaucgaccagaucaacggcaagcucaaccgccucaucgagaagaccaacgagaaguaccaccagaucgagaaggaguucgagcaggucgagggccgcauccaggaccucgagaaguacgucgaggacaccaagaucgaccucugguccuacaacgccgagcuccucgucgcccucgagaaccagcacaccaucgacgucaccgacuccgagaugaacaagcucuucgagcgcguccgccgccagcuccgcgagaacgccgaggacaagggcaacggcugcuucgagaucuuccacaagugcgacaacaacugcaucgaguccauccgcaacggcaccuacgaccacgacgucuaccgcaacgaggccaucaacaaccgcuuccagauccagggcgucaagcucacccagggcuacaaggacaucauccucuggaucuccuucuccaucuccugcuuccuccucgucgcccuccuccucgccuucauccucugggccugccagaacggcaacauccgcugccagaucugcaucuga

SEQ ID NO: 106216 - RNA, 1683 nt, Artificial Sequence
  derived and/or modified CDS sequence (opt2) from hemagglutinin__InfluenzaA__AGQ80953
augaacacccagauccucgucuucgcccucgucgccaucauccccaccaacgccgacaagaucugccucggccaccacgccgucuccaacggcaccaaggucaacacccucaccgagcgcggcgucgaggucgucaacgccaccgagaccgucgagcgcaccuccaucccccgcaucugcuccaagggcaagcgcgccgucgaccucggccagugcggccuccucggcaccaucaccggccccccccagugcgaccaguuccucgaguucuccgccgaccucaucaucgagcgccgcgagggcuccgacgucugcuaccccggcaaguucgucaacgaggaggcccuccgccagauccuccgcgaguccggcggcaucgacaaggagaccaugggcuucaccuacuccggcauccgcaccaacggcgccaccuccgccugccgccgcuccggcuccuccuucuacgccgagaugaaguggcuccucuccaacaccgacaacgccgccuucccccagaccaccaaguccuacaagaacacccgcaaggaccccgcccucaucaucuggggcauccaccacuccggcuccaccaccgagcagaccaagcucuacggcuccggcaacaagcucaucaccgucggcuccuccaacuaccagcaguccuucguccccucccccggcgcccgcccccaggucaacggccaguccggccgcaucgacuuccacuggcucaugcucaaccccaacgacaccgucaccuucuccuucaacggcgccuucaucgcccccgaccgcgccuccuuccuccgcggcaaguccaugggcauccaguccggcguccaggucgacgccaacugcgagggcgacugcuaccacaacggcggcaccaucaucuccaaccuccccuuccagaacaucaacucccgcgccgucggcaagugcccccgcuacgucaagcaggagucccuccuccucgccaccggcaugaagaacguccccgagauccccaagggccgcggccucuucggcgccaucgccggcuucaucgagaacggcugggagggccucaucgacggcugguacggcuuccgccaccagaacgcccagggcgagggcaccgccgccgacuacaaguccacccaguccgccaucgaccagaucaccggcaagcucaaccgccucaucgagaagaccaaccagcaguucgagcucaucgacaacgaguucaccgaggucgagcgccagaucggcaacgucaucaacuggacccgcgacuccaugaccgaggucugguccuacaacgccgagcuccucgucgccauggagaaccagcacaccaucgaccucgccgacuccgagaugaacaagcucuacgagcgcguccgccgccagcuccgcgagaacgccgaggaggacggcaccggcugcuucgagaucuuccacaagugcgacgacgacugcauggccuccauccgcaacaacaccuacgaccacuccaaguaccgcgaggaggccaugcagaaccgcauccagaucgaccccgucaagcucuccuccggcuacaaggacgucauccucugguucuccuucggcgccuccugcuucauccuccucgccaucgccaugggccucgucuucaucugcgucaagaacggcaacaugcgcugcaccaucugcaucuga

SEQ ID NO: 106217 - RNA, 1683 nt, Artificial Sequence; identical to SEQ ID NO: 106216
  derived and/or modified CDS sequence (opt2) from hemagglutinin__InfluenzaA__AGQ80954

SEQ ID NO: 106218 - RNA, 1683 nt, Artificial Sequence; identical to SEQ ID NO: 106216
  derived and/or modified CDS sequence (opt2) from hemagglutinin__InfluenzaA__AGQ80955

SEQ ID NO: 106219 - RNA, 1683 nt, Artificial Sequence; identical to SEQ ID NO: 106216
  derived and/or modified CDS sequence (opt2) from hemagglutinin__InfluenzaA__AGQ80956

SEQ ID NO: 106220 - RNA, 1683 nt, Artificial Sequence; identical to SEQ ID NO: 106216
  derived and/or modified CDS sequence (opt2) from hemagglutinin__InfluenzaA__AGQ80957

SEQ ID NO: 106221 - RNA, 1683 nt, Artificial Sequence; identical to SEQ ID NO: 106216
  derived and/or modified CDS sequence (opt2) from hemagglutinin__InfluenzaA__AGQ80958

SEQ ID NO: 106222 - RNA, 1683 nt, Artificial Sequence
  derived and/or modified CDS sequence (opt2) from hemagglutinin__InfluenzaA__AGQ80959
augaacacccagauccucgucuucgcccucaucgccaucauccccaccaacgccgacaagaucugccucggccaccacgccgucuccaacggcaccaaggucaacacccucaccgagcgcggcgucgaggucgucaacgccaccgagaccgucgagcgcaccaacaucccccgcaucugcuccaagggcaagcgcaccgucgaccucggccagugcggccuccucggcaccaucaccggccccccccagugcgaccaguuccucgaguucuccgccgaccucaucaucgagcgccgcgagggcuccgacgucugcuaccccggcaaguucgucaacgaggaggcccuccgccagauccuccgcgaguccggcggcaucgacaaggaggccaugggcuucaccuacuccggcauccgcaccaacggcgccaccuccgccugccgccgcuccggcuccuccuucuacgccgagaugaaguggcuccucuccaacaccgacaacgccgccuucccccagaugaccaaguccuacaagaacacccgcaaggaccccgcccucaucaucuggggcauccaccacuccggcuccaccgccgagcagaccaagcucuacggcuccggcaacaagcucgucaccgucggcuccuccaacuaccagcaguccuucguccccucccccggcgcccgcccccaggucaacggccaguccggccgcaucgacuuccacuggcucaugcucaaccccaacgacaccgucaccuucuccuucaacggcgccuucaucgcccccgaccgcgccuccuuccuccgcggcaaguccaugggcauccaguccggcguccaggucgacgccaacugcgagggcgacugcuaccacggcggcggcaccaucaucuccaaccuccccuuccagaacaucgacucccgcgccgucggcaagugcccccgcuacgucaagcagaagucccuccuccucgccaccggcaugaagaacguccccgagucccccaagggccgcggccucuucggcgccaucgccggcuucaucgagaacggcugggagggccucaucgacggcugguacggcuuccgccaccagaacgcccagggcgagggcaccgccgccgacuacaaguccacccaguccgccaucgaccagaucaccggcaagcucaaccgccucaucgagaagaccaaccagcaguucgagcucaucgacaacgaguucaccgaggucgagaagcagaucggcaacgucaucaacuggacccgcgacuccaucaccgaggucugguccuacaacgccgagcuccucgucgccauggagaaccagcacaccaucgaccucgccgacuccgagaugaacaagcucuacgagcgcgucaagcgccagcuccgcgagaacgccgaggaggacggcaccggcugcuucgagaucuuccacaagugcgacgacgacugcauggccuccauccgcaacaacaccuacgaccacuccaaguaccgcgaggaggccaugcagaaccgcauccagaucgaccccgucaagcucuccuccggcuacaaggacgucauccucugguucuccuucggcgccuccugcuucauccuccucgccaucgccaugggccucgucuucaucugcgucaagaacggcaacaugcgcugcaccaucugcaucuga

SEQ ID NO: 106223 - RNA, 1683 nt, Artificial Sequence
  derived and/or modified CDS sequence (opt2) from hemagglutinin__InfluenzaA__AGQ80961
augaacacccagauccucgucuucgcccucgucgccaucauccccaccaacgccgacaagaucugccucggccaccacgccgucuccaacggcaccaaggucaacacccucaccgagcgcggcgucgaggucgucaacgccaccgagaccgucgagcgcaccaacguccccaagaucugcuccaagggcaagcgcaccgucgaccucggccagugcggccuccucggcaccaucaccggccccccccagugcgaccaguuccucgaguucuccgccgaccucaucaucgagcgccgcgagggcuccgacgucugcuaccccggcaaguucgucaacgaggagacccuccgccagauccuccgcgaguccggcggcaucgacaaggagaccaugggcuucaccuacuccggcauccgcaccaacggcgccaccuccgccugccgccgcuccggcuccuccuucuacgccgagaugaaguggcuccucuccaacaccgacaacgccgccuucccccagaugaccaaguccuacaagaacgcccgcaaggaccccgcccucaucaucuggggcauccaccacuccggcuccaccaccgagcagaccaagcucuacggcuccggcaacaagcucaucaccgucggcuccuccaacuaccagcaguccuucguccccucccccggcgcccgcccccaggucaacggccaguccggccgcaucgacuuccacuggcucaugcucaaccccaacgacaccgucaccuucuccuucaacggcgccuucaucgcccccgaccgcgccugcuuccuccgcggcaaguccaugggcauccaguccggcguccaggucgacgccuccugcgagggcgacugcuaccacuccggcggcaccaucaucuccaaccuccccuuccagaacaucaacucccgcgccgucggcaagugcccccgcuacgucaagcaggagucccucaugcucgccaccggcaugaagaacguccccgagauccccaagggccgcggccucuucggcgccaucgccggcuucaucgagaacggcugggagggccucaucgacggcugguacggcuuccgccaccagaacgcccagggcgagggcaccgccgccgacuacaaguccacccaguccgccaucgaccagaucaccggcaagcucaaccgccucaucgagaagaccaaccagcaguucgagcucaucgacaacgaguucaccgaggucgagaagcagaucggcaacgucaucaacuggacccgcgacuccaugaccgaggucugguccuacaacgccgagcuccucgucgccauggagaaccagcacaccaucgaccucgccgacuccgagaugaacaagcucuacgagcgcgucaagcgccagcuccgcgagaacgccgaggaggacggcaccggcugcuucgagaucuuccacaagugcgacgacgacugcauggccuccauccgcaacaacaccuacgaccacuccaaguaccgcgaggaggccaugcagaaccgcaucaagaucgaccccgucaagcucuccuccggcuacaaggacgucauccucugguucuccuucggcgccuccugcuucauccuccucgccaucgccaugggccucgucuucaucugcgucaagaacggcaacaugcgcugcaccaucugcaucuga

SEQ ID NO: 106224 - RNA, 1683 nt, Artificial Sequence; identical to SEQ ID NO: 106223
  derived and/or modified CDS sequence (opt2) from hemagglutinin__InfluenzaA__AGQ80962

SEQ ID NO: 106225 - RNA, 1683 nt, Artificial Sequence
  derived and/or modified CDS sequence (opt2) from hemagglutinin__InfluenzaA__AGQ80964
augaacacccagauccucgucuucgcccucaucgccaucauccccaccaacgccgacaagaucugccucggccaccacgccgucuccaacggcaccaaggucaacacccucaccgagcgcggcgucgaggucgucaacgccaccgagaccgucgagcgcaccaacaucccccgcaucugcuccaagggcaagcgcaccgucgaccucggccagugcggccuccucggcaccaucaccggccccccccagugcgaccaguuccucgaguucuccgccgaccucaucaucgagcgccgcgagggcuccgacgucugcuaccccggcaaguucgucaacgaggaggcccuccgccagauccuccgcgaguccggcggcaucgacaaggaggccaugggcuucaccuacuccggcauccgcaccaacggcgccaccuccgccugccgccgcuccggcuccuccuucuacgccgagaugaaguggcuccucuccaacaccgacaacgccgccuucccccagaugaccaaguccuacaagaacacccgcaaggaccccgcccucaucaucuggggcauccaccacuccggcuccaccgccgagcagaccaagcucuacggcuccggcaacaagcucgucaccgucggcuccuccaacuaccagcaguccuucguccccucccccggcgcccgcccccaggucaacggccaguccggccgcaucgacuuccacuggcucaugcucaaccccaacgacaccgucaccuucuccuucaacggcgccuucaucgcccccgaccgcgccuccuuccuccgcggcaaguccaugggcauccaguccggcguccaggucgacgccgacugcgagggcgacugcuaccacuccggcggcaccaucaucuccaaccuccccuuccagaacaucgacucccgcgccgucggcaagugcccccgcuacgucaagcagcgcucccuccuccucgccaccggcaugaagaacguccccgagauccccaagggccgcggccucuucggcgccaucgccggcuucaucgagaacggcugggagggccucaucgacggcugguacggcuuccgccaccagaacgcccagggcgagggcaccgccgccgacuacaaguccacccaguccgccaucgaccagaucaccggcaagcucaaccgccucaucgagaagaccaaccagcaguucgagcucaucgacaacgaguucaccgaggucgagaagcagaucggcaacgucaucaacuggacccgcgacuccaucaccgaggucugguccuacaacgccgagcuccucgucgccauggagaaccagcacaccaucgaccucgccgacuccgagaugaacaagcucuacgagcgcgucaagcgccagcuccgcgagaacgccgaggaggacggcaccggcugcuucgagaucuuccacaagugcgacgacgacugcauggccuccauccgcaacaacaccuacgaccacuccaaguaccgcgaggaggccaugcagaaccgcauccagaucgaccccgucaagcucuccuccggcuacaaggacgucauccucugguucuccuucggcgccuccugcuucauccuccucgccaucgccaugggccucgucuucaucugcgucaagaacggcaacaugcgcugcaccaucugcaucuga

SEQ ID NO: 106226 - RNA, 1683 nt, Artificial Sequence; identical to SEQ ID NO: 106216
  derived and/or modified CDS sequence (opt2) from hemagglutinin__InfluenzaA__AGQ80965

SEQ ID NO: 106227 - RNA, 1683 nt, Artificial Sequence; identical to SEQ ID NO: 106216
  derived and/or modified CDS sequence (opt2) from hemagglutinin__InfluenzaA__AGQ80966

SEQ ID NO: 106228 - RNA, 1683 nt, Artificial Sequence; identical to SEQ ID NO: 106216
  derived and/or modified CDS sequence (opt2) from hemagglutinin__InfluenzaA__AGQ80968

SEQ ID NO: 106229 - RNA, 1683 nt, Artificial Sequence
  derived and/or modified CDS sequence (opt2) from hemagglutinin__InfluenzaA__AGQ80970
augaacacccagauccucgucuucgcccucgucgccaucauccccaccaacgccgacaagaucugccucggccaccacgccgucuccaacggcaccaaggucaacacccucaccgagcgcggcgucgaggucgucaacgccaccgagaccgucgagcgcaccuccaucccccgcaucugcuccaagggcaagaaggccgucgaccucggccagugcggccuccucggcaccaucaccggccccccccagugcgaccaguuccucgaguucuccgccgaccucaucaucgagcgccgcgagggcuccgacgucugcuaccccggcaaguucgucaacgaggaggcccuccgccagauccuccgcgaguccggcggcaucgacaaggagaccaugggcuucaccuacuccggcauccgcaccaacggcgccaccuccgccugccgccgcuccggcuccuccuucuacgccgagaugaaguggcuccucuccaacaccgacaacgccgccuucccccagaccaccaaguccuacaagaacacccgcaaggaccccgcccucaucaucuggggcauccaccacuccggcuccaccaccgagcagaccaagcucuacggcuccggcaacaagcucaucaccgucggcuccuccaacuaccagcaguccuucguccccucccccggcgcccgcccccaggucaacggccaguccggccgcaucgacuuccacuggcucaugcucaaccccaacgacaccgucaccuucuccuucaacggcgccuucaucgcccccgaccgcgccuccuuccuccgcggcaaguccaugggcauccaguccggcguccaggucgacgccaacugcgagggcgacugcuaccacaacggcggcaccaucaucuccaaccuccccuuccagaacaucaacucccgcgccgucggcaagugcccccgcuacgucaagcaggagucccuccuccucgccaccggcaugaagaacguccccgagauccccaagggccgcggccucuucggcgccaucgccggcuucaucgagaacggcugggagggccucaucgacggcugguacggcuuccgccaccagaacgcccagggcgagggcaccgccgccgacuacaaguccacccaguccgccaucgaccagaucaccggcaagcucaaccgccucaucgagaagaccaaccagcaguucgagcucaucgacaacgaguucaccgaggucgagcgccagaucggcaacgucaucaacuggacccgcgacuccaugaccgaggucugguccuacaacgccgagcuccucgucgccauggagaaccagcacaccaucgaccucgccgacuccgagaugaacaagcucuacgagcgcguccgccgccagcuccgcgagaacgccgaggaggacggcaccggcugcuucgagaucuuccacaagugcgacgacgacugcauggccuccauccgcaacaacaccuacgaccacuccaaguaccgcgaggaggccaugcagaaccgcauccagaucgaccccgucaagcucuccuccggcuacaaggacgucauccucugguucuccuucggcgccuccugcuucauccuccucgccaucgccaugggccucgucuucaucugcgucaagaacggcaacaugcgcugcaccaucugcaucuga

SEQ ID NO: 106230 - RNA, 1683 nt, Artificial Sequence
  derived and/or modified CDS sequence (opt2) from hemagglutinin__InfluenzaA__AGQ80971
augaacacccagauccucgucuucgcccucgucgccaucauccccaccaacgccgacaagaucugccucggccaccacgccgucuccaacggcaccaaggucaacacccucaccgagcgcggcgucgaggucgucaacgccaccgagaccgucgagcgcaccuccaucccccgcaucugcuccaagggcaagaagaccgucgaccucggccagugcggccuccucggcaccaucaccggccccccccagugcgaccaguuccucgaguucuccgccgaccucaucaucgagcgccgcgagggcuccgacgucugcuaccccggcaaguucgucaacgaggaggcccuccgccagauccuccgcgaguccggcggcaucgacaaggagaccaugggcuucaccuacuccggcauccgcaccaacggcgccaccuccgccugccgccgcuccggcuccuccuucuacgccgagaugaaguggcuccucuccaacaccgacaacgccgccuucccccagaccaccaaguccuacaagaacacccgcaaggaccccgcccucaucaucuggggcauccaccacuccggcuccaccaccgagcagaccaagcucuacggcuccggcaacaagcucaucaccgucggcuccuccaacuaccagcaguccuucguccccucccccggcgcccgcccccaggucaacggccaguccggccgcaucgacuuccacuggcucaugcucaaccccaacgacaccgucaccuucuccuucaacggcgccuucaucgcccccgaccgcgccuccuuccuccgcggcaaguccaugggcauccaguccggcguccaggucgacgccaacugcgagggcgacugcuaccacaacggcggcaccaucaucuccaaccuccccuuccagaacaucaacucccgcgccgucggcaagugcccccgcuacgucaagcaggagucccuccuccucgccaccggcaugaagaacguccccgagauccccaagggccgcggccucuucggcgccaucgccggcuucaucgagaacggcugggagggccucaucgacggcugguacggcuuccgccaccagaacgcccagggcgagggcaccgccgccgacuacaaguccacccaguccgccaucgaccagaucaccggcaagcucaaccgccucaucgagaagaccaaccagcaguucgagcucaucgacaacgaguucaccgaggucgagcgccagaucggcaacgucaucaacuggacccgcgacuccaugaccgaggucugguccuacaacgccgagcuccucgucgccauggagaaccagcacaccaucgaccucgccgacuccgagaugaacaagcucuacgagcgcguccgccgccagcuccgcgagaacgccgaggaggacggcaccggcugcuucgagaucuuccacaagugcgacgacgacugcauggccuccauccgcaacaacaccuacgaccacuccaaguaccgcgaggaggccaugcagaaccgcauccagaucgaccccgucaagcucuccuccggcuacaaggacgucauccucugguucuccuucggcgccuccugcuucauccuccucgccaucgccaugggccucgucuucaucugcgucaagaacggcaacaugcgcugcaccaucugcaucuga

SEQ ID NO: 106231 - RNA, 1683 nt, Artificial Sequence
  derived and/or modified CDS sequence (opt2) from hemagglutinin__InfluenzaA__AGQ80974
augaacacccagauccucgucuucgcccucgucgccaucauccccaccaacgccgacaagaucugccucggccaccacgccgucuccaacggcaccaaggucaacacccucaccgagcgcggcgucgaggucgucaacgccaccgagaccgucgagcgcaccuccaucccccgcaucugcuccaagggcaagcgcgccgucgaccucggccagugcggccuccucggcaccaucaccggccccccccagugcgaccaguuccucgaguucuccgccgaccucaucaucgagcgccgcgagggcuccgacgucugcuaccccggcaaguucgucaacgaggaggcccuccgccagauccuccgcgaguccggcggcaucgacaaggagaccaugggcuucaccuacuccggcauccgcaccaacggcgccaccuccgccugccgccgcuccggcuccuccuucuacgccgagaugaaguggcuccucuccaacaccgacaacgccgccuucccccagaccaccaaguccuacaagaacacccgcaaggaccccgcccucaucaucuggggcauccaccacuccggcuccaccaccgagcagaccaagcucuacggcuccggcaacaagcucaucaccgucggcuccuccaacuaccagcaguccuucguccccucccccggcgcccgcccccaggucaacggccaguccggccgcaucgacuuccacuggcucaugcucaaccccaacgacaccgucaccuucuccuucaacggcgccuucaucgcccccgaccgcgccuccuuccuccgcggcaaguccaugggcauccaguccggcguccaggucgacgccaacugcgagggcgacugcuaccacaacggcggcaccaucaucuccaaccuccccuuccagaacaucaacucccgcgccgucggcaagugcccccgcuacgucaagcaggagucccuccuccucgccaccggcaugaagaacguccccgagauccccaagggccgcggccucuucggcgccaucgccggcuucaucgagaacggcugggagggccucgucgacggcugguacggcuuccgccaccagaacgcccagggcgagggcaccgccgccgacuacaaguccacccaguccgccaucgaccagaucaccggcaagcucaaccgccucaucgagaagaccaaccagcaguucgagcucaucgacaacgaguucaccgaggucgagcgccagaucggcaacgucaucaacuggacccgcgacuccaugaccgaggucugguccuacaacgccgagcuccucgucgccauggagaaccagcacaccaucgaccucgccgacuccgagaugaacaagcucuacgagcgcguccgccgccagcuccgcgagaacgccgaggaggacggcaccggcugcuucgagaucuuccacaagugcgacgacgacugcauggccuccauccgcaacaacaccuacgaccacuccaaguaccgcgaggaggccaugcagaaccgcauccagaucgaccccgucaagcucuccuccggcuacaaggacgucauccucugguucuccuucggcgccuccugcuucauccuccucgccaucgccaugggccucgucuucaucugcgucaagaacggcaacaugcgcugcaccaucugcaucuga

SEQ ID NO: 106232 - RNA, 1683 nt, Artificial Sequence
  derived and/or modified CDS sequence (opt2) from hemagglutinin__InfluenzaA__AGQ80977
augaacacccagauccucgcccucgcccucgccgccaucauccccaccaacgccgacaagaucugccucggccaccacgccgucuccaacggcaccaaggucaacacccucaccgagcgcggcgucgaggucgucaacgccaccgagaccgucgagcgcaccuccaucccccgcaucugcuccaagggcaagcgcgccgucgaccucggccagugcggccuccucggcaccaucaccggccccccccagugcgaccaguuccucgaguucuccgccgaccucaucaucgagcgccgcgagggcuccgacgucugcuaccccggcaaguucgucaacgaggaggcccuccgccagauccuccgcgaguccggcggcaucgacaaggagaccaugggcuucaccuacuccggcauccgcaccaacggcgccaccuccgccugccgccgcuccggcuccuccuucuacgccgagaugaaguggcuccucuccaacaccgacaacgccgccuucccccagaccaccaaguccuacaagaacacccgcaaggaccccgcccucaucaucuggggcguccaccacuccggcuccaccaccgagcagaccaagcucuacggcuccggcaacaagcucaucaccgucggcuccuccaacuaccagcaguccuucguccccucccccggcgcccgcccccaggucaacggccaguccggccgcaucgacuuccacuggcucaugcucaaccccaacgacaccgucaccuucuccuucaacggcgccuucaucgcccccgaccgcgccuccuuccuccgcggcaaguccaugggcauccaguccggcguccaggucgacgccaacugcgagggcgacugcuaccacaacggcggcaccaucaucuccaaccuccccuuccagaacaucaacucccgcgccgucggcaagugcccccgcuacgucaagcaggagucccuccuccucgccaccggcaugaagaacguccccgagauccccaagggccgcggccucuucggcgccaucgccggcuucaucgagaacggcugggagggccucgucgacggcugguacggcuuccgccaccagaacgcccagggcgagggcaccgccgccgacuacaaguccacccaguccgccaucgaccagaucaccggcaagcucaaccgccucaucgagaagaccaaccagcaguucgagcucaucgacaacgaguucaccgaggucgagcgccagaucggcaacgucaucaacuggacccgcgacuccaugaccgaggucugguccuacaacgccgagcuccucgucgccauggagaaccagcacaccaucgaccucgccgacuccgagaugaacaagcucuacgagcgcguccgccgccagcuccgcgagaacgccgaggaggacggcaccggcugcuucgagaucuuccacaagugcgacgacgacugcauggccuccauccgcaacaacaccuacgaccacuccaaguaccgcgaggaggccaugcagaaccgcauccagaucgaccccgucaagcucuccuccggcuacaaggacgucauccucugguucuccuucggcgccuccugcuucauccuccucgccaucgccaugggccucgucuucaucugcgucaaguccggcaacaugcgcugcaccaucugcaucuga

SEQ ID NO: 106233 - RNA, 1683 nt, Artificial Sequence
  derived and/or modified CDS sequence (opt2) from hemagglutinin__InfluenzaA__AGQ80978
augaacacccagauccucgucuucgcccucgucgccaucauccccaccaacgccgacaagaucugccucggccaccacgccgucuccaacggcaccaaggucaacacccucaccgagcgcggcgucgaggucgucaacgccaccgagaccgucgagcgcaccuccaucccccgcaucugcuccaagggcaagcgcgccgucgaccucggccagugcggccuccucggcaccaucaccggccccccccagugcgaccaguuccucgaguucuccgccgaccucaucaucgagcgccgcgagggcuccgacgucugcuaccccggcaaguucgucaacgaggaggcccuccgccagauccuccgcgaguccggcggcaucgacaaggagaccaugggcuucaccuacuccggcauccgcaccaacggcgccaccuccgccugccgccgcuccggcuccuccuucuacgccgagaugaaguggcuccucuccaacaccgacaacgccgccuucccccagaccaccaaguccuacaagaacacccgcaaggaccccgcccucaucaucuggggcauccaccacuccggcuccaucaccgagcagaccaagcucuacggcuccggcaacaagcucaucaccgucggcuccuccaacuaccagcaguccuucguccccucccccggcgcccgcccccaggucaacggccaguccggccgcaucgacuuccacuggcucaugcucaaccccaacgacaccgucaccuucuccuucaacggcgccuucaucgcccccgaccgcgccuccuuccuccgcggcaaguccaugggcauccaguccggcguccaggucgacgccaacugcgagggcgacugcuaccacaacggcggcaccaucaucuccaaccuccccuuccagaacaucaacucccgcgccgucggcaagugcccccgcuacgucaagcaggagucccuccuccucgccaccggcaugaagaacguccccgagauccccaagggccgcggccucuucggcgccaucgccggcuucaucgagaacggcugggagggccucgucgacggcugguacggcuuccgccaccagaacgcccagggcgagggcaccgccgccgacuacaaguccacccaguccgccaucgaccagaucaccggcaagcucaaccgccucaucgagaagaccaaccagcaguucgagcucaucgacaacgaguucaccgaggucgagcgccagaucggcaacgucaucaacuggacccgcgacuccaugaccgaggucugguccuacaacgccgagcuccucgucgccauggagaaccagcacaccaucgaccucgccgacuccgagaugaacaagcucuacgagcgcguccgccgccagcuccgcgagaacgccgaggaggacggcaccggcugcuucgagaucuuccacaagugcgacgacgacugcauggccuccauccgcaacaacaccuacgaccacuccaaguaccgcgaggaggccaugcagaaccgcauccagaucgaccccgucaagcucuccuccggcuacaaggacgucauccucugguucuccuucggcgccuccugcuucauccuccucgccaucgccaugggccucgucuucaucugcgucaagaacggcaacaugcgcugcaccaucugcaucuga

SEQ ID NO: 106234 - RNA, 1683 nt, Artificial Sequence
  derived and/or modified CDS sequence (opt2) from hemagglutinin__InfluenzaA__AGQ80979
augaacacccagauccucgucuucgcccucgucgccaucauccccaccaacgccgacaagaucugccucggccaccacgccgucuccaacggcaccaaggucaacacccucaccgagcgcggcgucgaggucgucaacgccaccgagaccgucgagcgcaccuccaucccccgcaucugcuccaagggcaagcgcgccgucgaccucggccagugcggccuccucggcaccaucaccggccccccccagugcgaccaguuccucgaguucuccgccgaccucaucaucgagcgccgcgagggcuccgacgucugcuaccccggcaaguucgucaacgaggaggcccuccgccagauccuccgcgaguccggcggcaucgacaaggagaccaugggcuucaccuacuccggcauccgcaccaacggcgccaccuccgccugccgccgcuccggcuccuccuucuacgccgagaugaaguggcuccucuccaacaccgacaacgccgccuucccccagaccaccaaguccuacaagaacacccgcaaggaccccgcccucaucaucuggggcauccaccacuccggcuccaccaccgagcagaccaagcucuacggcuccggcaacaagcucaucaccgucggcuccuccaacuaccagcaguccuucguccccucccccggcgcccgcccccaggucaacggccaguccggccgcaucgacuuccacuggcucaugcucaaccccaacgacaccgucaccuucuccuucaacggcgccuucaucgcccccgaccgcgccuccuuccuccgcggcaaguccaucggcauccaguccggcguccaggucgacgccaacugcgagggcgacugcuaccacaacggcggcaccaucaucuccaaccuccccuuccagaacaucaacucccgcgccgucggcaagugcccccgcuacgucaagcaggagucccuccuccucgccaccggcaugaagaacguccccgagauccccaagggccgcggccucuucggcgccaucgccggcuucaucgagaacggcugggagggccucaucgacggcugguacggcuuccgccaccagaacgcccagggcgagggcaccgccgccgacuacaaguccacccaguccgccaucgaccagaucaccggcaagcucaaccgccucaucgagaagaccaaccagcaguucgagcucaucgacaacgaguucaccgaggucgagcgccagaucggcaacgucaucaacuggacccgcgacuccaugaccgaggucugguccuacaacgccgagcuccucgucgccauggagaaccagcacaccaucgaccucgccgacuccgagaugaacaagcucuacgagcgcguccgccgccagcuccgcgagaacgccgaggaggacggcaccggcugcuucgagaucuuccacaagugcgacgacgacugcauggccuccauccgcaacaacaccuacgaccacuccaaguaccgcgaggaggccaugcagaaccgcauccagaucgaccccgucaagcucuccuccggcuacaaggacgucauccucugguucuccuucggcgccuccugcuucauccuccucgccaucgccaugggccucgucuucaucugcgucaagaacggcaacaugcgcugcaccaucugcaucuga

SEQ ID NO: 106235 - RNA, 1683 nt, Artificial Sequence; identical to SEQ ID NO: 106231
  derived and/or modified CDS sequence (opt2) from hemagglutinin__InfluenzaA__AGQ80980

SEQ ID NO: 106236 - RNA, 1683 nt, Artificial Sequence; identical to SEQ ID NO: 106216
  derived and/or modified CDS sequence (opt2) from hemagglutinin__InfluenzaA__AGQ80981

SEQ ID NO: 106237 - RNA, 1683 nt, Artificial Sequence; identical to SEQ ID NO: 106216
  derived and/or modified CDS sequence (opt2) from hemagglutinin__InfluenzaA__AGQ80982

SEQ ID NO: 106238 - RNA, 1683 nt, Artificial Sequence; identical to SEQ ID NO: 106216
  derived and/or modified CDS sequence (opt2) from hemagglutinin__InfluenzaA__AGQ80983

SEQ ID NO: 106239 - RNA, 1683 nt, Artificial Sequence; identical to SEQ ID NO: 106216
  derived and/or modified CDS sequence (opt2) from hemagglutinin__InfluenzaA__AGQ80984

SEQ ID NO: 106240 - RNA, 1683 nt, Artificial Sequence; identical to SEQ ID NO: 106216
  derived and/or modified CDS sequence (opt2) from hemagglutinin__InfluenzaA__AGQ80985

SEQ ID NO: 106241 - RNA, 1683 nt, Artificial Sequence; identical to SEQ ID NO: 106216
  derived and/or modified CDS sequence (opt2) from hemagglutinin__InfluenzaA__AGQ80986

SEQ ID NO: 106242 - RNA, 1683 nt, Artificial Sequence; identical to SEQ ID NO: 106216
  derived and/or modified CDS sequence (opt2) from hemagglutinin__InfluenzaA__AGQ80987

SEQ ID NO: 106243 - RNA, 1683 nt, Artificial Sequence; identical to SEQ ID NO: 106216
  derived and/or modified CDS sequence (opt2) from hemagglutinin__InfluenzaA__AGQ80988

SEQ ID NO: 106244 - RNA, 1683 nt, Artificial Sequence
  derived and/or modified CDS sequence (opt2) from hemagglutinin__InfluenzaA__AGQ80990
augaacacccagauccucgucuucgcccucgucgccaucauccccaccaacgccgacaagaucugccucggccaccacgccgucuccaacggcaccaaggucaacacccucaccgagcgcggcgucgaggucgucaacgccaccgagaccgucgagcgcaccuccauccccaagaucugcuccaagggcaagcgcgccgucgaccucggccagugcggccuccucggcaccaucaccggccccccccagugcgaccaguuccucgaguucuccgccgaccucaucaucgagcgccgcgagggcuccgacgucugcuaccccggcaaguucgucaacgaggaggcccuccgccagauccuccgcgaguccggcggcaucgacaaggagaccaugggcuucaccuacuccggcauccgcaccaacggcgccaccuccgccugccgccgcuccggcuccuccuucuacgccgagaugaaguggcuccucuccaacaccgacaacgccgccuucccccagaccaccaaguccuacaagaacacccgcaaggaccccgcccucaucaucuggggcauccaccacuccggcuccaccaccgagcagaccaagcucuacggcuccggcaacaagcucaucaccgucggcuccuccaacuaccagcaguccuucguccccucccccggcgcccgcccccaggucaacggccaguccggccgcaucgacuuccacuggcucaugcucaaccccaacgacaccgucaccuucuccuucaacggcgccuucaucgcccccgaccgcgccuccuuccuccgcggcaaguccaugggcauccaguccggcguccaggucgacgccaacugcgagggcgacugcuaccacaacggcggcaccaucaucuccaaccuccccuuccagaacaucaacucccgcgccgucggcaagugcccccgcuacgucaagcaggagucccuccuccucgccaccggcaugaagaacguccccgagauccccaagggccgcggccucuucggcgccaucgccggcuucaucgagaacggcugggagggccucaucgacggcugguacggcuuccgccaccagaacgcccagggcgagggcaccgccgccgacuacaaguccacccaguccgccaucgaccagaucaccggcaagcucaaccgccucaucgagaagaccaaccagcaguucgagcucaucgacaacgaguucaccgaggucgagcgccagaucggcaacgucaucaacuggacccgcgacuccaugaccgaggucugguccuacaacgccgagcuccucgucgccauggagaaccagcacaccaucgaccucgccgacuccgagaugaacaagcucuacgagcgcguccgccgccagcuccgcgagaacgccgaggaggacggcaccggcugcuucgagaucuuccacaagugcgacgacgacugcauggccuccauccgcaacaacaccuacgaccacuccaaguaccgcgaggaggccaugcagaaccgcauccagaucgaccccgucaagcucuccuccggcuacaaggacgucauccucugguucuccuucggcgccuccugcuucauccuccucgccaucgccaugggccucgucuucaucugcgucaagaacggcaacaugcgcugcaccaucugcaucuga

SEQ ID NO: 106245 - RNA, 1683 nt, Artificial Sequence; identical to SEQ ID NO: 106230
  derived and/or modified CDS sequence (opt2) from hemagglutinin__InfluenzaA__AGQ80991

SEQ ID NO: 106246 - RNA, 1683 nt, Artificial Sequence
  derived and/or modified CDS sequence (opt2) from hemagglutinin__InfluenzaA__AGQ80992
augaacacccagauccucgucuucgcccucgucgccaucauccccaccaacgccgacaagaucugccucggccaccacgccgucuccaacggcaccaaggucaacacccucaccgagcgcggcgucgaggucgucaacgccaccgagaccgucgagcgcaccaacgucccccgcaucugcuccaagggcaagcgcaccgucgaccucggccagugcggccuccucggcaccaucaccggccccccccagugcgaccaguuccucgaguucuccgccgaccucaucaucgagcgccgcgagggcuccgacgucugcuaccccggcaaguucaugaacgaggaggcccuccgccagauccuccgcgaguccggcggcaucgacaaggagaccaugggcuucaccuacuccggcauccgcaccaacggcgccaccuccgccugccgccgcuccggcuccuccuucuacgccgagaugaaguggcuccucuccaacaccgacaacgccgccuucccccagaugaccaaguccuacaagaacacccgcaaggaccccgcccucaucaucuggggcauccaccacuccggcuccaccaccgagcagaccaagcucuacggcuccggcaacaagcucaucaccgucggcuccuccaacuaccagcaguccuucguccccucccccggcgcccgcccccaggucaacggccaguccggccgcaucgacuuccacuggcucaugcucaaccccaacgacaccgucaccuucuccuucaacggcgccuucaucgcccccgaccgcgccugcuuccuccgcggcaaguccaugggcauccaguccggcguccaggucgacgccuccugcgagggcgacugcuaccacuccggcggcaccaucaucuccaaccuccccuuccagaacaucaacucccgcgccgucggcaagugcccccgcuacgucaagcaggagucccucaugcucgccaccggcaugaagaacguccccgagauccccaagggccgcggccucuucggcgccaucgccggcuucaucgagaacggcugggagggccucaucgacggcugguacggcuuccgccaccagaacgcccagggcgagggcaccgccgccgacuacaaguccacccaguccgccaucgaccagaucaccggcaagcucaaccgccucaucgagaagaccaaccagcaguucgagcucaucgacaacgaguucaccgaggucgagaagcagaucggcaacgucaucaacuggacccgcgacuccaugaccgaggucugguccuacaacgccgagcuccucgucgccauggagaaccagcacaccaucgaccucgccgacuccgagaugaacaagcucuacgagcgcgucaagcgccagcuccgcgagaacgccgaggaggacggcaccggcugcuucgagaucuuccacaagugcgacgacgacugcauggccuccauccgcaacaacaccuacgaccacuccaaguaccgcgaggaggccaugcagaaccgcauccagaucgaccccgucaagcucuccuccggcuacaaggacgucauccucugguucuccuucggcgccuccugcuucauccuccucgccaucgccaugggccucgucuucaucugcgucaagaacggcaacaugcgcugcaccaucugcaucuga

SEQ ID NO: 106247 - RNA, 1683 nt, Artificial Sequence; identical to SEQ ID NO: 106216
  derived and/or modified CDS sequence (opt2) from hemagglutinin__InfluenzaA__AGQ80993

SEQ ID NO: 106248 - RNA, 1683 nt, Artificial Sequence; identical to SEQ ID NO: 106223
  derived and/or modified CDS sequence (opt2) from hemagglutinin__InfluenzaA__AGQ80994

SEQ ID NO: 106249 - RNA, 1683 nt, Artificial Sequence; identical to SEQ ID NO: 106225
  derived and/or modified CDS sequence (opt2) from hemagglutinin__InfluenzaA__AGQ80995

SEQ ID NO: 106250 - RNA, 1683 nt, Artificial Sequence; identical to SEQ ID NO: 106225
  derived and/or modified CDS sequence (opt2) from hemagglutinin__InfluenzaA__AGQ80996

SEQ ID NO: 106251 - RNA, 1683 nt, Artificial Sequence
  derived and/or modified CDS sequence (opt2) from hemagglutinin__InfluenzaA__AGQ80997
augaacacccagauccucgucuucgcccucgucgccaucauccccaccaacgccgacaagaucugccucggccaccacgccgucuccaacggcaccaaggucaacacccucaccgagcgcggcgucgaggucgucaacgccaccgagaccgucgagcgcaccaacaucccccgcaucugcuccaagggcaagcgcaccgucgaccucggccagugcggccuccucggcaccaucaccggccccccccagugcgaccaguuccucgaguucuccgccgaccucaucaucgagcgccgcgagggcuccgacgucugcuaccccggcaaguucgucaacgaggaggcccuccgccagauccuccgcgaguccggcggcaucgacaaggagaccaugggcuucaccuacuccggcauccgcaccgacggcgccaccuccgccugccgccgcuccggcuccuccuucuacgccgagaugaaguggcuccucuccaacaccgacaacgccgccuucccccagaugaccaaguccuacaagaacacccgcaaggaccccgcccucaucaucuggggcauccaccacuccggcuccaccaccgagcagaccaagcucuacggcuccggcaacaagcucaucaccgucggcuccuccaacuaccagcaguccuucguccccucccccggcgcccgcccccaggucaacggccaguccggccgcaucgacuuccacuggcucaugcucaaccccaacgacaccgucaccuucuccuucaacggcgccuucaucgcccccgaccgcgccuccuuccuccgcggcaaguccaugggcauccaguccggcguccaggucgacgccaacugcgagggcgacugcuaccacuccggcggcaccaucaucuccaaccuccccuuccagaacaucaacucccgcgccgucggcaagugcccccgcuacgucaagcaggagucccuccuccucgccaccggcaugaagaacguccccgagauccccaagggccgcggccucuucggcgccaucgccggcuucaucgagaacggcugggagggccucaucgacggcugguacggcuuccgccaccagaacucccagggcgagggcaccgccgccgacuacaaguccacccaguccgccaucgaccagaucaccggcaagcucaaccgccucaucgagaagaccaaccagcaguucgagcucaucgacaacgaguucaccgaggucgagaagcagaucggcaacgucaucaacuggacccgcgacuccaugaccgaggucugguccuacaacgccgagcuccucgucgccauggagaaccagcacaccaucgaccucgccgacuccgagaugaacaagcucuacgagcgcgucaagcgccagcuccgcgagaacgccgaggaggacggcaccggcugcuucgagaucuuccacaagugcgacgacgacugcauggccuccauccgcaacaacaccuacgaccacuccaaguaccgcgaggaggccaugcagaaccgcauccagaucgaccccgucaagcucuccuccggcuacaaggacgucauccucugguucuccuucggcgccuccugcuucauccuccucgccaucgccaugggccucgucuucaucugcgucaagaacggcaacaugcgcugcaccaucugcaucuga

SEQ ID NO: 106252 - RNA, 1683 nt, Artificial Sequence
  derived and/or modified CDS sequence (opt2) from hemagglutinin__InfluenzaA__AGQ81000
augaacacccagauccucgucuucgcccucgucgccaucauccccaccaacgccgacaagaucugccucggccaccacgccgucuccaacggcaccaaggucaacacccucaccgagcgcggcgucgaggucgucaacgccaccgagaccgucgagcgcaccaacaucccccgcaucugcuccaagggcaagcgcaccgucgaccucggccagugcggccuccucggcaccaucaccggccccccccagugcgaccaguuccucgaguucuccgccgaccucaucaucgagcgccgcgagggcuccgacgucugcuaccccggcaaguucgucaacgaggaggcccuccgccagauccuccgcgaguccggcggcaucggcaaggagaccaugggcuucaccuacuccggcauccgcaccaacggcgccaccuccgccugccgccgcuccggcuccuccuucuacgccgagaugaaguggcuccucuccaacaccgacaacgccgccuucccccagaugaccaaguccuacaagaacacccgcaaggaccccgcccucaucaucuggggcauccaccacuccggcuccaccaccgagcagaccaagcucuacggcuccggcaacaagcucaucaccgucggcuccuccaacuaccagaaguccuucguccccucccccggcgcccgcccccaggucaacggccaguccggccgcaucgacuuccacuggcucaugcucaaccccaacgacaccgucaccuucuccuucaacggcgccuucaucgcccccgaccgcgccuccuuccuccgcggcaaguccaugggcauccaguccggcguccaggucgacgccaacugcgagggcgacugcuaccacaacggcggcaccaucaucuccaaccuccccuuccagaacaucaacucccgcgccgucggcaagugcccccgcuacgucaagcaggagucccuccuccucgccaccggcaugaagaacguccccgagauccccaagggccgcggccucuucggcgccaucgccggcuucaucgagaacggcugggagggccucaucgacggcugguacggcuuccgccaccagaacgcccagggcgagggcaccgccgccgacuacaaguccacccaguccgccaucgaccagaucaccggcaagcucaaccgccucaucgagaagaccaaccagcaguucgagcucaucgacaacgaguucaccgaggucgagaagcagaucggcaacgucaucaacuggacccgcgacuccaugaccgaggucugguccuacaacgccgagcuccucgucgccauggagaaccagcacaccaucgaccucgccgacuccgagaugaacaagcucuacgagcgcgucaagcgccagcuccgcgagaacgccgaggaggacggcaccggcugcuucgagaucuuccacaagugcgacgacgacugcauggccuccauccgcaacaacaccuacgaccacuccaaguaccgcgaggaggccaugcagaaccgcauccagaucgaccccgucaagcucuccuccggcuacaaggacgucauccucugguucuccuucggcgccuccugcuucauccuccucgccaucgccaugggccucgucuucaucugcgucaagaacggcaacaugcgcugcaccaucugcaucuga

SEQ ID NO: 106253 - RNA, 1683 nt, Artificial Sequence
  derived and/or modified CDS sequence (opt2) from hemagglutinin__InfluenzaA__AGQ81001
augaacacccagauccucgucuucgcccucgucgccaucauccccaccaacgccgacaagaucugccucggccaccacgccgucuccaacggcaccaaggucaacacccucaccgagcgcggcgucgaggucgucaacgccaccgagaccgucgagcgcaccaacaucccccgcaucugcuccaagggcaagcgcaccgucgaccucggccagugcggccuccucggcaccaucaccggccccccccagugcgaccaguuccucgaguucuccgccgaccucaucaucgagcgccgcgagggcuccgacgucugcuaccccggcaaguucgucaacgaggaggcccuccgccagauccuccgcgaguccggcggcaucgacaaggagaccaugggcuucaccuacuccggcauccgcaccaacggcgccaccuccgccugccgccgcuccggcuccuccuucuacgccgagaugaaguggcuccucuccaacaccgacaacgccgccuucccccagaugaccaaguccuacaagaacacccgcaaggaccccgcccucaucaucuggggcauccaccacuccggcuccaccaccgagcagaccaagcucuacggcuccggcaacaagcucaucaccgucggcaccuccaacuaccagcaguccuucguccccucccccggcgcccgcccccaggucaacggccaguccggccgcaucgacuuccacuggcucaugcucaaccccaacgacaccgucaccuucuccuucaacggcgccuucaucgcccccgaccgcgccuccuuccuccgcggcaaguccaugggcauccaguccggcguccaggucgacgccaacugcgagggcgacugcuaccacaacggcggcaccaucaucuccaaccuccccuuccagaacaucaacucccgcgccgucggcaagugcccccgcuacgucaagcaggagucccuccuccucgccaccggcaugaagaacguccccgagauccccaagggccgcggccucuucggcgccaucgccggcuucaucgagaacggcugggagggccucaucgacggcugguacggcuuccgccaccagaacgcccagggcgagggcaccgccgccgacuacaaguccacccaguccgccaucgaccagaucaccggcaagcucaaccgccucaucgagaagaccaaccagcaguucgagcucaucgacaacgaguucaccgagaucgagaagcagaucggcaacgucaucaacuggacccgcgacuccaugaccgaggucugguccuacaacgccgagcuccucgucgccauggagaaccagcacaccaucgaccucgccgacuccgagaugaacaagcucuacgagcgcgucaagcgccagcuccgcgagaacgccgaggaggacggcaccggcugcuucgagaucuuccacaagugcgacgacgacugcauggccuccauccgcaacaacaccuacgaccacuccaaguaccgcgaggaggccaugcagaaccgcauccagaucgaccccgucaagcucuccuccggcuacaaggacgucauccucugguucuccuucggcgccuccugcuucauccuccucgccaucgccaugggccucgucuucaucugcgucaagaacggcaacaugcgcugcaccaucugcaucuga

SEQ ID NO: 106254 - RNA, 1683 nt, Artificial Sequence; identical to SEQ ID NO: 106231
  derived and/or modified CDS sequence (opt2) from hemagglutinin__InfluenzaA__AGQ81002

SEQ ID NO: 106255 - RNA, 1683 nt, Artificial Sequence; identical to SEQ ID NO: 106231
  derived and/or modified CDS sequence (opt2) from hemagglutinin__InfluenzaA__AGQ81003

SEQ ID NO: 106256 - RNA, 1683 nt, Artificial Sequence; identical to SEQ ID NO: 106231
  derived and/or modified CDS sequence (opt2) from hemagglutinin__InfluenzaA__AGQ81004

SEQ ID NO: 106257 - RNA, 1683 nt, Artificial Sequence; identical to SEQ ID NO: 106231
  derived and/or modified CDS sequence (opt2) from hemagglutinin__InfluenzaA__AGQ81005

SEQ ID NO: 106258 - RNA, 1683 nt, Artificial Sequence; identical to SEQ ID NO: 106231
  derived and/or modified CDS sequence (opt2) from hemagglutinin__InfluenzaA__AGQ81006

SEQ ID NO: 106259 - RNA, 1683 nt, Artificial Sequence; identical to SEQ ID NO: 106231
  derived and/or modified CDS sequence (opt2) from hemagglutinin__InfluenzaA__AGQ81007

SEQ ID NO: 106260 - RNA, 1683 nt, Artificial Sequence; identical to SEQ ID NO: 106231
  derived and/or modified CDS sequence (opt2) from hemagglutinin__InfluenzaA__AGQ81008

SEQ ID NO: 106261 - RNA, 1683 nt, Artificial Sequence
  derived and/or modified CDS sequence (opt2) from hemagglutinin__InfluenzaA__AGQ81009
augaacacccagauccucgucuucgcccucgucgccaucauccccaccaacgccgacaagaucugccucggccaccacgccgucuccaacggcaccaaggucaacacccucaccgagcgcggcgucgaggucgucaacgccaccgagaccgucgagcgcaccuccaucccccgcaucugcuccaagggcaagcgcgccgucgaccucggccagugcggccuccucggcaccaucaccggccccccccagugcgaccaguuccucgaguucuccgccgaccucaucaucgagcgccaggagggcuccgacgucugcuaccccggcaaguucgucaacgaggaggcccuccgccagauccuccgcgaguccggcggcaucaacaaggagaccaugggcuucaccuacuccggcauccgcaccaacggcgccaccuccgccugccgccgcuccggcuccuccuucuacgccgagaugaaguggcuccucuccaacaccgacaacgccgccuucccccagaccaccaaguccuacaagaacacccgcaaggaccccgcccucaucaucuggggcauccaccacuccggcuccaccaccgagcagaccaagcucuacggcuccggcaacaagcucaucaccgucggcuccuccaacuaccagcaguccuucguccccucccccggcgcccgcccccaggucaacggccaguccggccgcaucgacuuccacuggcucaugcucaaccccaacgacaccgucaccuucuccuucaacggcgccuucaucgcccccgaccgcgccuccuuccuccgcggcaaguccaugggcauccaguccggcguccaggucgacgccaacugcgagggcgacugcuaccacaacggcggcaccaucaucuccaaccuccccuuccagaacaucaacucccgcgccgucggcaagugcccccgcuacgucaagcaggagucccuccuccucgccaccggcaugaagaacguccccgagauccccaagggccgcggccucuucggcgccaucgccggcuucaucgagaacggcugggagggccucgucgacggcugguacggcuuccgccaccagaacgcccagggcgagggcaccgccgccgacuacaaguccacccaguccgccaucgaccagaucaccggcaagcucaaccgccucaucgagaagaccaaccagcaguucgagcucaucgacaacgaguucaccgaggucgagcgccagaucggcaacgucaucaacuggacccgcgacuccaugaccgaggucugguccuacaacgccgagcuccucgucgccauggagaaccagcacaccaucgaccucgccgacuccgagaugaacaagcucuacgagcgcguccgccgccagcuccgcgagaacgccgaggaggacggcaccggcugcuucgagaucuuccacaagugcgacgacgacugcauggccuccauccgcaacaacaccuacgaccacuccaaguaccgcgaggaggccaugcagaaccgcauccagaucgaccccgucaagcucuccuccggcuacaaggacgucauccucugguucuccuucggcgccuccugcuucauccuccucgccaucgccaugggccucgucuucaucugcgucaagaacggcaacaugcgcugcaccaucugcaucuga

SEQ ID NO: 106262 - RNA, 1683 nt, Artificial Sequence
  derived and/or modified CDS sequence (opt2) from hemagglutinin__InfluenzaA__AGQ81011
augaacacccagauccucgucuucgcccucaucgccaucacccccaccaacuccgacaagaucugccucggccaccacgccgucuccaacggcaccaaggucaacacccucaccgagcgcggcgucgaggucgucaacgccaccgagaccgucgagcgcaccuccaucccccgcaucugcuccaagggcaagcgcaccgucgaccucggccagugcggccuccucggcaccaucaccggccccccccagugcgaccaguuccucgaguucuccgccgaccucaucaucgagcgccgcgagggcuccgacgucugcuaccccggcaaguucgucaacgaggaggcccuccgccagauccuccgcgaguccggcggcaucgacaaggaggccaugggcuucaccuacuccggcauccgcaccaacggcgccaccuccgccugccgccgcuccgaguccuccuucuacgccgagaugaaguggcuccucuccaacaccgacaacgccgccuucccccccaugaccaaguccuacaagaacacccgcaaggcccccgcccucaucaucuggggcauccaccacuccggcuccaccgccgagcagaccaagcucuacggcuccggcaacaagcucgucaccguccgcuccuccaacuaccagcaguccuucguccccucccccggcgccggccccaaggucaacggccaguccggccgcaucgacuuccacuggcucaugcucaaccccaacgacaccgucaccuucuccuucaacggcgccuucaucgcccccgaccgcgccuccuuccuccgcggcaaguccaugggcauccaguccggcguccaggucgacgccaacugcgagggcgacugcuaccacuccggcggcaccaucaucuccaaccuccccuuccagaacaucgacucccgcgucgucggcaagugcccccgcuacgucaagcagaagucccuccuccucgccaccggcaugaagaacguccccgagauccccaagggccgcggccucuucggcgccaucgccggcuucaucgagaacggcugggagggccucaucgacggcugguacggcuuccgccaccagaacgcccagggcgagggcaccgccgccgacuacaaguccacccaguccgccaucaaccagaugaccggcaagcucaaccgccucaucgagaagaccaaccagcaguucgagcucaucgacaacgaguucaccgaggucgagaagcagaucggcaacgucaucaacuggacccgcgacuccaucaccgaggucugguccuacaacgccgagcuccucgucgccauggagaaccagcacaccaucgaccucgccgacuccgagaugaacaagcucuacgagcgcgucaagcgccagcuccgcgagaacgccgaggaggacggcaccggcugcuucgagaucuuccacaagugcgacgacgacugcauggccuccauccgcaacaacaccuacgaccacuccaaguaccgcgaggaggccaugcagaaccgcauccagaucgaccccgucaagcucuccuccggcuacaaggacgucauccucugguucuccuucggcgccuccugccucauccuccucgccaucgccaugggccucgucuucaucugcgucaagaacggcaacaugcgcugcaccaucugcaucuga

SEQ ID NO: 106263 - RNA, 1683 nt, Artificial Sequence
  derived and/or modified CDS sequence (opt2) from hemagglutinin__InfluenzaA__AGQ81012
augaacacccagauccucgucuucgcccucaucgccaucauccccaccaacuccgacaagaucugccucggccaccacgccgucuccaacggcaccaaggucaacacccucaccgagcgcggcgucgaggucgucaacgccaccgagaccgucgagcgcaccuccaucccccgcaucugcuccaagggcaagcgcaccgucgaccucggccagugcggccuccucggcaccaucaccggccccccccagugcgaccaguuccucgaguucuccgccgaccucaucaucgagcgccgcgagggcuccgacgucugcuaccccggcaaguucgucaacgaggaggcccuccgccagauccuccgcgaguccggcggcaucaacaaggaggccaugggcuucaccuacuccggcauccgcaccaacggcgccaccuccgccugccgccgcuccggcuccuccuucuacgccgagaugaaguggcuccucuccaacaccgacaacgccgccuucccccccaugaccaaguccuacaagaacacccgcaaggcccccgcccucaucaucuggggcauccaccacuccggcuccaccgccgagcagaccaagcucuacggcuccggcaacaagcucgucaccguccgcuccuccaacuaccagcaguccuucguccccucccccggcgccggcccccaggucaacggccaguccggccgcaucgacuuccacuggcucaugcucaaccccaacgacaccgucaccuucuccuucaacggcgccuucaucgcccccgaccgcgccuccuuccuccgcggcaaguccaugggcauccaguccggcguccaggucgacgccaacugcgagggcgacugcuaccacuccggcggcaccaucaucuccaaccuccccuuccagaacaucgacucccgcgucgucggcaagugcccccgcuacgucaagcagaagucccuccuccucgccaccggcaugaagaacguccccgagauccccaagggccgcggccucuucggcgccaucgccggcuucaucgagaacggcugggagggccucaucgacggcugguacggcuuccgccaccagaacgcccagggcgagggcaccgccgccgacuacaaguccacccaguccgccaucaaccagaugaccggcaagcucaaccgccucaucgagaagaccaaccagcaguucgagcucaucgacaacgaguucaccgaggucgagaagcagaucggcaacgucaucaacuggacccgcgacuccaucaccgaggucugguccuacaacgccgagcuccucgucgccauggagaaccagcacaccaucgaccucgccgacuccgagaugaacaagcucuacgagcgcgucaagcgccagcuccgcgagaacgccgaggaggacggcaccggcugcuucgagaucuuccacaagugcgacgacgacugcauggccuccauccgcaacaacaccuacgaccacuccaaguaccgcgaggaggccaugcagaaccgcauccagaucgaccccgucaagcucuccuccggcuacaaggacgucauccucugguucuccuucggcgccuccugcuucauccuccucgccaucgccaugggccucgucuucaucugcgucaagaacggcaacaugcgcugcaccaucugcaucuga

SEQ ID NO: 106264 - RNA, 1683 nt, Artificial Sequence
  derived and/or modified CDS sequence (opt2) from hemagglutinin__InfluenzaA__AGQ81017
augaacacccagauccucgucuucgcccucaucgccaucacccccaccaacuccgacaagaucugccucggccaccacgccgucuccaacggcaccaaggucaacacccucaccgagcgcggcgucgaggucgucaacgccaccgagaccgucgagcgcaccuccaucccccgcaucugcuccaagggcaagcgcaccgucgaccucggccagugcggccuccucggcaccaucaccggccccccccagugcgaccaguuccucgaguucuccgccgaccucaucaucgagcgccgcgagggcuccgacgucugcuaccccggcaaguucgucaacgaggaggcccuccgccagauccuccgcgaguccggcggcaucgacaaggaggccaugggcuucaccuacuccggcauccgcaccaacggcgccaccuccgccugccgccgcuccggcuccuccuucuacgccgagaugaaguggcuccucuccaacaccgacaacgccgccuucccccccaugaccaaguccuacaagaacacccgcaaggcccccgcccucaucaucuggggcauccaccacuccggcuccaccgccgagcagaccaagcucuacggcuccggcaacaagcucgucaccguccgcuccuccaacuaccagcaguccuucguccccucccccggcgccggcccccaggucaacggccaguccggccgcaucgacuuccacuggcucaugcucaaccccaacgacaccgucaccuucuccuucaacggcgccuucaucgcccccgaccgcgccuccuuccuccgcggcaaguccaugggcauccaguccggcguccaggucgacgccaacugcgagggcgacugcuaccacuccggcggcaccaucaucuccaaccuccccuuccagaacaucgacucccgcgucgucggcaagugcccccgcuacgucaagcagaagucccuccuccucgccaccggcaugaagaacguccccgagauccccaagggccgcggccucuucggcgccaucgccggcuucaucgagaacggcugggagggccucaucgacggcugguacggcuuccgccaccagaacgcccagggcgagggcaccgccgccgacuacaaguccacccaguccgccaucaaccagaugaccggcaagcucaaccgccucaucgagaagaccaaccagcaguucgagcucaucgacaacgaguucaccgaggucgagaagcagaucggcaacgucaucaacuggacccgcgacuccaucaccgaggucugguccuacaacgccgagcuccucgucgccauggagaaccagcacaccaucgaccucgccgacuccgagaugaacaagcucuacgagcgcgucaagcgccagcuccgcgagaacgccgaggaggacggcaccggcugcuucgagaucuuccacaagugcgacgacgacugcauggccuccauccgcaacaacaccuacgaccacuccaaguaccgcgaggaggccaugcagaaccgcauccagaucgaccccgucaagcucuccuccggcuacaaggacgucauccucugguucuccuucggcgccuccugcuucauccuccucgccaucgccaugggccucgucuucaucugcgucaagaacggcaacaugcgcugcaccaucugcaucuga

SEQ ID NO: 106265 - RNA, 1683 nt, Artificial Sequence
  derived and/or modified CDS sequence (opt2) from hemagglutinin__InfluenzaA__AGQ81018
augaacacccagauccucgucuucgcccucaucgccaucauccccaccaacuccgacaagaucugccucggccaccacgccgucuccaacggcaccaaggucaacacccucaccgagcgcggcgucgaggucgucaacgccaccgagaccgucgagcgcaccuccaucccccgcaucugcuccaagggcaagcgcaccgucgaccucggccagugcggccuccucggcaccaucaccggccccccccagugcgaccaguuccucgaguucuccgccgaccucaucaucgagcgccgcgagggcuccgacgucugcuaccccggcaaguucgucaacgaggaggcccuccgccagauccuccgcgaguccggcggcaucgucaaggaggccaugggcuucaccuacuccggcauccgcaccaacggcgccaccuccgccugccgccgcuccggcuccuccuucuacgccgagaugaaguggcuccucuccaacaccgacaacgccgccuucccccccaugaccaaguccuacaagaacacccgcaaggcccccgccaucaucaucuggggcauccaccacuccggcuccaccgccgagcagaccaagcucuacggcuccggcaacaagcucgucaccguccgcuccuccaacuaccagcaguccuucguccccucccccggcgccggcccccaggucaacggccaguccggccgcaucgacuuccacuggcucaugcucaaccccaacgacaccgucaccuucuccuucaacggcgccuucaucgcccccgaccgcgccuccuuccuccgcggcaaguccaugggcauccaguccggcguccaggucgacgccaacugcgagggcgacugcuaccacucccgcggcaccaucaucuccaaccuccccuuccagaacaucgacucccgcgucgucggcaagugcccccgcuacgucaagcagaagucccuccuccucgccaccggcaugaagaacguccccgagauccccaagggccgcggccucuucggcgccaucgccggcuucaucgagaacggcugggagggccucaucgacggcugguacggcuuccgccaccagaacgcccagggcgagggcaccgccgccgacuacaaguccacccaguccgccaucaaccagaugaccggcaagcucaaccgccucaucgagaagaccaaccagcaguucgagcucaucgacaacgaguucaccgaggucgagaagcagaucggcaacgucaucaacuggacccgcgacuccaucaccgaggucugguccuacaacgccgagcuccucgucgccauggagaaccagcacaccaucgaccucgccgacuccgagaugaacaagcucuacgagcgcgucaagcgccagcuccgcgagaacgccgaggaggacggcaccggcugcuucgagaucuuccacaagugcgacgacgacugcauggccuccauccgcaacaacaccuacgaccacuccaaguaccgcgaggaggccaugcagaaccgcauccagaucgaccccgucaagcucuccuccggcuacaaggacgucauccucugguucuccuucggcgccuccugcuucauccuccucgccaucgccaugggccucgucuucaucugcgucaagaacggcaacaugcgcugcaccaucugcaucuga

SEQ ID NO: 106266 - RNA, 1683 nt, Artificial Sequence; identical to SEQ ID NO: 106265
  derived and/or modified CDS sequence (opt2) from hemagglutinin__InfluenzaA__AGQ81019

SEQ ID NO: 106267 - RNA, 1683 nt, Artificial Sequence; identical to SEQ ID NO: 106264
  derived and/or modified CDS sequence (opt2) from hemagglutinin__InfluenzaA__AGQ81020

SEQ ID NO: 106268 - RNA, 1683 nt, Artificial Sequence; identical to SEQ ID NO: 106265
  derived and/or modified CDS sequence (opt2) from hemagglutinin__InfluenzaA__AGQ81021

SEQ ID NO: 106269 - RNA, 1683 nt, Artificial Sequence; identical to SEQ ID NO: 106264
  derived and/or modified CDS sequence (opt2) from hemagglutinin__InfluenzaA__AGQ81022

SEQ ID NO: 106270 - RNA, 1683 nt, Artificial Sequence; identical to SEQ ID NO: 106265
  derived and/or modified CDS sequence (opt2) from hemagglutinin__InfluenzaA__AGQ81023

SEQ ID NO: 106271 - RNA, 1683 nt, Artificial Sequence
  derived and/or modified CDS sequence (opt2) from hemagglutinin__InfluenzaA__AGQ81025
augaacacccagauccucgucuucgcccucaucgccaucauccccaccaacgccgacaagaucugccucggccaccacgccgucuccaacggcaccaaggucaacacccucaccgagcgcggcgucgaggucgucaacgccaccgagaccgucgagcgcaccuccaucccccgcaucugcuccaagggcaagcgcaccgucgaccucggccagugcggccuccucggcaccaucaccggccccccccagugcgaccaguuccucgaguucuccgccgaccucaucaucgagcgccgcgagggcuccgacgucugcuaccccggcaaguucgucaacgaggaggcccuccgccagauccuccgcgaguccggcggcaucgacaaggaggccaugggcuucaccuacuccggcauccgcaccaacggcgucaccuccgccugccgccgcuccggcuccuccuucuacgccgagaugaaguggcuccucuccaacaccgacaacgccgccuucccccccaugaccaaguccuacaagaacacccgcaaggcccccgcccucaucaucuggggcauccaccacuccggcuccaccgccgagcagaccaagcucuacggcuccggcaacaagcucgucaccguccgcuccuccaacuaccagcaguccuucguccccucccccggcgccggcccccaggucaacggccaguccggccgcaucgacuuccacuggcucaugcucaaccccaacgacaccgucaccuucuccuucaacggcgccuucaucgcccccgaccgcgccuccuuccuccgcggcaaguccaugggcauccaguccggcguccaggucgacgccaacugcgagggcgacugcuaccacuccggcggcaccaucaucuccaaccuccccuuccagaacaucgacucccgcgucgucggcaagugcccccgcuacgucaagcagaagucccuccuccucgccaccggcaugaagaacguccccgagauccccaagggccgcggccucuucggcgccaucgccggcuucaucgagaacggcugggagggccucaucgacggcugguacggcuuccgccaccagaacgcccagggcgagggcaccgccgccgacuacaaguccacccaguccgccaucaaccagaugaccggcaagcucaaccgccucaucgagaagaccaaccagcaguucggccucaucgacaacgaguucaccgaggucgagaagcagaucggcaacgucaucaacuggacccgcgacuccaucaccgaggucugguccuacaacgccgagcuccucgucgccauggagaaccagcacaccaucgaccucgccgacuccgagaugaacaagcucuacgagcgcgucaagcgccagcuccgcgagaacgccgaggaggacggcaccggcugcuucgagaucuuccacaagugcgacgacgacugcauggccuccauccgcaacaacaccuacgaccacuccaaguaccgcgaggaggccaugcagaaccgcauccagaucgaccccgucaagcucuccuccggcuacaaggacgucauccucugguucuccuucggcgccuccugcuucauccuccucgccaucgccaugggccucgucgucaucugcgucaagaacggcaacaugcgcugcaccaucugcaucuga

SEQ ID NO: 106272 - RNA, 1683 nt, Artificial Sequence
  derived and/or modified CDS sequence (opt2) from hemagglutinin__InfluenzaA__AGQ81026
augaacacccagauccucgucuucgcccucaucgccaucauccccaccaacgccgacaagaucugccucggccaccacgccgucuccaacggcaccaaggucaacacccucaccgagcgcggcgucgaggucgucaacgccaccgagaccgucgagcgcaccuccaucccccgcaucugcuccaagggcaagcgcaccgucgaccucggccagugcggccuccucggcaccaucaccggccccccccagugcgaccaguuccucgaguucuccgccgaccucaucaucgagcgccgcgagggcuccgacgucugcuaccccggcaaguucgucaacgaggaggcccuccgccagauccuccgcgaguccggcggcaucgacaaggaggccaugggcuucaccuacuccggcauccgcaccaacggcgccaccuccgccugccgccgcuccggcuccuccuucuacgccgagaugaaguggcuccucuccaacaccgacaacgccgccuucccccccaccaccaaguccuacaagaacacccgcaaggcccccgcccucaucaucuggggcauccaccacuccggcuccaccgccgagcagaccaagcucuacggcuccggcaacaagcucgucaccguccgcuccuccaacuaccagcaguccuucguccccucccccggcgccggcccccaggucaacggccaguccggccgcaucgacuuccacuggcucaugcucaaccccaacgacaccgucaccuucuccuucaacggcgccuucaucgcccccgaccgcgccuccuuccuccgcggcaaguccaugggcauccaguccggcguccaggucgacgccaacugcgagggcgacugcuaccacuccggcggcaccaucaucuccaaccuccccuuccagaacaucgacucccgcgucgucggcaagugcccccgcuacgucaagcagaagucccuccuccucgccaccggcaugaagaacguccccgagauccccaagggccgcggccucuucggcgccaucgccggcuucaucgagaacggcugggagggccucaucgacggcugguacggcuuccgccaccagaacgcccagggcgagggcaccgccgccgacuacaaguccacccaguccgccaucaaccagaugaccggcaagcucaaccgccucaucgagaagaccaaccagcaguucgagcucaucgacaacgaguucaccgaggucgagaagcagaucggcaacgucaucaacuggacccgcgacuccaucaccgaggucugguccuacaacgccgagcuccucgucgccauggagaaccagcacaccaucgaccucgccgacuccgagaugaacaagcucuacgagcgcgucaagcgccagcuccgcgagaacgccgaggaggacggcaccggcugcuucgagaucuuccacaagugcgacgacgacugcauggccuccauccgcaacaacaccuacgaccacuccaaguaccgcgaggaggccaugcagaaccgcauccagaucgaccccgucaagcucuccuccggcuacaaggacgucauccucugguucuccuucggcgccuccugcuucauccuccucgccaucgccaugggccucgucuucaucugcgucaagaacggcaacaugcgcugcaccaucugcaucuga

SEQ ID NO: 106273 - RNA, 1683 nt, Artificial Sequence
  derived and/or modified CDS sequence (opt2) from hemagglutinin__InfluenzaA__AGQ81027
augaacacccagauccucgucuucgcccucaucgccaucauccccaccaacgccgacaagaucugccucggccaccacgccgucuccaacggcaccaaggucaacacccucaccgagcgcggcgucgaggucgucaacgccaccgagaccgucgagcgcaccuccaucccccgcaucugcuccaagggcaagcgcaccgucgaccucggccagugcggccuccucggcaccaucaccggccccccccagugcgaccaguuccucgaguucuccgccgaccucaucaucgagcgccgcgagggcuccgacgucugcuaccccggcaaguucgucaacgaggaggcccuccgccagauccuccgcgaguccggcggcaucgacaaggaggccaugggcuucaccuacuccggcauccgcaccaacggcgucaccuccgccugccgccgcuccggcuccuccuucuacgccgagaugaaguggcuccucuccaacaccgacaacgccgccuucccccccaugaccaaguccuacaagaacacccgcaaggcccccgcccucaucaucuggggcauccaccacuccggcuccaccgccgagcagaccaagcucuacggcuccggcaacaagcucgucaccguccgcuccuccaacuaccagcaguccuucguccccucccccggcgccggcccccaggucaacggccaguccggccgcaucgacuuccacuggcucaugcucaaccccaacgacaccgucaccuucuccuucaacggcgccuucaucgcccccgaccgcgccuccuuccuccgcggcaaguccaugggcauccaguccggcguccaggucgacgccaacugcgagggcgacugcuaccacuccggcggcaccaucaucuccaaccuccccuuccagaacaucgacucccgcgucgucggcaagugcccccgcuacgucaagcagaagucccuccuccucgccaccggcaugaagaacguccccgagauccccaagggccgcggccucuucggcgccaucgccggcuucaucgagaacggcugggagggccucaucgacggcugguacggcuuccgccaccagaacgcccagggcgagggcaccgccgccgacuacaaguccacccaguccgccaucaaccagaugaccggcaagcucaaccgccucaucgagaagaccaaccagcaguucgagcucaucgacaacgaguucaccgaggucgagaagcagaucggcaacgucaucaacuggacccgcgacuccaucaccgaggucugguccuacaacgccgagcuccucgucgccauggagaaccagcacaccaucgaccucgccgacuccgagaugaacaagcucuacgagcgcgucaagcgccagcuccgcgagaacgccgaggaggacggcaccggcugcuucgagaucuuccacaagugcgacgacgacugcauggccuccauccgcaacaacaccuacgaccacuccaaguaccgcgaggaggccaugcagaaccgcauccagaucgaccccgucaagcucuccuccggcuacaaggacgucauccucugguucuccuucggcgccuccugcuucauccuccucgccaucgccaugggccucgucuucaucugcgucaagaacggcaacaugcgcugcaccaucugcaucuga

SEQ ID NO: 106274 - RNA, 1683 nt, Artificial Sequence
  derived and/or modified CDS sequence (opt2) from hemagglutinin__InfluenzaA__AGQ81028
augaacacccagauccucgucuucgcccucaucgccaucauccccaccaacgccgacaagaucugccucggccaccacgccgucuccaacggcaccaaggucaacacccucaccgagcgcggcgucgaggucgucaacgccaccgagaccgucgagcgcaccuccaucccccgcaucugcuccaagggcaagcgcaccgucgaccucggccagugcggccuccucggcaccaucaccggccccccccagugcgaccaguuccucgaguucuccgccgaccucaucaucgagcgccgcgagggcuccgacgucugcuaccccggcaaguucgucaacgaggaggcccuccgccagauccuccgcgaguccggcggcaucgacaaggaggccaugggcuucaccuacuccggcauccgcaccaacggcgccaccuccgccugccgccgcuccggcuccuccuucuacgccgagaugaaguggcuccucuccaacaccgacaacgccgccuucccccccaccaccaaguccuacaagaacacccgcaaggcccccgcccucaucaucuggggcauccaccacuccggcuccaccgccgagcagaccaagcucuacggcuccggcaacaagcucgucaccguccgcuccuccaacuaccagcaguccuucguccccucccccggcgccggcccccaggucaacggccaguccggccgcaucgacuuccacuggcucaugcucaaccccaacgacaccgucaccuucuccuucaacggcgccuucaucgcccccgaccgcgccuccuuccuccgcggcaaguccaugggcauccaguccggcguccaggucgacgccaacugcgagggcgacugcuaccacuccggcggcaccaucaucuccaaccuccccuuccagaacaucgacucccgcgucgucggcaagugcccccgcuacgucaagcagaagucccuccuccucgccaccggcaugaagaacguccccgagauccccaagggccgcggccucuucggcgccaucgccggcuucaucgagaacggcugggagggccucaucgacggcugguacggcuuccgccaccagaacgcccagggcgagggcaccgccgccgacuacaaguccacccaguccgccaucaaccagaugaccggcaagcucaaccgccucaucgagaagaccaaccagcaguucgagcucaucgacaacgaguucaccgaggucgagaagcagaucggcaacgucaucaacuggacccgcgacuccaucaccgagaugugguccuacaacgccgagcuccucgucgccauggagaaccagcacaccaucgaccucgccgacuccgagaugaacaagcucuacgagcgcgucaagcgccagcuccgcgagaacgccgaggaggacggcaccggcugcuucgagaucuuccacaagugcgacgacgacugcauggccuccauccgcaacaacaccuacgaccacuccaaguaccgcgaggaggccaugcagaaccgcauccagaucgaccccgucaagcucuccuccggcuacaaggacgucauccucugguucuccuucggcgccuccugcuucauccuccucgccaucgccaugggccucgucuucaucugcgucaagaacggcaacaugcgcugcaccaucugcaucuga

SEQ ID NO: 106275 - RNA, 1683 nt, Artificial Sequence
  derived and/or modified CDS sequence (opt2) from hemagglutinin__InfluenzaA__AGQ81029
augaacacccagauccucgucuucgcccucaucgccaucauccccaccaacgccgacaagaucugccucggccaccacgccgucuccaacggcaccaaggucaacacccucaccgagcgcggcgucgaggucgucaacgccaccgagaccgucgagcgcaccuccaucccccgcaucugcuccaagggcaagcgcaccgucgaccucggccagugcggccuccucggcaccaucaccggccccccccagugcgaccaguuccucgaguucuccgccgaccucaucaucgagcgccgcgagggcuccgacgucugcuaccccggcaaguucgucaacgaggaggcccuccgccagauccuccgcgaguccggcggcaucgacaaggaggccaugggcuucaccuacuccggcauccgcaccaacggcgucaccuccgccugccgccgcuccggcuccuccuucuacgccgagaugaaguggcuccucuccaacaccgacaacgccgccuucccccccaugaccaaguccuacaagaacacccgcaaggcccccgcccucaucaucuggggcauccaccacuccggcuccaccgccgagcagaccaagcucuacggcuccggcaacaagcucgucaccguccgcuccuccaacuaccagcaguccuucaugcccucccccggcgccggcccccaggucaacggccaguccggccgcaucgacuuccacuggcucaugcucaaccccaacgacaccgucaccuucuccuucaacggcgccuucaucgcccccgaccgcgccuccuuccuccgcggcaaguccaugggcauccaguccggcguccaggucgacgccaacugcgagggcgacugcuaccacuccggcggcaccaucaucuccaaccuccccuuccagaacaucgacucccgcgucgucggcaagugcccccgcuacgucaagcagaagucccuccuccucgccaccggcaugaagaacguccccgagauccccaagggccgcggccucuucggcgccaucgccggcuucaucgagaacggcugggagggccucaucgacggcugguacggcuuccgccaccagaacgcccagggcgagggcaccgccgccgacuacaaguccacccaguccgccaucaaccagaugaccggcaagcucaaccgccucaucgagaagaccaaccagcaguucgagcucaucgacaacgaguucaccgaggucgagaagcagaucggcaacgucaucaacuggacccgcgacuccaucaccgaggucugguccuacaacgccgagcuccucgucgccauggagaaccagcacaccaucgaccucgccgacuccgagaugaacaagcucuacgagcgcgucaagcgccagcuccgcgagaacgccgaggaggacggcaccggcugcuucgagaucuuccacaagugcgacgacgacugcauggccuccauccgcaacaacaccuacgaccacuccaaguaccgcgaggaggccaugcagaaccgcauccagaucgaccccgucaagcucuccuccggcuacaaggacgucauccucugguucuccuucggcgccuccugcuucauccuccucgccaucgccaugggccucgucuucaucugcgucaagaacggcaacaugcgcugcaccaucugcaucuga

SEQ ID NO: 106276 - RNA, 1683 nt, Artificial Sequence
  derived and/or modified CDS sequence (opt2) from hemagglutinin__InfluenzaA__AGQ81031
augaacacccagauccucgucuucgcccucaucgccaucauccccaccaacgccgacaagaucugccucggccaccacgccgucuccaacggcaccaaggucaacacccucaccgagcgcggcgucgaggucgucaacgccaccgagaccgucgagcgcaccuccaucccccgcaucugcuccaagggcaagcgcaccgucgaccucggccagugcggccuccucggcaccaucaccggccccccccagugcgaccaguuccucgaguucuccgccgaccucaucaucgagcgccgcgagggcuccgacgucugcuaccccggcaaguucgucaacgaggaggcccuccgccagauccuccgcgaguccggcggcaucaacaaggaggccaugggcuucaccuacuccggcauccgcaccaacggcgccaccuccgccugccgccgcuccggcuccuccuucuacgccgagaugaaguggcuccucuccaacaccgacaacgccgccuucccccccaugaccaaguccuacaagaacacccgcaaggcccccgcccucaucaucuggggcauccaccacuccggcuccaccgccgagcagaccaagcucuacggcuccggcaacaagauggucaccguccgcuccuccaacuaccagcaguccuucguccccucccccggcgccggcccccaggucaacggccaguccggccgcaucgacuuccacuggcucaugcucaaccccaacgacaccgucaccuucuccuucaacggcgccuucaucgcccccgaccgcgccuccuuccuccgcggcaaguccaugggcauccaguccggcguccaggucgacgccaacugcgagggcgacugcuaccacuccggcggcaccaucaucuccaaccuccccuuccagaacaucgacucccgcgucgucggcaagugcccccgcuacgucaagcagaagucccuccuccucgccaccggcaugaagaacguccccgagauccccaagggccgcggccucuucggcgccaucgccggcuucaucgagaacggcugggagggccucaucgacggcugguacggcuuccgccaccagaacgcccagggcgagggcaccgccgccgacuacaaguccacccaguccgccaucaaccagaugaccggcaagcucaaccgccucaucgagaagaccaaccagcaguucgagcucaucgacaacgaguucaccgaggucgagcgccagaucggcaacgucaucaacuggacccgcgacuccaucaccgaggucugguccuacaacgccgagcuccucgucgccauggagaaccagcacaccaucgaccucgccgacuccgagaugaacaagcucuacgagcgcgucaagcgccagcuccgcgagaacgccgaggaggacggcaccggcugcuucgagaucuuccacaagugcgacgacgacugcauggccuccauccgcaacaacaccuacgaccacuccaaguaccgcgaggaggccaugcagaaccgcauccagaucgaccccgucaagcucuccuccggcuacaaggacgucauccucugguucuccuucggcgccuccugcuucauccuccucgccaucgccaugggccucgucuucaucugcgucaagaacggcaacaugcgcugcaccaucugcaucuga

SEQ ID NO: 106277 - RNA, 1683 nt, Artificial Sequence; identical to SEQ ID NO: 106272
  derived and/or modified CDS sequence (opt2) from hemagglutinin__InfluenzaA__AGQ81032

SEQ ID NO: 106278 - RNA, 1683 nt, Artificial Sequence; identical to SEQ ID NO: 106273
  derived and/or modified CDS sequence (opt2) from hemagglutinin__InfluenzaA__AGQ81033

SEQ ID NO: 106279 - RNA, 1683 nt, Artificial Sequence; identical to SEQ ID NO: 106272
  derived and/or modified CDS sequence (opt2) from hemagglutinin__InfluenzaA__AGQ81034

SEQ ID NO: 106280 - RNA, 1683 nt, Artificial Sequence; identical to SEQ ID NO: 106273
  derived and/or modified CDS sequence (opt2) from hemagglutinin__InfluenzaA__AGQ81035

SEQ ID NO: 106281 - RNA, 1683 nt, Artificial Sequence; identical to SEQ ID NO: 106273
  derived and/or modified CDS sequence (opt2) from hemagglutinin__InfluenzaA__AGQ81036

SEQ ID NO: 106282 - RNA, 1683 nt, Artificial Sequence; identical to SEQ ID NO: 106273
  derived and/or modified CDS sequence (opt2) from hemagglutinin__InfluenzaA__AGQ81037

SEQ ID NO: 106283 - RNA, 1683 nt, Artificial Sequence; identical to SEQ ID NO: 106265
  derived and/or modified CDS sequence (opt2) from hemagglutinin__InfluenzaA__AGQ81038

SEQ ID NO: 106284 - RNA, 1683 nt, Artificial Sequence; identical to SEQ ID NO: 106265
  derived and/or modified CDS sequence (opt2) from hemagglutinin__InfluenzaA__AGQ81039

SEQ ID NO: 106285 - RNA, 1683 nt, Artificial Sequence
  derived and/or modified CDS sequence (opt2) from hemagglutinin__InfluenzaA__AGQ81040
augaacacccagauccucgucuucgcccucaucgccaucauccccaccaacgccgacaagaucugccucggccaccacgccgucuccaacggcaccaaggucaacacccucaccgagcgcggcgucgaggucgucaacgccaccgagaccgucgagcgcaccaacaucccccgcaucugcuccaagggcaagcgcaccgucgaccucggccagugcggccuccucggcaccaucaccggccccccccagugcgaccaguuccucgaguucuccgccgaccucaucaucgagcgccgcgagggcuccgacgucugcuaccccggcaaguucgucaacgaggaggcccuccgccagauccuccgcgaguccggcggcaucgacaaggaggccaugggcuucaccuacuccggcauccgcaccaacggcgccaccuccgccugccgccgcuccggcuccuccuucuacgccgagaugaaguggcuccucuccaacaccgacaacgccgccuucccccagaugaccaaguccuacaagaacacccgcaaggaccccgcccucaucaucuggggcauccaccacuccggcuccaccgccgagcagaccaagcucuacggcuccggcaacaagcucgucaccgucggcuccuccaacuaccagcaguccuucguccccucccccggcgcccgcccccaggucaacggccaguccggccgcaucgacuuccacuggcucaugcucaaccccaacgacaccgucaccuucuccuucaacggcgccuucaucgcccccgaccgcgccuccuuccuccgcggcaaguccaugggcauccaguccggcguccagaucgacgccaacugcgagggcgacugcuaccacuccggcggcaccaucaucuccaaccuccccuuccagaacaucgacucccgcgccgucggcaagugcccccgcuacgucaagcagaagucccuccuccucgccaccggcaugaagaacguccccgagauccccaagggccgcggccucuucggcgccaucgccggcuucaucgagaacggcugggagggccucaucgacggcugguacggcuuccgccaccagaacgcccagggcgagggcaccgccgccgacuacaaguccacccaguccgccaucgaccagaucaccggcaagcucaaccgccucaucgagaagaccaaccagcaguucgagcucaucgacaacgaguucaccgaggucgagaagcagaucggcaacgucaucaacuggacccgcgacuccaucaccgaggucugguccuacaacgccgagcuccucgucgccauggagaaccagcacaccaucgaccucgccgacuccgagaugaacaagcucuacgagcgcgucaagcgccagcuccgcgagaacgccgaggaggacggcaccggcugcuucgagaucuuccacaagugcgacgacgacugcauggccuccauccgcaacaacaccuacgaccacuccaaguaccgcgaggaggccaugcagaaccgcauccagaucgaccccgucaagcucuccuccggcuacaaggacgucauccucugguucuccuucggcgccuccugcuucauccuccucgccaucgccaugggccucgucuucaucugcgucaagaacggcaacaugcgcugcaccaucugcaucuga

SEQ ID NO: 106286 - RNA, 1683 nt, Artificial Sequence
  derived and/or modified CDS sequence (opt2) from hemagglutinin__InfluenzaA__AGQ81041
augaacacccagauccucgucuucgcccucaucgccaucauccccaccaacgccgacaagaucugccucggccaccacgccgucuccaacggcaccaaggucaacacccucaccgagcgcggcgucgaggucgucaacgccaccgagaccgucgagcgcaccaacaucccccgcaucugcuccaagggcaagcgcaccgucgaccucggccagugcggccuccucggcaccaucaccggccccccccagugcgaccaguuccucgaguucuccgccgaccucaucaucgagcgccgcgagggcuccgacgucugcuaccccggcaaguucgucaacgaggaggcccuccgccagauccuccgcgaguccggcggcaucgacaaggaggccaugggcuucaccuacuccggcauccgcaccaacggcgccaccuccgccugccgccgcuccggcuccuccuucuacgccgagaugaaguggcuccucuccaacaccgacaacgccgccuucccccagaccaccaaguccuacaagaacacccgcaaggaccccgcccucaucaucuggggcauccaccacuccggcuccaccgccgagcagaccaagcucuacggcuccggcaacaagcucgucaccgucggcuccuccaacuaccagcaguccuucguccccucccccggcgcccgcccccaggucaacggccaguccggccgcaucgacuuccacuggcucaugcucaaccccaacgacaccgucaccuucuccuucaacggcgccuucaucgcccccgaccgcgccuccuuccuccgcggcaaguccaugggcauccaguccggcguccaggucgacgccaacugcgagggcgacugcuaccacuccggcggcaccaucaucuccaaccuccccuuccagaacaucgacucccgcgccgucggcaagugcccccgcuacgucaagcagaagucccuccuccucgccaccggcaugaagaacguccccgagauccccaagggccgcggccucuucggcgccaucgccggcuucaucgagaacggcugggagggccucaucgacggcugguacggcuuccgccaccagaacgcccagggcgagggcaccgccgccgacuacaaguccacccaguccgccaucgaccagaucaccggcaagcucaaccgccucaucgagaagaccaaccagcaguucgagcucaucgacaacgaguucaccgaggucgagaagcagaucggcaacgucaucaacuggacccgcgacuccaucaccgaggucugguccuacaacgccgagcuccucgucgccauggagaaccagcacaccaucgaccucgccgacuccgagaugaacaagcucuacgagcgcgucaagcgccagcuccgcgagaacgccgaggaggacggcaccggcugcuucgagaucuuccacaagugcgacgacgacugcauggccuccauccgcaacaacaccuacgaccacuccaaguaccgcgaggaggccaugcagaaccgcauccagaucgaccccgucaagcucuccuccggcuacaaggacgucauccucugguucuccuucggcgccuccugcuucauccuccucgccaucgccaugggccucgucuucaucugcgucaagaacggcaacaugcgcugcaccaucugcaucuga

SEQ ID NO: 106287 - RNA, 1683 nt, Artificial Sequence
  derived and/or modified CDS sequence (opt2) from hemagglutinin__InfluenzaA__AGQ81042
augaacacccagauccucgucuucgcccucaucgccaucauccccaccaacgccgacaagaucugccucggccaccacgccgucuccaacggcaccaaggucaacacccucaccgagcgcggcgucgaggucgucaacgccaccgagaccgucgagcgcaccaacaucccccgcaucugcuccaagggcaagcgcaccgucgaccucggccagugcggccuccucggcaccaucaccggccccccccagugcgaccaguuccucgaguucuccgccgaccucaucaucgagcgccgcgagggcuccgacgucugcuaccccggcaaguucgucaacgaggaggcccuccgccagauccuccgcgaguccggcggcaucgacaaggaggccaugggcuucaccuacuccggcauccgcaccaacggcgccaccuccgccugccgccgcuccggcuccuccuucuacgccgagaugaaguggcuccucuccaacaccgacaacgccgccuucccccagaugaccaaguccuacaagaacacccgcaaggaccccgcccucaucaucuggggcauccaccacuccggcuccaccgccgagcagaccaagcucuacggcuccggcaacaagcucgucaccgucggcuccuccaacuaccagcaguccuucguccccucccccggcgcccgcccccaggucaacggccaguccggccgcaucgacuuccacuggcucaugcucaaccccaacgacaccgucaccuucuccuucaacggcgccuucaucgcccccgaccgcgccuccuuccuccgcggcaaguccaugggcauccaguccggcguccaggucgacgccaacugcgagggcgacugcuaccacuccggcggcaccaucaucuccaaccuccccuuccagaacaucgacucccgcgccgucggcaagugcccccgcuacgucaagcagaagucccuccuccucgccaccggcaugaagaacguccccgagauccccaagggccgcggccucuucggcgccaucgccggcuucaucgagaacggcugggagggccucaucgacggcugguacggcuuccgccaccagaacgcccagggcgagggcaccgccgccgacuacaaguccacccaguccgccaucgaccagaucaccggcaagcucaaccgccucaucgagaagaccaaccagcaguucgagcucaucgacaacgaguucaccgaggucgagaagcagaucggcaacgucaucaacuggacccgcgacuccaucaccgaggucugguccuacaacgccgagcuccucgucgccauggagaaccagcacaccaucgaccucgccgacuccgagaugaacaagcucuacgagcgcgucaagcgccagcuccgcgagaacgccgaggaggacggcaccggcugcuucgagaucuuccacaagugcgacgacgacugcauggccuccauccgcaacaacaccuacgaccacuccaaguaccgcgaggaggccaugcagaaccgcauccagaucgaccccgucaagcucuccuccggcuacaaggacgucauccucugguucuccuucggcgccuccugcuucauccuccucgccaucgccaugggccucgucuucaucugcgucaagaacggcaacaugcgcugcaccaucugcaucuga

SEQ ID NO: 106288 - RNA, 1683 nt, Artificial Sequence
  derived and/or modified CDS sequence (opt2) from hemagglutinin__InfluenzaA__AGQ81043
augaacacccagauccucgucuucgcccucaucgccaucauccccaccaacgccgacaagaucugccucggccaccacgccgucuccaacggcaccaaggucaacacccucaccgagcgcggcgucgaggucgucaacgccaccgagaccgucgagcgcaccaacaucccccgcaucugcuccaagggcaagcgcaccgucgaccucggccagugcggccuccucggcaccaucaccggccccccccagugcgaccaguuccucgaguucuccgccgaccucaucaucgagcgccgcgagggcuccgacgucugcuaccccggcaaguucgucaacgaggaggcccuccgccagauccuccgcgaguccggcggcaucgacaaggaggagaugggcuucaccuacuccggcauccgcaccaacggcgccaccuccgccugccgccgcuccggcuccuccuucuacgccgagaugaaguggcuccucuccaacaccgacaacgccgccuucccccagaugaccaaguccuacaagaacacccgcaagucccccgcccucaucgucuggggcauccaccacuccgucuccaccgccgagcagaccaagcucuacggcuccggcaacaagcucgucaccgucggcuccuccaacuaccagcaguccuucguccccucccccggcgcccgcccccaggucaacggccucuccggccgcaucgacuuccacuggcucaugcucaaccccaacgacaccgucaccuucuccuucaacggcgccuucaucgcccccgaccgcgccuccuuccuccgcggcaaguccaugggcauccaguccggcguccaggucgacgccaacugcgagggcgacugcuaccacuccggcggcaccaucaucuccaaccuccccuuccagaacaucgacucccgcgccgucggcaagugcccccgcuacgucaagcagcgcucccuccuccucgccaccggcaugaagaacguccccgagauccccaagggccgcggccucuucggcgccaucgccggcuucaucgagaacggcugggagggccucaucgacggcugguacggcuuccgccaccagaacgcccagggcgagggcaccgccgccgacuacaaguccacccaguccgccaucgaccagaucaccggcaagcucaaccgccucaucgagaagaccaaccagcaguucgagcucaucgacaacgaguucaacgaggucgagaagcagaucggcaacgucaucaacuggacccgcgacuccaucaccgaggucugguccuacaacgccgagcuccucgucgccauggagaaccagcacaccaucgaccucgccgacuccgagauggacaagcucuacgagcgcgucaagcgccagcuccgcgagaacgccgaggaggacggcaccggcugcuucgagaucuuccacaagugcgacgacgacugcauggccuccauccgcaacaacaccuacgaccacuccaaguaccgcgaggaggccaugcagaaccgcauccagaucgaccccgucaagcucuccuccggcuacaaggacgucauccucugguucuccuucggcgccuccugcuucauccuccucgccaucgucaugggccucgucuucaucugcgucaagaacggcaacaugcgcugcaccaucugcaucuga

SEQ ID NO: 106289 - RNA, 1683 nt, Artificial Sequence; identical to SEQ ID NO: 106024
  derived and/or modified CDS sequence (opt2) from hemagglutinin__InfluenzaA__AGQ81044

SEQ ID NO: 106290 - RNA, 1683 nt, Artificial Sequence; identical to SEQ ID NO: 106024
  derived and/or modified CDS sequence (opt2) from hemagglutinin__InfluenzaA__AGQ81045

SEQ ID NO: 106291 - RNA, 1683 nt, Artificial Sequence; identical to SEQ ID NO: 106024
  derived and/or modified CDS sequence (opt2) from hemagglutinin__InfluenzaA__AGQ81046

SEQ ID NO: 106292 - RNA, 1683 nt, Artificial Sequence; identical to SEQ ID NO: 106273
  derived and/or modified CDS sequence (opt2) from hemagglutinin__InfluenzaA__AGQ81047

SEQ ID NO: 106293 - RNA, 1683 nt, Artificial Sequence; identical to SEQ ID NO: 106272
  derived and/or modified CDS sequence (opt2) from hemagglutinin__InfluenzaA__AGQ81049

SEQ ID NO: 106294 - RNA, 1683 nt, Artificial Sequence; identical to SEQ ID NO: 106273
  derived and/or modified CDS sequence (opt2) from hemagglutinin__InfluenzaA__AGQ81050

SEQ ID NO: 106295 - RNA, 1683 nt, Artificial Sequence
  derived and/or modified CDS sequence (opt2) from hemagglutinin__InfluenzaA__AGQ81051
augaacacccagauccucgucuucgcccucaucgccaucauccccaccaacgccgacaagaucugccucggccaccacgccgucuccaacggcaccaaggucaacacccucaccgagcgcggcgucgaggucgucaacgccaccgagaccgucgagcgcaccuccaucccccgcaucugcuccaagggcaagcgcaccgucgaccucggccagugcggccuccucggcaccaucaccggccccccccagugcgaccaguuccucgaguucuccgccgaccucaucaucgagcgccgcgagggcuccgacgucugcuaccccggcaaguucgucaacgaggaggcccuccgccagauccuccgcgaguccggcggcaucaacaaggaggccaugggcuucaccuacuccggcauccgcaccaacggcgccaccuccgccugccgccgcuccggcuccuccuucuacgccgagaugaaguggcuccucuccaacaccgacaacgccgccuucccccccaugaccaaguccuacaagaacacccgcaaggcccccgcccucaucaucuggggcauccaccacuccggcuccaccgccgagcagaccaagcucuacggcuccggcaacaagcucgucaccguccgcuccuccaacuaccagcaguccuucguccccucccccggcgccggcccccaggucaacggccaguccggccgcaucgacuuccacuggcucaugcucaaccccaacgacaccgucaccuucuccuucaacggcgccuucaucgcccccgaccgcgccuccuuccuccgcggcaaguccaugggcauccaguccggcguccaggucgacgccaacugcgagggcgacugcuaccacuccggcggcaccaucaucuccaaccuccccuuccagaacaucgacucccgcgucgucggcaagugcccccgcuacgucaagcagaagucccuccuccucgccaccggcaugaagaacguccccgagauccccaagggccgcggccucuucggcgccaucgccggcuucaucgagaacggcugggagggccucaucgacggcugguacggcuuccgccaccagaacgcccagggcgagggcaccgccgccgacuacaaguccacccaguccgccaucaaccagaugaccggcaagcucaaccgccucaucgagaagaccaaccagcaguucgagcucaucgacaacgaguucaccgaggucgagaagcagaucggcaacgucaucaacuggacccgcgacuccaucaccgaggucugguccuacaacgccgagcuccucgucgccauggagaaccagcacaccaucgaccucgccgacuccgagaugaacaagcucuacgagcgcgucaagcgccagcuccgcgagaacgccgaggaggacggcaccggcugcuucgagaucuuccacaagugcgacgacgacugcauggccuccauccgcaacaacaccuacgaccacuccaaguaccgcgaggaggccaugcagaaccgcauccagaucgaccccgucaagcucuccuccggcuacaaggacgucauccucugguucuccuucggcgccuccugcuucauccuccucgccaucgccaugggccucgucuucaucugcgucaagaacggcaacaugcgcugcaccaucugcaucuga

SEQ ID NO: 106296 - RNA, 1683 nt, Artificial Sequence; identical to SEQ ID NO: 106273
  derived and/or modified CDS sequence (opt2) from hemagglutinin__InfluenzaA__AGQ81052

SEQ ID NO: 106297 - RNA, 1683 nt, Artificial Sequence
  derived and/or modified CDS sequence (opt2) from hemagglutinin__InfluenzaA__AGQ81053
augaacacccagauccucgucuucgcccucaucgccaucauccccaccaacgccgacaagaucugccucggccaccacgccgucuccaacggcaccaaggucaacacccucaccgagcgcggcgucgaggucgucaacgccaccgagaccgucgagcgcaccuccaucccccgcaucugcuccaagggcaagcgcaccgucgaccucggccagugcggccuccucggcaccaucaccggccccccccagugcgaccaguuccucgaguucuccgccgaccucaucaucgagcgccgcgagggcuccgacgucugcuaccccggcaaguucgucaacgaggaggcccuccgccagauccuccgcgaguccggcggcaucaacaaggaggccaugggcuucaccuacuccggcauccgcaccaacggcgccaccuccgccugccgccgcuccggcuccuccuucuacgccgagaugaaguggcuccucuccaacaccgacaacgccgccuucccccccaugaccaaguccuacaagaacacccgcaaggcccccgcccucaucaucuggggcauccaccacuccggcuccaccgccgagcagaccaagcucuacggcuccggcaacaagauggucaccguccgcuccuccaacuaccagcaguccuucguccccucccccggcgccggcccccaggucaacggccaguccggccgcaucgacuuccacuggcucaugcucaaccccaacgacaccgucaccuucuccuucaacggcgccuucaucgcccccgaccgcgccuccuuccuccgcggcaaguccaugggcauccaguccggcguccaggucgacgccaacugcgagggcgacugcuaccacuccggcggcaccaucaucuccaaccuccccuuccagaacaucgacucccgcgucgucggcaagugcccccgcuacgucaagcagaagucccuccuccucgccaccggcaugaagaacguccccgagauccccaagggccgcggccucuucggcgccaucgccggcuucaucgagaacggcugggagggccucaucgacggcugguacggcuuccgccaccagaacgcccagggcgagggcaccgccgccgacuacaaguccacccaguccgccaucaaccagaugaccggcaagcucaaccgccucaucgagaagaccaaccagcaguucgagcucaucgacaacgaguucaccgaggucgagaagcagaucggcaacgucaucaacuggacccgcgacuccaucaccgaggucugguccuacaacgccgagcuccucgucgccauggagaaccagcacaccaucgaccucgccgacuccgagaugaacaagcucuacgagcgcgucaagcgccagcuccgcgagaacgccgaggaggacggcaccggcugcuucgagaucuuccacaagugcgacgacgacugcauggccuccauccgcaacaacaccuacgaccacuccaaguaccgcaaggaggccaugcagaaccgcauccagaucgaccccgucaagcucuccuccggcuacaaggacgucauccucugguucuccuucggcgccuccugcuucauccuccucgccaucgccaugggccucgucuucaucugcgucaagaacggcaacaugcgcugcaccaucugcaucuga

SEQ ID NO: 106298 - RNA, 1683 nt, Artificial Sequence; identical to SEQ ID NO: 106273
  derived and/or modified CDS sequence (opt2) from hemagglutinin__InfluenzaA__AGQ81055

SEQ ID NO: 106299 - RNA, 1683 nt, Artificial Sequence; identical to SEQ ID NO: 106273
  derived and/or modified CDS sequence (opt2) from hemagglutinin__InfluenzaA__AGQ81056

SEQ ID NO: 106300 - RNA, 1683 nt, Artificial Sequence; identical to SEQ ID NO: 106273
  derived and/or modified CDS sequence (opt2) from hemagglutinin__InfluenzaA__AGQ81057

SEQ ID NO: 106301 - RNA, 1683 nt, Artificial Sequence; identical to SEQ ID NO: 106273
  derived and/or modified CDS sequence (opt2) from hemagglutinin__InfluenzaA__AGQ81058

SEQ ID NO: 106302 - RNA, 1683 nt, Artificial Sequence; identical to SEQ ID NO: 106024
  derived and/or modified CDS sequence (opt2) from hemagglutinin__InfluenzaA__AGQ81059

SEQ ID NO: 106303 - RNA, 1683 nt, Artificial Sequence; identical to SEQ ID NO: 106024
  derived and/or modified CDS sequence (opt2) from hemagglutinin__InfluenzaA__AGQ81060

SEQ ID NO: 106304 - RNA, 1683 nt, Artificial Sequence; identical to SEQ ID NO: 106024
  derived and/or modified CDS sequence (opt2) from hemagglutinin__InfluenzaA__AGQ81061

SEQ ID NO: 106305 - RNA, 1683 nt, Artificial Sequence
  derived and/or modified CDS sequence (opt2) from hemagglutinin__InfluenzaA__AGQ81081
auggaggucgucucccucaucaccauccuccucgucaucaccggcuccaacgccgacaagaucugcaucggcuaccaguccaccaacuccaccgagaccgucgacacccucaccgagaacaacguccccgucacccacgccaaggagcuccuccacaccgagcacaacggcaugcucugcgccaccaaccucggccgcccccucauccucgacaccugcaccaucgagggccucaucuacggcaaccccuccugcgacauccuccucggcggccgcgagugguccuacaucgucgagcgccccuccgccgucaacggccucugcuaccccggcaacgucgagaaccucgaggagcuccgcucccucuucuccuccgccuccuccuaccagcgcauccagaucuuccccgacaccaucuggaacgucuccuacuccggcaccuccaaggccugcuccgacuccuucuaccgcuccaugcgcuggcucacccagaagaacaacgccuaccccguccaggacgcccaguacaccaacaaccgcggccgcaacauccucuucauguggggcaucaaccacccccccaccgacaccgcccagaccaaccucuacacccgcaccgacaccaccaccuccgucgccaccgaggacaucaaccgcaccuucaagccccucaucggcccccgcccccucgucaacggccuccagggccgcaucgacuacuacugggccguccuccgccccggccagacccuccgcauccgcuccaacggcaaccucaucgcccccugguacggccacauccucuccggcgagucccacggccgcauccucaagaccgaccucaacuccggcaacugcgucguccagugccagaccgagcgcggcggccucaacaccacccuccccuuccacaacgucuccaaguacgccuucggcaacugccccaaguacgucggcgucaagucccucaagcucgccgucggccuccgcaacguccccgcccgcuccucccgcggccucuucggcgccaucgccggcuucaucgagggcggcugguccggccucgucgccggcugguacggcuuccagcacuccaacgaccagggcaccggcauggccgccgaccgcgacuccacccagaaggccaucgacaagaucaccuccaaggucaacaacaucgucgacaagaugaacaagcaguacgagaucaucgaccacgaguucuccgagaucgagacccgccucaacaugaucaacaacaagaucgacgaccagauccaggacaucugggccuacaacgccgagcuccucguccuccucgagaaccagaagacccucgacgagcacgacgccaacgucaacaaccucuacaacaaggucaagcgcgcccucggcuccaacgccgucgaggacggcaagggcugcuucgagcucuaccacaagugcgacaaccagugcauggagaccauccgcaacggcaccuacaaccgccgcaaguacaaggaggagucccgccucgagcgccagaagaucgagggcgucaagcucgaguccgagggcaccuacaagauccucaccaucuacuccaccgucgccuccucccucgucaucgccaugggcuucgccgccuuccucuucugggccauguccaacggcuccugccgcugcaacaucugcaucuga

SEQ ID NO: 106306 - RNA, 1683 nt, Artificial Sequence
  derived and/or modified CDS sequence (opt2) from hemagglutinin__InfluenzaA__AGQ81086
auggaggucgucucccucaucaccauccuccucgucaucaccggcuccaacgccgacaagaucugcaucggcuaccaguccaccaacuccaccgagaccgucgacacccucaccgagaacaacguccccgucacccacgccaaggagcuccuccacaccgagcacaacggcaugcucugcgccaccaaccucggccgcccccucauccucgacaccugcaccaucgagggccucaucuacggcaaccccuccugcgaccuccuccucggcggccgcgagugguccuacaucgucgagcgccccuccgccgucaacggccucugcuaccccggcaacgucgagaaccucgaggagcuccgcucccucuucuccuccgccuccuccuaccagcgcauccagaucuuccccgacaccaucuggaacgucuccuacuccggcaccuccaaggccugcuccgacuccuucuaccgcuccaugcgcuggcucacccagaagaacaacgccuaccccguccaggacgcccaguacaccaacaaccgcggccgcaacauccucuucauguggggcaucaaccacccccccaccgacaccgcccagaccaaccucuacacccgcaccgacaccaccaccuccgucgccaccgaggacaucaaccgcaccuucaagccccucaucggcccccgcccccucgucaacggccuccagggccgcaucgacuacuacugggccguccuccgccccggccagacccuccgcauccgcuccaacggcaaccucaucgcccccugguacggccacauccucuccggcgagucccacggccgcauccucaagaccgaccucaacuccggcaacugcgucguccagugccagaccgagcgcggcggccucaacaccacccuccccuuccacaacgucuccaaguacgccuucggcaacugccccaaguacgucggcgucaagucccucaagcucgccgucggccuccgcaacguccccgcccgcuccucccgcggccucuucggcgccaucgccggcuucaucgagggcggcugguccggccucgucgccggcugguacggcuuccagcacuccaacgaccagggcaccggcauggccgccgaccgcgacuccacccagaaggccaucgacaagaucaccuccaaggucaacaacaucgucgacaagaugaacaagcaguacgagaucaucgaccacgaguucuccgagaucgagacccgccucaacaugaucaacaacaagaucgacgaccagauccaggacaucugggccuacaacgccgagcuccucguccuccucgagaaccagaagacccucgacgagcacgacgccaacgucaacaaccucuacaacaaggucaagcgcgcccucggcuccaacgccgucgaggacggcaagggcugcuucgagcucuaccacaagugcgacaaccagugcauggagaccauccgcaacggcaccuacaaccgccgcaaguacaaggaggagucccgccucgagcgccagaagaucgagggcgucaagcucgaguccgagggcaccuacaagauccucaccaucuacuccaccgucgccuccucccucgucaucgccaugggcuucgccgccuuccucuucugggccauguccaacggcuccugccgcugcaacaucugcaucuga

SEQ ID NO: 106307 - RNA, 1683 nt, Artificial Sequence
  derived and/or modified CDS sequence (opt2) from hemagglutinin__InfluenzaA__AGQ81087
auggagaccgucucccucaucaccaugcuccucgucgccaccgucaucaacgccgacaagaucugcaucggcuaccaguccaccaacuccaccgagaccgucgacacccucaccgagaacaacguccccgucacccacgccaaggagcuccuccacaccgagcacaacggcaugcucugcgccaccaaccucggccacccccucauccucgacaccugcaccaucgagggccucaucuacggcaaccccuccugcgaccuccuccucggcggccgcgagugguccuacaucgucgagcgccccuccgccgucaacggccucugcuaccccggcaacgucgagaaccucgaggagcuccgcucccucuucuccuccgccuccuccuaccagcgcauccagaucuuccccgacaccaucuggaacgucuccuacuccggcaccuccaaggccugcuccgacuccuucuaccgcuccaugcgcuggcucacccagaagaacaacgccuaccccauccaggacgcccaguacaccaacaaccgcgagaagaacauccucuucauguggggcaucaaccacccccccaccgacaccgcccagaccaaccucuacacccgcaccgacaccaccaccuccgucgccaccgaggagaucaaccgcaccuucaagccccucaucggcccccgcccccucgucaacggccuccagggccgcaucgacuacuacugguccguccucaagcccggccagacccuccgcauccgcuccaacggcaaccucaucgcccccugguacggccacauccucuccggcgagucccacggccgcguccucaagaccgaccucaagcgcggcuccugcaccguccagugccagaccgagaagggcggccucaacaccacccuccccuuccagaacgucuccaaguacgccuucggcaacugcuccaaguacgucggcgucaagucccucaagcucgccgucggccuccgcaacguccccucccgcuccucccgcggccucuucggcgccaucgccggcuucaucgagggcggcugguccggccucgucgccggcugguacggcuuccagcacuccaacgaccagggcgucggcauggccgccgaccgcgacuccacccagaaggccaucgacaagaugaccuccaaggucaacaacaucgucgacaagaugaacaagcaguacgagaucaucaaccacgaguucuccgagaucgagacccgccucaacaugaucaacaacaagaucgacgaccagauccaggacaucugggccuacaacgccgagcuccucguccuccucgagaaccagaagacccucgacgagcacgacgccaacgucaacaaccucuacaacaaggucaagcgcgcccucggcuccaacgccgucgaggacggcaagggcugcuucgagcucuaccacaagugcgacgaccagugcauggagaccauccgcaacggcaccuacaaccgccgccgcuaccaggaggaguccaagcucgagcgccagaagaucgagggcgucaagcucgaguccgagggcaccuacaagauccucaccaucuacuccaccgucgccuccucccucgucaucgccaugggcuucgccgccuuccucuucugggccauguccaacggcuccugccgcugcaacaucugcaucuga

SEQ ID NO: 106308 - RNA, 1683 nt, Artificial Sequence
  derived and/or modified CDS sequence (opt2) from hemagglutinin__InfluenzaA__AGQ81092
auggaggucgucucccucaucaccauccuccucgucaucaccggcuccaacgccgacaagaucugcaucggcuaccaguccaccaacuccaccgagaccgucgacacccucaccgagaacaacguccccgucacccacgccaaggagcuccuccacaccgagcacaacggcaugcucugcgccaccaaccucggccgcccccucauccucgacaccugcaccaucgagggccucaucuacggcaaccccuccugcgaccuccuccucggcggccgcgagugguccuacaucgucgagcgccccuccgccgucaacggccucugcuaccccggcaacgucgagaaccucgaggagcuccgcucccucuucuccuccgccuccuccuaccagcgcauccagaucuuccccgacaccaucuggaacgucuccuacaccggcaccuccaaggccugcuccgacuccuucuaccgcuccaugcgcuggcucacccagaagaacaacgccuaccccguccaggacgcccaguacaccaacaaccgcggccgcaacauccucuucauguggggcaucaaccacccccccaccgacaccacccagaccaaccucuacacccgcaccgacaccaccaccuccgucgccaccgaggacaucaaccgcaccuucaagccccucaucggcccccgcccccucgucaacggccuccagggccgcaucgacuacuacugggccguccuccgccccggccagacccuccgcauccgcuccaacggcaaccucaucgcccccugguacggccacauccucuccggcgagucccacggccgcauccucaagaccgaccucaaguccggcaacugcgucguccagugccagaccgagcgcggcggccucaacaccacccuccccuuccacaacgucuccaaguacgccuucggcaacugccccaaguacgucggcgucaagucccucaagcucgccgucggccuccgcaacguccccgcccgcuccucccgcggccucuucggcgccaucgccggcuucaucgagggcggcugguccggccucgucgccggcugguacggcuuccagcacuccaacgaccagggcaccggcauggccgccgaccgcgacuccacccagaaggccaucgacaagaucaccuccaaggucaacaacaucgucgacaagaugaacaagcaguacgagaucaucgaccacgaguucuccgagaucgagacccgccucaacaugaucaacaacaagaucgacgaccagauccaggacaucugggccuacaacgccgagcuccucguccuccucgagaaccagaagacccucgacgagcacgacgccaacgucaacaaccucuacaacaaggucaagcgcgcccucggcuccaacgccgucgaggacggcaagggcugcuucgagcucuaccacaagugcgacaaccagugcauggagaccauccgcaacggcaccuacaaccgccgcaaguacaaggaggagucccgccucgagcgccagaagaucgagggcgucaagcucgaguccgagggcaccuacaagauccucaccaucuacuccaccgucgccuccucccucgucaucgccaugggcuucgccgccuuccucuucugggccauguccaacggcuccugccgcugcaacaucugcaucuga

SEQ ID NO: 106309 - RNA, 1683 nt, Artificial Sequence
  derived and/or modified CDS sequence (opt2) from hemagglutinin__InfluenzaA__AGQ81095
auggaggucgucucccucaucaccauccuccucgucaucaccgucuccaacgccgacaagaucugcaucggcuaccaguccaccaacuccaccgagaccgucaacacccucaccgaggacaacguccccgucacccacgccaaggagcuccuccacaccgagcacaacggcaugcucugcgccaccaaccucggccgcccccucauccucgacaccugcaccaucgagggccucaucuacggcaaccccuccugcgaccuccuccucggcggccgcgagugguccuacaucgucgagcgccccuccgccgucaacggccucugcuaccccggcaacgucgagaaccucgaggagcuccgcucccucuucuccuccgccuccuccuaccagcgcauccagaucuuccccgacaccaucuggaacgucuccuacuccggcaccuccaaggccugcuccgacuccuucuaccgcuccaugcgcuggcucacccagaagaacaacgccuaccccguccaggacgcccaguacaccaacaaccgcggccgcaacauccucuucauguggggcaucaaccacccccccaccgacaccgcccagaccaaccucuacacccgcaccgacaccaccaccuccgucgccaccgaggacaucaaccgcaccuucaagccccucaucggcccccgcccccucgucaacggccuccagggccgcaucgacuacuacugggccguccucaagcccggccagacccuccgcauccgcuccaacggcaaccucaucgcccccugguacggccacauccucuccggcgagucccacggccgcauccucaagaccgaccucaacuccggcaacugcgucguccagugccaguccgagcgcggcggccucaacaccacccuccccuuccacaacgucuccaaguacgccuucggcaacugccccaaguacgucggcgucaagucccucaagcucgccgucggccuccgcaacguccccgcccgcuccucccgcggccucuucggcgccaucgccggcuucaucgagggcggcugguccggccucgucgccggcugguacggcuuccagcacuccaacgaccagggcaccggcauggccgccgaccgcgacuccacccagaaggccaucgacaagaucaccuccaaggucaacaacaucgucgacaagaugaacaagcaguacgagaucaucgaccacgaguucuccgagaucgagacccgccucaacaugaucaacaacaagaucgacgaccagauccaggacaucugggccuacaacgccgagcuccucguccuccucgagaaccagaagacccucgacgagcacgacgccaacgucaacaaccucuacaacaaggucaagcgcgcccucggcuccaacgccgucgaggacggcaagggcugcuucgagcucuaccacaagugcgacaaccagugcauggagaccauccgcaacggcaccuacgaccgccgcaaguacaaggaggagucccgccucgagcgccagaagaucgagggcgucaagcucgaguccgagggcaccuacaagauccucaccaucuacuccaccgucgccuccucccucgucaucgccaugggcuucgccgccuuccucuucugggccauguccaacggcuccugccgccgcaacaucugcaucuga

SEQ ID NO: 106310 - RNA, 1683 nt, Artificial Sequence
  derived and/or modified CDS sequence (opt2) from hemagglutinin__InfluenzaA__AGQ81099
auggagaccgucucccucaucaccauccuccucaucgucaccgucuccaacgccgacaagaucugcaucggcuaccaguccaccaacuccaccgagaccgucgacacccucaccgagaacaacguccccgucacccacgccaaggagcuccuccacaccgagcacaacggcaugcucugcgccaccaaccucggccacccccucauccucgacaccugcaccaucgagggccucaucuacggcaaccccuccugcgaccuccuccucggcggccgcgagugguccuacaucgucgagcgccccuccgccgucaacggccucugcuaccccggcaacgucgagaaccucgaggagcuccgcucccucuucuccuccgccaacuccuaccagcgcauccagaucuuccccgacaccaucuggaacgucuccuacuccggcaccuccaaggccugcuccgacuccuucuaccgcuccaugcgcuggcucacccagaagaacaacgccuaccccacccaggacgcccaguacaccaacaaccgcgagaagaacauccucuucauguggggcaucaaccacccccccaccgacaccgcccagaccaaccucuacacccgcaccgacaccaccaccuccgucgccaccgaggagaucaaccgcaccuucaagccccucaucggcccccgcccccucgucaacggccuccagggccgcaucgacuacuacugguccguccucaagcccggccagacccuccgcauccgcuccaacggcaaccucaucgcccccugguacggccacauccucuccggcgagucccacggccgcauccucaagaccgaccucaagcgcggcuccugcaccguccagugccagaccgagaagggcggccucaacaccacccuccccuuccagaacgucuccaaguacgccuucggcaacugcuccaaguacgucggcgucaagucccucaagcucgccgucggccuccgcaacguccccucccgcuccucccgcggccucuucggcgccaucgccggcuucaucgagggcggcugguccggccucgucgccggcugguacggcuuccagcacuccaacgaccagggcgucggcauggccgccgaccgcgacuccacccagaaggccaucgacaaggucaccuccaaggucaacaacaucgucgacaagaugaacaagcaguacgagaucaucgaccacgaguucuccgaggucgagacccgccucaacaugaucaacaacaagaucgacgaccagauccaggacaucugggccuacaacgccgagcuccucguccuccucgagaaccagaagacccucgacgagcacgacgccaacgucaacaaccucuacaacaaggucaagcgcgcccucggcuccaacgccgucgaggacggcaagggcugcuucgagcucuaccacaagugcgacgaccagugcauggagaccauccgcaacggcaccuacaaccgccgcaaguaccaggaggaguccaagcucgagcgccagaagaucgagggcgucaagcucgaguccgagggcaccuacaagauccucaccaucuacuccaccgucgccuccucccucgucaucgccaugggcuucgccgccuuccucuucugggccauguccaacggcuccugccgccgcaacaucugcaucuga

SEQ ID NO: 106311 - RNA, 1683 nt, Artificial Sequence
  derived and/or modified CDS sequence (opt2) from hemagglutinin__InfluenzaA__AGQ81100
auggagaccgucucccucaucaccaugcuccucgucgccaccgucaucaacgccgacaagaucugcaucggcuaccaguccaccaacuccaccgagaccgucgacacccucaccgagaacaacguccccgucacccacgccaaggagcuccuccacaccgagcacaacggcaugcucugcgccaccaaccucggccacccccucauccucgacaccugcaccaucgagggccucaucuacggcaaccccuccugcgaccuccuccucggcggccgcgagugguccuacaucgucgagcgccccuccgccgucaacggccucugcuaccccggcaacgucgagaaccucgaggagcuccgcucccucuucuccuccgccuccuccuaccagcgcauccagaucuuccccgacaccaucuggaacgucuccuacuccggcaccuccaaggccugcuccgacuccuucuaccgcuccaugcgcuggcucacccagaagaacaacgccuaccccauccaggacgcccaguacaccaacaaccgcgagaagaacauccucuucauguggggcaucaaccacccccccaccgacaccgcccagaccaaccucuacacccgcaccgacaccaccaccuccgucgccaccgaggagaucaaccgcaccuucaagccccucaucggcccccgcccccucgucaacggccuccagggccgcaucgacuacuacugguccguccucaagcccggccagacccuccgcauccgcuccaacggcaaccucaucgcccccugguacggccacauccucuccggcgagucccacggccgcauccucaagaccgaccucaagcgcggcuccugcaccguccagugccagaccgagaagggcggccucaacaccacccuccccuuccagaacgucuccaaguacgccuucggcaacugcuccaaguacgucggcgucaagucccucaagcucgccgucggccuccgcaacguccccucccgcuccucccgcggccucuucggcgccaucgccggcuucaucgagggcggcugguccggccucgucgccggcugguacggcuuccagcacuccaacgaccagggcgucggcauggccgccgaccgcgacuccacccagaaggccaucgacaagaucaccuccaaggucaacaacaucgucgacaagaugaacaagcaguacgagaucaucgaccacgaguucuccgaggucgagacccgccucaacaugaucaacaacaagaucgacgaccagauccaggacaucugggccuacaacgccgagcuccucguccuccucgagaaccagaagacccucgacgagcacgacgccaacgucaacaaccucuacaacaaggucaagcgcgcccucggcuccaacgccgucgaggacggcaagggcugcuucgagcucuaccacaagugcgacgaccagugcauggagaccauccgcaacggcaccuacaaccgccgccgcuaccaggaggaguccaagcucgagcgccagaagaucgagggcgucaagcucgaguccgagggcaccuacaagauccucaccaucuacuccaccgucgccuccucccucgucaucgccaugggcuucgccgccuuccucuucugggccauguccaacggcuccugccgccgcaacaucugcaucuga

SEQ ID NO: 106312 - RNA, 1683 nt, Artificial Sequence
  derived and/or modified CDS sequence (opt2) from hemagglutinin__InfluenzaA__AGQ81123
auggaggucgucucccucaucaccauccuccucgucaucaccgucuccaacgccgacaagaucugcaucggcuaccaguccaccaacuccaccgagaccgucaacacccucaccgaggacaacguccccgucacccacgccaaggagcuccuccacaccgagcacaacggcaugcucugcgccaccaaccucggccgcccccucauccucgacaccugcaccaucgagggccucaucuacggcaaccccuccugcgaccuccuccucggcggccgcgagugguccuacaucgucgagcgccccuccgccgucaacggccucugcuaccccggcaacgucgagaaccucgaggagcuccgcucccucuucuccuccgccuccuccuaccagcgcauccagaucuuccccgacaccaucuggaacgucuccuacuccggcaccuccaaggccugcuccgacuccuucuaccgcuccaugcgcuggcucacccagaagaacaacgccuaccccguccaggacgcccaguacaccaacaacaagggccgcaacauccucuucauguggggcaucaaccacccccccaccgacaccgcccagaccaaccucuacacccgcaccgacaccaccaccuccgucgccaccgaggacaucaaccgcaccuucaagccccucaucggcccccgcccccucgucaacggccuccagggccgcaucgacuacuacugggccguccucaagcccggccagacccuccgcauccgcuccaacggcaaccucaucgcccccugguacggccacauccuccucggcgagucccacggccgcauccucaagaccgaccucaacuccggcgacugcgucguccagugccaguccgagcgcggcggccucaacaccacccuccccuuccacaacgucuccaaguacgccuucggcaacugccccaaguacgucggcgucaagucccucaagcucgccgucggccuccgcaacguccccgcccgcuccacccgcggccucuucggcgccaucgccggcuucaucgagggcggcugguccggccucgucgccggcugguacggcuuccagcacuccaacgaccagggcaccggcauggccgccgaccgcgacuccacccagaaggccaucgacaagaucaccuccaaggucaacaacaucgucgacaagaugaacaagcaguacgagaucaucgaccacgaguucuccgagaucgagacccgccucaacaugaucaacaacaagaucgacgaccagauccaggacaucugggccuacaacgccgagcuccucguccuccucgagaaccagaagacccucgacgagcacgacgccaacgucaacaaccucuacaacaaggucaagcgcgcccucggcuccaacgccgucgaggacggcaagggcugcuucgagcucuaccacaagugcgacaaccagugcauggagaccauccgcaacggcaccuacgaccgccgcaaguacaaggaggagucccgccucgagcgccagaagaucgagggcgucaagcucgaguccgagggcaccuacaagauccucaccaucuacuccaccgucgccuccucccucgucaucgccaugggcuucgccgccuuccucuucugggccauguccaacggcuccugccgcugcaacaucugcaucuga

SEQ ID NO: 106313 - RNA, 1683 nt, Artificial Sequence
  derived and/or modified CDS sequence (opt2) from hemagglutinin__InfluenzaA__AGQ81124
auggaggucgccacccucaucaccauccuccucgucaucaccggcuccaacgccgacaagaucugcaucggcuaccaguccaccaacuccaccgagaccgucgacacccucaccgagaacaacguccccgucacccacgccaaggagcuccuccacaccgagcacaacggcaugcucugcgccaccaaccucggccgcccccucauccucgacaccugcaccaucgagggccucaucuacggcaaccccuccugcgaccucccccucgagggccgcgagugguccuacaucgucgagcgccccuccgccgucaacggcgucugcuaccccggcaacgucgagaaccucgaggagcuccgcucccucuucuccuccgccuccuccuaccagcgcauccagaucuuccccgacuccaucuggaacgucuccuacuccggcaccuccaaggccugcuccgacuccuucuaccgcaacaugcgcuggcucacccagaaggacaacaacuaccccguccaggacgcccaguacaccaacaaccgcggcaagaacauccucuucauguggggcaucaaccacccccccaccgacaccgcccagaccaaccucuacacccgcaccgacaccaccaccuccgucgccaccgaggacaucaaccgcaccuucaagccccucaucggcccccgcccccucgucaacggccuccagggccgcaucgacuacuacugggccguccucaagcccggccagacccuccgcguccgcuccaacggcaaccucaucgcccccugguacggccacauccuccucggcgagucccacggccgcauccucaagaccgaccucaaguccggcaacugcgucguccagugccagaccgagcgcggcggccucaacaccacccuccccuuccacaacgucuccaaguacgccuucggcaacugccccaaguacaucggcgucaagucccucaagcucgccgucggccuccgcaacguccccgcccgcuccucccgcggccucuucggcgccaucgccggcuucaucgagggcggcugguccggccucgucgccggcugguacggcuuccagcacuccaacgaccagggcaccggcauggccgccgaccgcgacuccacccagaaggccaucgacaagaucaccuccaaggucaacaacaucgucgacaagaugaacaagcaguacgagaucaucgaccacgaguucuccgagaucgagacccgccucaacaugaucaacgacaagaucgacgaccagauccaggacaucugggccuacaacgccgagcuccucguccuccucgagaaccagaagacccucgacgagcacgacgccaacgucaacaaccucuacaacaaggucaagcgcgcccucggcuccaacgccgucgaggacggcaagggcugcuucgaccucuaccacaagugcgacaaccagugcauggagaccauccgcaacggcaccuacaaccgccgcaaguaccagaaggagucccgccucgagcgccagaagaucgagggcgucaagcucgaguccgagggcaccuacaagauccucaccaucuacuccaccgucgccuccucccucgucaucgccaugggcuucgccgccuuccucuucugggccauguccaacggcuccugccgcugcaacaucugcaucuga

SEQ ID NO: 106314 - RNA, 1683 nt, Artificial Sequence
  derived and/or modified CDS sequence (opt2) from hemagglutinin__InfluenzaA__AGQ81125
auggaggucgccacccucaucaccauccuccucgucaucaccggcuccaacgccgacaagaucugcaucggcuaccaguccaccaacuccaccgagaccgucgacacccucaccgagaacaacguccccgucacccacgccaaggagcuccuccacaccgagcacaacggcaugcucugcgccaccaaccucggccgcccccucauccucgacaccugcaccaucgagggccucaucuacggcaaccccuccugcgaccucccccucgagggccgcgagugguccuacaucgucgagcgccccuccgccgucaacggcgucugcuaccccggcaacgucgagaaccucgaggagcuccgcucccucuucuccuccgccuccuccuaccagcgcauccagaucuuccccgacuccaucuggaacgucuccuacuccggcaccuccaaggccugcuccgacuccuucuaccgcuccaugcgcuggcucacccagaaggacaacaacuaccccguccaggacgcccaguacaccaacaaccgcggcaagaacauccucuucauguggggcaucaaccacccccccaccgacaccgcccagaccaaccucuacacccgcaccgacaccaccaccuccgucgccaccgaggacaucaaccgcaccuucaagccccucaucggcccccgcccccucgucaacggccuccagggccgcaucgacuacuacugggccguccucaagcccggccagacccuccgcguccgcuccaacggcaaccucaucgcccccugguacggccacauccuccucggcgucucccacggccgcauccucaagaccgaccucaaguccggcaacugcgucguccagugccagaccgagcgcggcggccucaacaccacccuccccuuccacaacgucuccaaguacgccuucggcaacugccccaaguacaucggcgucaagucccucaagcucgccgucggccuccgcaacguccccgcccgcuccucccgcggccucuucggcgccaucgccggcuucaucgagggcggcugguccggccucgucgccggcugguacggcuuccagcacuccaacgaccagggcaccggcauggccgccgaccgcgacuccacccagaaggccaucgacaagaucaccuccaaggucaacaacaucgucgacaagaugaacaagcaguacgagaucaucgaccacgaguucuccgagaucgagacccgccucaacaugaucaacgacaagaucgacgaccagauccaggacaucugggccuacaacgccgagcuccucguccuccucgagaaccagaagacccucgacgagcacgacgccaacgucaacaaccucuacaacaaggucaagcgcgcccucggcuccaacgccgucgaggacggcaagggcugcuucgaccucuaccacaagugcgacaaccagugcauggagaccauccgcaacggcaccuacaaccgccgcaaguaccaggaggagucccgccucgagcgccagaagaucgagggcgucaagcucgaguccgagggcaccuacaagauccucaccaucuacuccaccgucgccuccucccucgucaucgccaugggcuucgccgccuuccucuucugggccauguccaacggcuccugccgcugcaacaucugcaucuga

SEQ ID NO: 106315 - RNA, 1683 nt, Artificial Sequence
  derived and/or modified CDS sequence (opt2) from hemagglutinin__InfluenzaA__AGQ81126
auggagaccaucucccucaugaccauccuccucaucaccaccgccuccaacgccgacaagaucugcaucggccaccaguccaccaacuccaccgagaccgucgacacccucaccgagaccaacguccccgucacccacgccaaggagcuccuccagaccgagcacaacggcaugcucugcgccaccaaccucggccacccccucauccucgacaccugcaccaucgagggccucaucuacggcaaccccuccugcgaccuccuccucgagggccgcgagugguccuacaucgucgagcgccccuccgccgucaacggcaccugcuaccccggcaacgucgagaaccucgaggagcuccgcacccucuucuccuccgccuccuccuaccagcgcauccagaucuuccccgacaccaucuggaacgucaccuacaccggcaccucccgcuccugcuccggcuccuucuaccgcuccaugcgcuggcucacccagaaguccggcuucuaccccguccaggacgccaaguacaccaacaaccgcggcaagaacauccucuucgucuggggcauccaccacccccacaccuacaccgaccagaccacccucuacauccgcaacgacaccaccaccuccgucaccaccgaggagcucaaccgcaucuucaagcccgucaucgucccccgccuccucgucaacggccagcagggccgcaucgacuacuacugguccguccucaagcccggccagacccuccgcguccgcuccaacggcaaccucaucgcccccugguacggccacguccucuccggcggcucccacggccgcauccucaagaccgaccucaagggcggcaacugcgucguccagugccagaccgagaagggcggcuucaacuccacccuccccuuccacaacaucuccaaguacgccuucggcaccugccccaaguacgucaaggucaacucccucaagcucgccaucggccuccgcaacguccccgcccgcuccaaccgcggccucuucggcgccaucgccggcuucaucgagggcggcuggcccggccucgucgccggcugguacggcuuccagcacuccaacgaccagggcgucggcauggccgccgaccgcgacuccacccagaaggccgucgacaagaucaccuccaaggucaacaacaucgucgacaagaugaacaagcaguacgagaucaucgaccacgaguucuccgaggucgagacccgccucaacaugaucaacaacaagaucgacgaccagauccaggacaucugggccuacaacgccgagcuccucguccuccucgagaaccagaagacccucgacgagcacgacgccaacgucaacaaccucuacaacaaggucaagcgcgcccucggcuccaacgccauggaggacggcaagggcugcuucgagcucuaccacaagugcgacgaccagugcauggagaccauccgcaacggcaccuacaaccgccgcaaguaccgcgaggagucccgccucgagcagcagcgcaucgagggcgucaagcucgaguccgagggcaccuacaagauccucaccaucuacuccaccgucgccuccucccucguccucgccaugggcuucgccgccuuccucuucugggccauguccaacggcuccugccgcugcaacaucugcaucuga

SEQ ID NO: 106316 - RNA, 1683 nt, Artificial Sequence
  derived and/or modified CDS sequence (opt2) from hemagglutinin__InfluenzaA__AGQ81127
auggaggucgccacccucaucaccauccuccuccucaucaccggcuccaacgccgacaagaucugcaucggcuaccaguccaccaacuccaccgagaccgucgacacccucaccgagaacaacguccccgucacccacgccaaggagcuccuccacaccgagcacaacggcaugcucugcgccaccaaccucggccgcccccucauccucgacaccugcaccaucgagggccucaucuacggcaaccccuccugcgaccucccccucgagggccgcgagugguccuacaucgucgagcgccccuccgccgucaacggcgucugcuaccccggcaacgucgagaaccucgaggagcuccgcucccucuucuccuccgccuccuccuaccagcgcauccagaucuuccccgacuccaucuggaacgucuccuacuccggcaccuccaaggccugcuccgacuccuucuaccgcuccaugcgcuggcucacccagaagaacaacaacuaccccguccaggacgcccaguacaccaacaaccgcggcaagaacauccucuucauguggggcaucaaccacccccccaccgacaccgcccagaccaaccucuacacccgcaccgacaccaccaccuccgucgccaccgaggacaucaaccgcaccuucaagccccucaucggcccccgcccccucgucaacggccuccagggccgcaucgacuacuacugggccguccucaagcccggccagacccuccgcguccgcuccaacggcaaccucaucgcccccugguacggccacauccuccucggcgagucccacggccgcauccucaagaccgaccucaaguccggcaacugcgucguccagugccagaccgagcgcggcggccucaacaccacccuccccuuccacaacgucuccaaguacgccuucggcaacugccccaaguacaucggcgucaagucccucaagcucgccgucggccuccgcaacguccccgcccgcuccucccgcggccucuucggcgccaucgccggcuucaucgagggcggcugguccggccucgucgccggcugguacggcuuccagcacuccaacgaccagggcaccggcauggccgccgaccgcgacuccacccagaaggccaucgacaagaucaccuccaaggucaacaacaucgucgacaagaugaacaagcaguacgagaucaucgaccacgaguucuccgagaucgagacccgccucaacaugaucaacgacaagaucgacgaccagauccaggacaucugggccuacaacgccgagcuccucguccuccucgagaaccagaagacccucgacgagcacgacgccaacgucaacaaccucuacaacaaggucaagcgcgcccucggcuccaacgccgucgaggacggcaagggcugcuucgaccucuaccacaagugcgacaaccagugcauggagaccauccgcaacggcaccuacaaccgccgcaaguaccaggaggagucccgccucgagcgccagaagaucgagggcgucaagcucgaguccgagggcaccuacaagauccucaccaucuacuccaccgucgccuccucccucgucaucgccaugggcuucgccgccuuccucuucugggccauguccaacggcuccugccgcugcaacaucugcaucuga

SEQ ID NO: 106317 - RNA, 1683 nt, Artificial Sequence
  derived and/or modified CDS sequence (opt2) from hemagglutinin__InfluenzaA__AGQ81128
auggaggccgccaccaucaucaccauccuccucgucaucaccggcuccaacgccgacaagaucugcaucggcuaccaguccaccaacuccaccgagaccgucgacacccucaccgagaacaacguccccgucacccacgccaaggagcuccuccacaccgagcacaacggcaugcucugcgccaccaaccucggccgcccccucauccucgacaccugcaccaucgagggccucaucuacggcaaccccuccugcgaccucccccucgagggccgcgagugguccuacaucgucgagcgccccuccgccgucaacggcgucugcuaccccggcaacgucgagaaccucgaggagcuccgcucccucuucuccuccgccuccuccuaccagcgcauccagaucuuccccgacuccaucuggaacgucuccuacuccggcaccuccaaggccugcuccgacuccuucuaccgcuccaugcgcuggcucacccagaagaacaacaacuaccccguccaggacgcccaguacaccaacaaccgcggcaagaacauccucuucauguggggcaucaaccacccccccaccgacaccgcccagaccaaccucuacacccgcaccgacaccaccaccuccgucgccaccgaggacaucaaccgcaccuucaagccccucaucggcccccgcccccucgucaacggccuccagggccgcaucgacuacuacugggccguccucaagcccggccagacccuccgcguccgcuccaacggcaaccucaucgcccccugguacggccacauccuccucggcgagucccacggccgcauccucaagaccgaccucaaguccggcaacugcgucguccagugccagaccgagcgcggcggccucaacaccacccuccccuuccacaacgucuccaaguacgccuucggcaacugccccaaguacaucggcgucaagucccucaagcucgccgucggccuccgcaacguccccgcccgcuccucccgcggccucuucggcgccaucgccggcuucaucgagggcggcugguccggccucgucgccggcugguacggcuuccagcacuccaacgaccagggcaccggcauggccgccgaccgcgacuccacccagaaggccaucgacaagaucaccuccaaggucaacaacaucgucgacaagaugaacaagcaguacgacaucaucgaccacgaguucuccgagaucgagacccgccucaacaugaucaacgacaagaucgacgaccagauccaggacaucugggccuacaacgccgagcuccucguccuccucgagaaccagaagacccucgacgagcacgacgccaacgucaacaaccucuacaacaaggucaagcgcgcccucggcuccaacgccgucgaggacggcaagggcugcuucgaccucuaccacaagugcgacaaccagugcauggagaccauccgcaacggcaccuacaaccgccgcaaguaccaggaggagucccgccucgagcgccagaagaucgagggcgucaagcucgaguccgagggcaccuacaagauccucaccaucuacuccaccgucgccuccucccucgucgucgccaugggcuucgccgccuuccucuucugggccauguccaacggcuccugccgcugcaacaucugcaucuga

SEQ ID NO: 106318 - RNA, 1683 nt, Artificial Sequence
  derived and/or modified CDS sequence (opt2) from hemagglutinin__InfluenzaA__AGQ81130
auggagaccgucucccucaucaccauccuccucgucgucaccaucggcaacgccgacaagaucugcaucggcuaccaguccaccaacuccaccgagaccgucgacacccucaccgagaacaacguccccgucacccacgccaaggagcuccuccacaccgagcacaacggcaugcucugcgccaccucccucggccacccccucauccucgacaccugcaccaucgagggccucaucuacggcaaccccuccugcgaccuccuccucggcggccgcgagugguccuacaucgucgagcgccccuccgccgucaacggccucugcuaccccggcaacgucgagaaccucgaggagcuccgcucccucuucuccuccgcccgcuccuaccagcgcauccagaucuuccccgacaccaucuggaacgucuccuacuccggcaccuccaaggccugcuccgacuccuucuaccgcuccaugcgcuggcucacccagaagaacaacgccuaccccauccaggacgcccaguacaccaacaaccaggagaagaacauccucuucauguggggcaucaaccacccccccaccgacaccguccagaccaaccucuacacccgcaccgacaccaccaccuccgucgccaccgaggagaucaaccgcaccuucaagccccucaucggcccccgcccccucgucaacggccuccagggccgcaucgacuacuacugguccguccucaagcccggccagacccuccgcauccgcuccaacggcaaccucaucgcccccugguacggccacauccucuccggcgagucccacggccgcauccucaagaccgaccucaagcgcggcuccugcaccguccagugccagaccgagaagggcggccucaacaccacccuccccuuccagaacgucuccaaguacgccuucggcaacugcuccaaguacaucggcaugaagucccucaagcucgccgucggccuccgcaacguccccucccgcuccucccgcggccucuucggcgccaucgccggcuucaucgagggcggcugguccggccucgucgccggcugguacggcuuccagcacuccaacgaccagggcgucggcauggccgccgaccgcgacuccacccagaaggccaucgacaagaucaccuccaaggucaacaacaucgucgacaagaugaacaagcaguacgagaucaucgaccacgaguucuccgaggucgagacccgccucaacaugaucaacaacaagaucgacgaccagauccaggacaucugggccuacaacgccgagcuccucguccuccucgagaaccagaagacccucgacgagcacgacgccaacgucaacaaccucuacaacaaggucaagcgcgcccucggcuucaacgccgucgaggacggcaagggcugcuucgagcucuaccacaagugcgacgaccagugcauggagaccauccgcaacggcaccuacaaccgccgcaaguaccaggaggaguccaagcucgagcgccagaagaucgagggcgucaagcucgaguccgagggcaccuacaagauccucaccaucuacuccaccgucgccuccucccucgucaucgccaugggcuucgccgccuuccucuucugggccauguccaacggcuccugccgcugcaacaucugcaucuga

SEQ ID NO: 106319 - RNA, 1683 nt, Artificial Sequence
  derived and/or modified CDS sequence (opt2) from hemagglutinin__InfluenzaA__AGQ81132
auggagaccaucucccucaugaccauccuccucaucaccaccgccuccaacgccgacaagaucugcaucggccaccaguccaccaacuccaccgagaccgucgacacccucaccgagaccaacguccccgucacccacgccaaggagcuccuccagaccgagcacaacggcaugcucugcgccaccaaccucggccacccccucauccucgacaccugcaccaucgagggccucaucuacggcaaccccuccugcgaccuccuccucgagggccgcgagugguccuacaucgucgagcgccccuccgccgucaacggcaccugcuaccccggcaacgucgagaaccucgaggagcuccgcacccucuucuccuccgccuccuccuaccagcgcauccagaucuuccccgacaccaucuggaacgucaccuacaccggcaccucccgcuccugcuccggcuccuucuaccgcuccaugcgcuggcucacccagaaguccggcuucuaccccguccaggacgccaaguacaccaacaaccgcggcaagaacauccucuucgucuggggcauccaccacccccacaccuacaccgaccagaccacccucuacauccgcaacgacaccaccaccuccgucaccaccgaggagcucaaccgcaucuucaagcccgucaucgucccccgccuccucgucaacggccagcagggccgcaucgacuacuacugguccguccucaagcccggccagacccuccgcguccgcuccaacggcaaccucaucgcccccugguacggccacguccucuccggcggcucccacggccgcauccucaagaccgaccucaagggcggcaacugcgucguccagugccagaccgagaagggcggcuucaacuccacccuccccuuccacaacaucuccaaguacgccuucggcaccugccccaaguacgucaaggucaacucccucaagcucgccaucggccuccgcaacguccccgcccgcuccaaccgcggccucuucggcgccaucgccggcuucaucgagggcggcuggcccggccucgucgccggcugguacggcuuccagcacuccaacgaccagggcgucggcauggccgccgaccgcgacuccacccagaaggccgucgacaagaucaccuccaaggucaacaacaucgucgacaagaugaaccgccaguacgagaucaucgaccacgaguucuccgaggucgagacccgccucaacaugaucaacaacaagaucgacgaccagauccaggacaucugggccuacaacgccgagcuccucguccuccucgagaaccagaagacccucgacgagcacgacgccaacgucaacaaccucuacaacaaggucaagcgcgcccucggcuccaacgccauggaggacggcaagggcugcuucgagcucuaccacaagugcgacgaccagugcauggagaccauccgcaacggcaccuacaaccgccgcaaguaccgcgaggagucccgccucgagcagcagcgcaucgagggcgucaagcucgaguccgagggcaccuacaagauccucaccaucuacuccaccgucgccuccucccucguccucgccaugggcuucgccgccuuccucuucugggccauguccaacggcuccugccgcugcaacaucugcaucuga

SEQ ID NO: 106320 - RNA, 1683 nt, Artificial Sequence
  derived and/or modified CDS sequence (opt2) from hemagglutinin__InfluenzaA__AGQ81133
auggagaccaucucccucaugaccauccuccucaucaccaccgccuccaacgccgacaagaucugcaucggccaccaguccaccaacuccaccgagaccgucgacacccucaccgagaccaacguccccgucacccacgccaaggagcuccuccagaccgagcacaacggcaugcucugcgccaccaaccucggccacccccucauccucgacaccugcaccaucgagggccucaucuacggcaaccccuccugcgaccuccuccucgagggccgcgagugguccuacaucgucgagcgccccuccgccgucaacggcaccugcuaccccggcaacgucgagaaccucgaggagcuccgcacccucuucuccuccgccuccuccuaccagcgcauccagaucuuccccgacaccaucuggaacgucaccuacaccggcaccucccgcuccugcuccggcuccuucuaccgcuccaugcgcuggcucacccagaaguccggcuucuaccccguccaggacgccaaguacaccaacaaccgcggcaagaacauccucuucgucuggggcauccaccacccccacaccuacaccgaccagaccacccucuacauccgcaacgacaccaccaccuccgucaccaccgaggagcucaaccgcaucuucaagcccgucaucgucccccgccuccucgucaacggccagcagggccgcaucgacuacuacugguccguccucaagcccggccagacccuccgcguccgcuccaacggcaaccucaucgcccccugguacggccacauccucuccggcggcucccacggccgcauccucaagaccgaccucaaguccggcaacugcgucguccagugccagaccgagaagggcggcuucaacuccacccuccccuuccacaacaucuccaaguacgccuucggcaccugccccaaguacgucaaggucaacucccucaagcucgccaucggccuccgcaacguccccgcccgcuccaaccgcggccucuucggcgccaucgccggcuucaucgagggcggcuggcccggccucgucgccggcugguacggcuuccagcacuccaacgaccagggcgucggcauggccgccgaccgcgacuccacccagaaggccgucgacaagaucaccuccaaggucaacaacaucgucgacaagaugaacaagcaguacgagaucaucgaccacgaguucuccgaggucgagacccgccucaacaugaucaacaacaagaucgacgaccagauccaggacaucugggccuacaacgccgagcuccucguccuccucgagaaccagaagacccucgacgagcacgacgccaacgucaacaaccucuacaacaaggucaagcgcgcccucggcuccaacgccauggaggacggcaagggcugcuucgagcucuaccacaagugcgacgaccagugcauggagaccauccgcaacggcaccuacaaccgccgcaaguaccgcgaggagucccgccucgagcagcagcgcaucgagggcgucaagcucgaguccgagggcaccuacaagauccucaccaucuacuccaccgucgccuccucccucguccucgccaugggcuucgccgccuuccucuucugggccauguccaacggcuccugccgcugcaacaucugcaucuga

SEQ ID NO: 106321 - RNA, 1683 nt, Artificial Sequence
  derived and/or modified CDS sequence (opt2) from hemagglutinin__InfluenzaA__AGQ81134
auggagaccaucucccucaugaccauccuccucaucaccaccgccuccaacgccgacaagaucugcaucggccaccaguccaccaacuccaccgagaccgucgacacccucaccgagaccaacguccccgucacccacgccaaggagcuccuccagaccgagcacaacggcaugcucugcgccaccaaccucggccacccccucauccucgacaccugcaccaucgagggccucaucuacggcaaccccuccugcgaccuccuccucgagggccgcgagugguccuacaucgucgagcgccccuccgccgccaacggcaccugcuaccccggcaacgucgagaaccccgaggagcuccgcacccucuucuccuccgccuccuccuaccagcgcauccagaucuuccccgacaccaucuggaacgucaccuacaccggcaccucccgcuccugcuccggcuccuucuaccgcuccaugcgcuggcucacccagaaguccggcuucuaccccguccaggacgccaaguacaccaacaaccgcggcaagaacauccucuucgucuggggcauccaccacccccacaccuacaccgaccagaccacccucuacauccgcaacgacaccaccaccuccgucaccaccgaggagcucaaccgcaucuucaagcccgucaucgucccccgccuccucgucaacggccagcagggccgcaucgacuacuacugguccguccucaagcccggccagacccuccgcguccgcuccaacggcaaccucaucgcccccugguacggccacguccucuccggcggcucccacggccgcauccucaagaccgaccucaaguccggcaacugcgucguccagugccagaccgagaagggcggcuucaacuccacccuccccuuccacaacaucuccaaguacgccuucggcaccugccccaaguacgucaaggucaacucccucaagcucgccaucggccuccgcaacguccccgcccgcuccaaccgcggccucuucggcgccaucgccggcuucaucgagggcggcuggcccggccucgucgccggcugguacggcuuccagcacuccaacgaccagggcgucggcauggccgccgaccgcgacuccacccagaaggccgucgacaagaucaccuccaaggucaacaacaucgucgacaagaugaacaagcaguacgagaucaucgaccacgaguucuccgaggucgagacccgccucaacaugaucaacaacaagaucgacgaccagauccaggacaucugggccuacaacgccgagcuccucguccuccucgagaaccagaagacccucgacgagcacgacgccaacgucaacaaccucuacaacaaggucaagcgcgcccucggcuccaacgccauggaggacggcaagggcugcuucgagcucuaccacaagugcgacgaccagugcauggagaccauccgcaacggcaccuacaaccgccgcaaguaccgcgaggagucccgccucgagcagcagcgcaucgagggcgucaagcucgaguccgagggcaccuacaagauccucaccaucuacuccaccgucgccuccucccucguccucgccaugggcuucgccgccuuccucuucugggccauguccaacggcuccugccgcugcaacaucugcaucuga

SEQ ID NO: 106322 - RNA, 1683 nt, Artificial Sequence
  derived and/or modified CDS sequence (opt2) from hemagglutinin__InfluenzaA__AGQ81135
auggaggucgccaccaucaucaccauccuccucgucaucaccggcuccaacgccgacaagaucugcaucggcuaccaguccaccaacuccaccgagaccgucgacacccucaccgagaacaacguccccgucacccacgccaaggagcuccuccacaccgagcacaacggcaugcucugcgccaccaaccucggccgcccccucauccucgacaccugcaccaucgagggccucaucuacggcaaccccuccugcgaccucccccucgagggccgcgagugguccuacaucgucgagcgccccuccgccgucaacggcgucugcuaccccggcaacgucgagaaccucgaggagcuccgcucccucuucuccuccgccuccuccuaccagcgcauccagaucuuccccgacuccaucuggaacgucuccuacuccggcaccuccaaggccugcuccgacuccuucuaccgcuccaugcgcuggcucacccagaagaacaacaacuaccccguccaggacgcccaguacaccaacaaccgcggcaagaacauccucuucauguggggcaucaaccacccccccaccgacaacgcccagaccaaccucuacacccgcaccgacaccaccaccuccgucgccaccgaggacaucaaccgcaccuucaagccccucaucggcccccgcccccucgucaacggccuccagggccgcaucgacuacuacugggccguccucaagcccggccagacccuccgcguccgcuccaacggcaaccucaucgcccccugguacggccacauccuccucggcgagucccacggccgcauccucaagaccgaccucaaguccggcaacugcgucguccagugccagaccgagcgcggcggccucaacaccacccuccccuuccacaacgucuccaaguacuccuucggcaacugccccaaguacaucggcgucaagucccucaagcucgccgucggccuccgcaacguccccgcccgcuccucccgcggccucuucggcgccaucgccggcuucaucgagggcggcugguccggccucgucgccggcugguacggcuuccagcacuccaacgaccagggcaccggcauggccgccgaccgcgacuccacccagaaggccaucgacaagaucaccuccaaggucaacaacaucgucgacaagaugaacaagcaguacgagaucaucgaccacgaguucaacgagaucgagacccgccucaacaugaucaacaacaagaucgacgaccagauccaggacaucugggccuacaacgccgagcuccucguccuccucgagaaccagaagacccucgacgagcacgacgccaacgucaacaaccucuacaacaaggucaagcgcgcccucggcuccaacgccgucgaggacggcaagggcugcuucgaccucuaccacaagugcgacaaccagugcauggagaccauccgcaacggcaccuacaaccgccgcaaguaccaggaggagucccgccucgagcgccagaagaucgagggcgucaagcucgaguccgagggcaccuacaagauccucaccaucuacuccaccgucgccuccucccucgucaucgccaugggcuucgccgccuuccucuucugggccauguccaacggcuccugccgcugcaacaucugcaucuga

SEQ ID NO: 106323 - RNA, 1683 nt, Artificial Sequence
  derived and/or modified CDS sequence (opt2) from hemagglutinin__InfluenzaA__AGQ81136
auggagaccaucucccucaugaccauccuccucaucaccaccgccuccaacgccgacaagaucugcaucggccaccaguccaccaacuccaccgagaccgucgacacccucaccgagaccaacguccccgucacccacgccaaggagcuccuccagaccgagcacaacggcaugcucugcgccaccaaccucggccacccccucauccucgacaccugcaccaucgagggccucaucuacggcaaccccuccugcgaccuccuccucgagggccgcgagugguccuacaucgucgagcgccccuccgccgucaacggcaccugcuaccccggcaacgucgagaaccucgaggagcuccgcacccucuucuccuccgccuccuccuaccagcgcauccagaucuuccccgacaccaucuggaacgucaccuacaccggcaccucccgcuccugcuccggcuccuucuaccgcuccaugcgcuggcucacccagaaguccggcuucuaccccguccaggacgccaaguacaccaacaaccgcggcaagaacauccucuucgucuggggcauccaccacccccacaccuacaccgaccagaccacccucuacauccgcaacgacaccaccaccuccgucaccaccgaggagcucaaccgcaucuucaagcccgucaucgucccccgccuccucgucaacggccagcagggccgcaucgacuacuacugguccguccucaagcccggccagacccuccgcguccgcuccaacggcaaccucaucgcccccugguacggccacguccucuccggcggcucccacggccgcauccucaagaccgaccucaagggcggcaacugcgucguccagugccagaccgagaagggcggcuucaacuccacccuccccuuccacaacaucuccaaguacgccuucggcaccugccccaaguacgucaaggucaacucccucaagcucgccaucggccuccgcaacguccccgcccgcuccaaccgcggccucuucggcgccaucgccggcuucaucgagggcggcuggcccggccucgucgccggcugguacggcuuccagcacuccaacgaccagggcgucggcauggccgccgaccgcgacuccacccagaaggccgucgacaagaucaccuccaaggucaacaacaucgucgacaagaugaaccgccaguacgagaucaucgaccacgaguucuccgaggucgagacccgccucaacaugaucaacaacaagaucgacgaccagauccaggacaucuggaccuacaacgccgagcuccucguccuccucgagaaccagaagacccucgacgagcacgacgccaacgucaacaaccucuacaacaaggucaagcgcgcccucggcuccaacgccauggaggacggcaagggcugcuucgagcucuaccacaagugcgacgaccagugcauggagaccauccgcaacggcaccuacaaccgccgcaaguaccgcgaggagucccgccucgagcagcagcgcaucgagggcgucaagcucgaguccgagggcaccuacaagauccucaccaucuacuccaccgucgccuccucccucguccucgccaugggcuucgccgccuuccucuucugggccauguccaacggcuccugccgcugcaacaucugcaucuga

SEQ ID NO: 106324 - RNA, 1683 nt, Artificial Sequence; identical to SEQ ID NO: 106319
  derived and/or modified CDS sequence (opt2) from hemagglutinin__InfluenzaA__AGQ81137

SEQ ID NO: 106325 - RNA, 1683 nt, Artificial Sequence
  derived and/or modified CDS sequence (opt2) from hemagglutinin__InfluenzaA__AGQ81138
auggaggccgccaccaucaucaccauccuccucgccaucaccggcuccaacgccgacaagaucugcaucggcuaccaguccaccaacuccaccgagaccgucgacacccucaccgagaacaacguccccgucacccacgccaaggagcuccuccacaccgagcacaacggcaugcucugcgccaccaaccucggccgcccccucauccucgacaccugcaccaucgagggccucaucuacggcaaccccuccugcgaccucccccucgagggccgcgagugguccuacaucgucgagcgccccuccgccgucaacggcgucugcuaccccggccacgucgagaaccucgaggagcuccgcucccucuucuccuccgccuccuccuaccagcgcguccagaucuuccccgacuccaucuggaacgucuccuacuccggcaccuccaaggccugcuccgacuccuucuaccgcuccaugcgcuggcucacccagaagaacaacaacuaccccguccaggacgcccaguacaccaacaacaagggcaagaacauccucuucauguggggcaucaaccacccccccaccgacaccgcccagaccaaccucuacacccgcaccgacaccaccaccuccgucgccaccgaggacaucaaccgcaccuucaagccccucaucggcccccgcccccucgucaacggccuccagggccgcaucgacuacuacugggccguccucaagcccggccagacccuccgcguccgcuccaacggcaaccucaucgcccccugguacggccacauccuccucggcgagucccacggccgcauccucaagaccgaccucaaguccggcaacugcgucguccagugccagaccgagcgcggcggccucaacaccacccuccccuuccacaacgucuccaaguacgccuucggcaacugccccaaguacaucggcgucaagucccucaagcucgccgucggccuccgcaacguccacgcccgcuccucccgcggccucuucggcgccaucgccggcuucaucgagggcggcugguccggccucgucgccggcugguacggcuuccagcacuccaacgaccagggcaccggcauggccgccgaccgcgacuccacccagaaggccaucgacaagaucaccuccaaggucaacaacaucgucgacaagaugaacaagcaguacgagaucaucgaccacgaguucuccgagaucgagacccgccucaacaugaucaacgacaagaucgacgaccagauccaggacaucugggccuacaacgccgagcuccucguccuccucgagaaccagaagacccucgacgagcacgacgccaacgucaacaaccucuacaacaaggucaagcgcgcccucggcuccaacgccgucgaggacggcaagggcugcuucgaccucuaccacaagugcgacaaccagugcauggagaccauccgcaacggcaccuacaaccgccgcaaguaccaggaggagucccgccucgagcgccagaagaucgagggcgucaagcucgaguccgagggcaccuacaagauccucaccaucuacuccaccgucgccuccucccucgucaucgccaugggcuucgccgccuuccucuucugggccauguccaacggcuccugccgcugcaacaucugcaucuga

SEQ ID NO: 106326 - RNA, 1683 nt, Artificial Sequence
  derived and/or modified CDS sequence (opt2) from hemagglutinin__InfluenzaA__AGQ81139
auggaggucgccaccaucaucaccauccuccucgucaucaccggcggcaacgccgacaagaucugcaucggcuaccaguccaccaacuccaccgagaccgucgacacccucaccgagaacaacguccccgucacccacgccaaggagcuccuccacaccgagcacaacggcaugcucugcgccaccaaccucggccgcccccucauccucgacaccugcaccaucgagggccucaucuacggcaaccccuccugcgaccucccccucgagggccgcgagugguccuacaucgucgagcgcuccuccgccgucaacggcgucugcuaccccggcaacgucgagaaccucgaggagcuccgcucccucuucuccuccgccuccuccuaccagcgcauccagaucuuccccgacuccaucuggaacgucuccuacuccggcaccuccaaggccugcuccgacuccuucuaccgcuccaugcgcuggcucacccagaagaacaacaacuaccccguccaggacgcccaguacaccaacaaccgcggcaagaacauccucuucauguggggcaucaaccacccccccaccgacaacgcccagaccaaccucuacacccgcaccgacaccaccaccuccgucgccaccgaggacaucaaccgcaccuucaagccccucaucggcccccgcccccucgucaacggccuccagggccgcaucgacuacuacugggccguccucaagcccggccagacccuccgcguccgcuccaacggcaaccucaucgcccccugguacggccacauccuccucggcgagucccacggccgcauccucaagaccgaccucaaguccggcaacugcgucguccagugccagaccgagcgcggcggccucaacaccacccuccccuuccacaacgucuccaaguacuccuucggcaacugccccaaguacaucggcgucaagucccucaagcucgccgucggccuccgcaacguccccgcccgcuccucccgcggccucuucggcgccaucgccggcuucaucgagggcggcugguccggccucgucgccggcugguacggcuuccagcacuccaacgaccagggcaccggcauggccgccgaccgcgacuccacccagaaggccaucgacaagaucaccuccaaggucaacaacaucgucgacaagaugaacaagcaguacgagaucaucgaccacgaguucuccgagaucgagacccgccucaacaugaucaacaacaagaucgacgaccagauccaggacaucugggccuacaacgccgagcuccucguccuccucgagaaccagaagacccucgacgagcacgacgccaacgucaacaaccucuacaacaaggucaagcgcgcccucggcuccaacgccgucgaggacggcaagggcugcuucgaccucuaccacaagugcgacaaccagugcauggagaccauccgcaacggcaccuacaaccgccgcaaguaccaggaggagucccgccucgagcgccagaagaucgagggcgucaagcucgaguccgagggcaccuacaagauccucaccaucuacuccaccgucgccuccucccucgucaucgccaugggcuucgccgccuuccucuucugggccauguccaacggcuccugccgcugcaacaucugcaucuga

SEQ ID NO: 106327 - RNA, 1683 nt, Artificial Sequence
  derived and/or modified CDS sequence (opt2) from hemagglutinin__InfluenzaA__AGQ81141
auggaggccgccaccaucaucaccauccuccucgucaucaccggcuccaacgccgacaagaucugcaucggcuaccaguccaccaacuccaccgagaccgucgacacccucaccgagaacaacguccccgucacccacgccaaggagcuccuccacaccgagcacaacggcaugcucugcgccaccgaccucggccgcccccucauccucgacaccugcaccaucgagggccucaucuacggcaaccccuccugcgaccucccccucgagggccgcgagugguccuacaucgucgagcgccccuccgccgucaacggcgucugcuaccccggcaacgucgagaaccucgaggagcuccgcucccucuucuccuccgccuccuccuaccagcgcauccagaucuuccccgacuccaucuggaacgucuccuacuccggcaccuccaaggccugcuccgacuccuucuaccgcuccaugcgcuggcucacccagaagaacaacaacuaccccguccaggacgcccaguacaccaacaaccgcggcaagaacauccucuucauguggggcaucaaccacccccccaccgacaccgcccagaccaaccucuacacccgcaccgacaccaccaccuccgucgccaccgaggacaucaaccgcaccuucaagccccucaucggcccccgcccccucgucaacggccuccagggccgcaucgacuacuacugggccguccucaagcccggccagacccuccgcguccgcuccaacggcaaccucaucgcccccugguacggccacauccuccucggcgagucccacggccgcauccucaagaccgaccucaaguccggcaacugcgucguccagugccagaccgagcgcggcggccucaacaccacccuccccuuccacaacgucuccaaguacgccuucggcaacugccccaaguacaucggcgucaagucccucaagcucgccgucggccuccgcaacguccccgcccgcucccgccgcggccucuucggcgccaucgccggcuucaucgagggcggcuggaccggccucgucgccggcugguacggcuuccagcacuccaacgaccagggcaccggcauggccgccgaccgcgacuccacccagaaggccaucgacaagaucaccuccaaggucaacaacaucgucgacaagaugaacaagcaguacgacaucaucgaccacgaguucuccgagaucgagacccgccucaacaugaucaacgacaagaucgacgaccagauccaggacaucugggccuacaacgccgagcuccucguccuccucgagaaccagaagacccucgacgagcacgacgccaacgucaacaaccucuacaacaaggucaagggcgcccucggcuccaacgccgucgaggacggcaagggcugcuucgaccucuaccacaagugcgacaaccagugcauggagaccauccgcaacggcaccuacaaccgccgcaaguaccaggaggagucccgccucgagcgccagaagaucgagggcgucaagcucgaguccgagggcaccuacaagauccucaccaucuacuccaccgucgccuccucccucgucaucgccaugggcuucgccgccuuccucuucugggccauguccaacggcuccugccgcugcaacaucugcaucuga

SEQ ID NO: 106328 - RNA, 1683 nt, Artificial Sequence
  derived and/or modified CDS sequence (opt2) from hemagglutinin__InfluenzaA__AGQ81143
auggaggucgccaccaucaucaccauccuccucgucaucaccggcuccaacgccgacaagaucugcaucggcuaccaguccaccaacuccaccgagaccgucgacacccucaccgagaacaacguccccgucacccacgccaaggagcuccuccacaccgagcacaacggcaugcucugcgccaccaaccucggccgcccccucauccucgacaccugcaccaucgagggccucaucuacggcaaccccuccugcgaccucccccucgagggccgcgagugguccuacaucgucgagcgccccuccgccgucaacggcgucugcuaccccggcaacgucgagaaccucgaggagcuccgcucccucuucuccuccgccuccuccuaccagcgcauccagaucuuccccgacuccaucuggaacgucuccuacuccggcaccuccaaggccugcuccgacuccuucuaccgcuccaugcgcuggcucacccagaagaacaacaacuaccccguccaggacgcccaguacaccaacaaccgcggcaagaacauccucuucauguggggcaucaaccacccccccaccgacaacgcccagaccaaccucuacacccgcaccgacaccaccaccuccgucgccaccgaggacaucaaccgcaccuucaagccccucaucggcccccgcccccucgucaacggccuccagggccgcaucgacuacuacugggccguccucaagcccggccagacccuccgcguccgcuccaacggcaaccucaucgcccccugguacggccacauccuccucggcgagucccacggccgcauccucaagaccgaccucaaguccggcaacugcgucguccagugccagaccgagcgcggcggccucaacaccacccuccccuuccacaacgucuccaaguacuccuucggcaacugccccaaguacaucggcgucaagucccucaagcucgccgucggccuccgcaacguccccgcccgcuccucccgcggccucuucggcgccaucgccggcuucaucgagggcggcugguccggccucgucgccggcugguacggcuuccagcacuccaacgaccagggcaccggcauggccgccgaccgcgacuccacccagaaggccaucgacaagaucaccuccaaggucaacaacaucgucgacaagaugaacaagcaguacgagaucaucgaccacgaguucuccgagaucgagacccgccucaacaugaucaacaacaagaucgacgaccagauccaggacaucugggccuacaacgccgagcuccucguccuccucgagaaccagaagacccucgacgagcacgacgccaacgucaacaaccucuacaacaaggucaagcgcgcccucggcuccaacgccgucgaggacggcaagggcugcuucgaccucuaccacaagugcgacaaccagugcauggagaccauccgcaacggcaccuacaaccgccgcaaguaccaggaggagucccgccucgagcgccagaagaucgagggcgucaagcucgaguccgagggcaccuacaagauccucaccaucuacuccaccgucgccuccucccucgucaucgccaugggcuucgccgccuuccucuucugggccauguccaacggcuccugccgcugcaacaucugcaucuga

SEQ ID NO: 106329 - RNA, 1683 nt, Artificial Sequence
  derived and/or modified CDS sequence (opt2) from hemagglutinin__InfluenzaA__AGQ81144
auggaggccgccaccaucaucaccauccuccucgucgucaccggcuccaacgccgacaagaucugcaucggcuaccaguccaccaacuccaccgagaccgucgacacccucaccgagaacaacguccccgucacccacgccaaggagcuccuccacaccgagcacaacggcaugcucugcgccaccaaccucggccgcccccucauccucgacaccugcaccaucgagggccucaucuacggcaaccccuccugcgaccucccccucgagggccgcgagugguccuacaucgucgagcgccccuccgccgucaacggcgucugcuaccccggcaacgucgagaaccucgaggagcuccgcucccucuucuccuccgccuccuccuaccagcgcauccagaucuuccccgacuccaucuggaacgucuccuacggcggcaccuccaaggccugcuccgacuccuucuaccgcuccaugcgcuggcucacccagaagaacaacaacuaccccguccaggacgcccaguacaccaacaaccgcggcaagaacauccucuucauguggggcaucaaccacccccccaccgacaccgcccagaccaaccucuacacccgcaccgacaccaccaccuccgucgccaccgaggacaucaaccgcaccuucaagccccucaucggcccccgcccccucgucaacggccuccagggccgcaucgacuacuacugggccguccucaagcccggccagacccuccgcguccgcuccaacggcaaccucaucgcccccugguacggccacauccuccucggcgagucccacggccgcauccucaagaccgaccucaaguccggcaacugcgucguccagugccagaccgagcgcggcggccucaacaccacccuccccuuccacaacgucuccaaguacgccuucggcaacugccccaaguacaucggcgucaagucccucaagcucgccgucggccuccgcaacaugcccgcccgcuccucccgcggccucuucggcgccaucgccggcuucaucgagggcggcugguccggccucgucgccggcugguacggcuuccagcacuccaacgaccagggcaccggcauggccgccgaccgcgacuccacccagaaggccaucgacaagaucaccuccaaggucaacaacaucgucgacaagaugaacaagcaguacgagaucaucgaccacgaguucuccgagaucgagacccgccucaacaugaucaacgacaagaucgacgaccagauccaggacaucugggccuacaacgccgagcuccucguccuccucgagaaccagaagacccucgacgagcacgacgccaacgucaacaaccucuacaacaaggucaagcgcgcccucggcuccaacgccgucgaggacggcaagggcugcuucgaccucuaccacaagugcgacaaccagugcauggagaccauccgcaacggcaccuacaaccgccgcaaguaccaggaggagucccgccucgagcgccagaagaucgagggcgucaagcucgaguccgagggcaccuacaagauccucaccaucuacuccaccgucgccuccucccucgucaucgccaugggcuucgccgccuuccucuucugggccauguccaacggcuccugccgcugcaacaucugcaucuga

SEQ ID NO: 106330 - RNA, 1683 nt, Artificial Sequence
  derived and/or modified CDS sequence (opt2) from hemagglutinin__InfluenzaA__AGQ81146
auggaggccgccaccaucaucaccauccuccucgucaucaccggcuccaacgccgacaagaucugcaucggcuaccaguccaccaacuccaccgagaccgucgacacccucaccgagaacaacguccccgucacccacgccaaggagcuccuccacaccgagcacaacggcaugcucugcgccaccaaccucggccgcccccucauccucgacaccugcaccaucgagggccucaucuacggcaaccccuccugcgaccucccccucgagggcaaggagugguccuacaucgucgagcgccccuccgccgucaacggcaugugcuaccccggcaacgucgagaaccucgaggagcuccgcucccucuucuccuccgccuccuccuaccagcgcauccagaucuuccccgacuccaucuggaacgucuccuacuccggcaccuccaaggccugcuccgacuccuucuaccgcuccaugcgcuggcucacccagaagaacaacaacuaccccguccaggacgcccaguacaccaacaaccgcggcaagaacauccucuucauguggggcaucaaccacccccccaccgacaccgcccagaccaaccucuacacccgcaccgacaccaagaccuccgucgccaccgaggagaucaaccgcaccuucaagccccucaucggcccccgcccccucgucaacggccuccagggccgcaucgacuacuacugggccguccucaagcccggccagacccuccgcguccgcuccaacggcaaccucaucgcccccugguacggccacauccuccucggcgagucccacggccgcauccucaagaccgaccucaaguccggcaacugcgucguccagugccagaccgagcgcggcggccucaacaccacccuccccuuccacaacgucuccaaguacgccuucggcaacugccccaaguacaucggcgucaagucccucaagcucgccgucggccuccgcaacguccccgcccgcuccucccgcggccucuucggcgccaucgccggcuucaucgagggcggcugguccggccucgucgccggcugguacggcuuccagcacuccaacgaccagggcaccggcauggccgccgaccgcgacuccacccagaaggccaucgacaagaucaccuccaaggucaacaacaucgucgacaagaugaacaagcaguacgagaucaucgaccacgaguucuccgagaucgagacccgccucaacaugaucaacgacaagaucgacgaccagauccaggacaucugggccuacaacgccgagcuccucguccuccucgagaaccagaagacccucgacgagcacgacuccaacgucaacaaccucuacaacaaggucaagcgcgcccucggcuccaacgccgucgaggacggcaagggcugcuucgaccucuaccacaagugcgacaaccagugcauggagaccauccgcaacggcaccuacaaccgccgcaaguaccaggaggagucccgccucgagcgccagaagaucgagggcgucaagcucgaguccgagggcaccuacaagauccucaccaucuacuccaccgucgccuccucccucgucaucgccaugggcuucgccgccuuccucuucugggccauguccaacggcuccugccgcugcaacaucugcaucuga

SEQ ID NO: 106331 - RNA, 1683 nt, Artificial Sequence
  derived and/or modified CDS sequence (opt2) from hemagglutinin__InfluenzaA__AGQ81147
auggaggccgccaccaucaucaccauccuccucgucaucaccggcuccaacgccgacaagaucugcaucggcuaccaguccaccaacuccaccgagaccgucgacacccucaccgagaacaacguccccgucacccacgccaaggagcuccuccacaccgagcacaacggcaugcucugcgccaccaaccucggccgcccccucauccucgacaccugcaccaucgagggccucaucuacggcaaccccuccugcgaccucccccucgagggcaaggagugguccuacaucgucgagcgccccuccgccgucaacggcaugugcuaccccggcaacgucgagaaccucgaggagcuccgcucccucuucuccuccgccuccuccuaccagcgcauccagaucuuccccgacuccaucuggaacgucuccuacuccggcaccuccaaggccugcuccgacuccuucuaccgcuccaugcgcuggcucacccagaagaacaacaacuaccccguccaggacgcccaguacaccaacaaccgcggcaagaacauccucuucauguggggcaucaaccacccccccaccgacaccguccagaccaaccucuacacccgcaccgacaccaagaccuccgucgccaccgaggagaucaaccgcaccuucaagccccucaucggcccccgcccccucgucaacggccuccagggccgcaucgacuacuacugggccguccucaagcccggccagacccuccgcguccgcuccaacggcaaccucaucgcccccugguacggccacauccuccucggcgagucccacggccgcauccucaagaccgaccucaaguccggcaacugcgucguccagugccagaccgagcgcggcggccucaacaccacccuccccuuccacaacgucuccaaguacgccuucggcaacugccccaaguacaucggcgucaagucccucaagcucgccgucggccuccgcaacguccccgcccgcuccucccgcggccucuucggcgccaucgccggcuucaucgagggcggcugguccggccucgucgccggcugguacggcuuccagcacuccaacgaccagggcaccggcauggccgccgaccgcgacuccacccagaaggccaucgacaagaucaccuccaaggucaacaacaucgucgacaagaugaacaagcaguacgagaucaucgaccacgaguucuccgagaucgagacccgccucaacaugaucaacgacaagaucgacgaccagauccaggacaucugggccuacaacgccgagcuccucguccuccucgagaaccagaagacccucgacgagcacgacgccaacgucaacaaccucuacaacaaggucaagcgcgcccucggcuccaacgccgucgaggacggcaagggcugcuucgaccucuaccacaagugcgacaaccagugcauggagaccauccgcaacggcaccuacaaccgccgcaaguaccaggaggagucccgccucgagcgccagaagaucgagggcgucaagcucgaguccgagggcaccuacaagauccucaccaucuacuccaccgucgccuccucccucgucaucgccaugggcuucgccgccuuccucuucugggccauguccaacggcuccugccgcugcaacaucugcaucuga

SEQ ID NO: 106332 - RNA, 1683 nt, Artificial Sequence
  derived and/or modified CDS sequence (opt2) from hemagglutinin__InfluenzaA__AGQ81148
auggaggccgccaccaucaucaccauccuccucgucaucaccggcuccaacgccgacaagaucugcaucggcuaccaguccaccaacuccaccgagaccgucgacacccucaccgagaacaacguccccgucacccacgccaaggagcuccuccacaccgagcacaacggcaugcucugcgccaccaaccucggccgcccccucauccucgacaccugcaccaucgagggccucaucuacggcaaccccuccugcgaccucccccucgagggcaaggagugguccuacaucgucgagcgccccuccgccgucaacggcaugugcuaccccggcaacgucgagaaccucgaggagcuccgcucccucuucuccuccgccuccuccuaccagcgcauccagaucuuccccgacuccaucuggaacgucuccuacuccggcaccuccaaggccugcuccgacuccuucuaccgcuccaugcgcuggcucacccagaagaacaacaacuaccccguccaggacgcccaguacaccaacaaccgcggcaagaacauccucuucauguggggcaucaaccacccccccaccgacaccgcccagaccaaccucuacacccgcaccgacaccaagaccuccgucgccaccgaggagaucaaccgcaccuucaagccccucaucggcccccgcccccucgucaacggccuccagggccgcaucgacuacuacugggccguccucaagcccggccagacccuccgcguccgcuccaacggcaaccucaucgcccccugguacggccacauccuccucggcgagucccacggccgcauccucaagaccgaccucaaguccggcaacugcgucguccagugccagaccgagcgcggcggccucaacaccacccuccccuuccacaacgucuccaaguacgccuucggcaacugccccaaguacaucggcgucaagucccucaagcucgccgucggccuccgcaacguccccgcccgcuccucccgcggccucuucggcgccaucgccggcuucaucgagggcggcugguccggccucgucgccggcugguacggcuuccagcacuccaacgaccagggcaccggcauggccgccgaccgcgacuccacccagaaggccaucgacaagaucaccuccaaggucaacaacaucgucgacaagaugaacaagcaguacgagaucaucgaccacgaguucuccgagaucgagacccgccucaacaugaucaacgacaagaucgacgaccagauccaggacaucugggccuacaacgccgagcuccucguccuccucgagaaccagaagacccucgacgagcacgacgccaacgucaacaaccucuacaacaaggucaagcgcgcccucggcuccaacgccgucgaggacggcaagggcugcuucgaccucuaccacaagugcgacaaccagugcauggagaccauccgcaacggcaccuacaaccgccgcaaguaccaggaggagucccgccucgagcgccagaagaucgagggcgucaagcucgaguccgagggcaccuacaagauccucaccaucuacuccaccgucgccuccucccucgucaucgccaugggcuucgccgccuuccucuucugggccauguccaacggcuccugccgcugcaacaucugcaucuga

SEQ ID NO: 106333 - RNA, 1683 nt, Artificial Sequence
  derived and/or modified CDS sequence (opt2) from hemagglutinin__InfluenzaA__AGQ81149
auggaggccgccaccaucaucaccauccuccucgucaucaccggcuccaacgccgacaagaucugcaucggcuaccaguccaccaacuccaccgagaccgucgacacccucaccgagaacaacguccccgucacccacgccaaggagcuccuccacaccggccacaacggcaugcucugcgccaccaaccucggccgcccccucauccucgacaccugcaccaucgagggccucaucuacggcaaccccuccugcgaccucccccucgagggccgcgagugguccuacaucgucgagcgccccuccgccaucaacggcgucugcuaccccggcaacgucgagaaccucgaggagcuccgcucccucuucuccuccgccuccuccuaccagcgcauccagaucuuccccgacuccaucuggaacgucuccuacuccggcaccuccaaggccugcuccgacuccuucuaccgcuccaugcgcuggcucacccagaagaacaacaacuaccccguccaggacgcccaguacaccaacaaccgcggcaagaacauccucuucauguggggcaucaaccacccccccaccgacaccgcccagaccaaccucuacacccgcaccgacaccaccaccuccgucgccaccgaggacaucaaccgcaccuucaagccccucaucggcccccgcccccucgucaacggccuccagggccgcaucgacuacuacugggccguccucaagcccggccagacccuccgcguccgcuccaacggcaaccucaucgcccccugguacggccacauccuccucggcgagucccacggccgcauccucaagaccgaccucaaguccggcaacugcgucguccagugccagaccgagcgcggcggccucaacaccacccuccccuuccacaacgucuccaaguacgccuucggcaacugccccaaguacaucggcgucaagucccucaagcucgccgucggccuccgcaacguccccgcccgcuccucccgcggccucuucggcgccaucgccggcuucaucgagggcggcugguccggccucgucgccggcugguacggcuuccagcacuccaacgaccagggcaccggcauggccgccgaccgcgacuccacccagaaggccaucgacaagaucaccuccaaggucaacaacaucgucgacaagaugaacaagcaguacgagaucaucgaccacgaguucuccgagaucgagacccgccucaacaugaucaacgacaagaucgacgaccagauccaggacaucugggccuacaacgccgagcuccucguccuccucgagaaccagaagacccucgacgagcacgacgccaacgucaacaaccucuacaacaaggucaagcgcgcccucggcuccaacgccgucgaggacggcaagggcugcuucgaccucuaccacaagugcgacaaccagugcauggagaccauccgcaacggcaccuacaaccgccgcaaguaccaggaggagucccgccucgagcgccagaagaucgagggcgucaagcucgaguccgagggcaccuacaagauccucaccaucuacuccaccgucgccuccucccucgucaucgccaugggcuucgccgccuuccucuucugggccauguccaacggcuccugccgcugcaacaucugcaucuga

SEQ ID NO: 106334 - RNA, 1683 nt, Artificial Sequence
  derived and/or modified CDS sequence (opt2) from hemagglutinin__InfluenzaA__AGQ81150
auggaggccgccaccaucaucaccauccuccucgucaucaccggcuccaacgccgacaagaucugcaucggcuaccaguccaccaacuccaccgagaccgucgacacccucaccgagaacaacguccccgucacccacgccaaggagcuccuccacaccgagcacaacggcaugcucugcgccaccgaccucggccgcccccucauccucgacaccugcaccaucgagggccucaucuacggcaaccccuccugcgaccucccccucgagggccgcgagugguccuacaucgucgagcgccccuccgccgucaacggcgucugcuaccccggcaacgucgagaaccucgaggagcuccgcucccucuucuccuccgccuccuccuaccagcgcauccagaucuuccccgacuccaucuggaacgucuccuacuccggcaccuccaaggccugcuccgacuccuucuaccgcuccaugcgcuggcucacccagaagaacaacaacuaccccguccaggacgcccaguacaccaacgaccgcggcaacaacauccucuucauguggggcaucaaccacccccccaccgacaccguccagaccaaccucuacacccgcaccgacaccaccaccuccgucgccaccgaggacaucaaccgcaccuucaagccccucaucggcccccgcccccucgucaacggccuccagggccgcaucgacuacuacugggccguccucaagcccggccagacccuccgcguccgcuccaacggcaaccucaucgcccccugguacggccacauccuccucggcgagucccacggccgcauccucaagaccgaccucaaguccggcaacugcgucguccagugccagaccgagcgcggcggccucaacaccacccuccccuuccacaacgucuccaaguacgccuucggcaacugccccaaguacaucggcgucaagucccucaagcucgccgucggccuccgcaacguccccgcccgcuccucccgcggccucuucggcgccaucgccggcuucaucgagggcggcugguccggccucgucgccggcugguacggcuuccagcacuccaacgaccagggcaccggcauggccgccgaccgcgacuccacccagaaggccaucgacaagaucaccuccaaggucaacaacaucgucgacaagaugaacaagcaguacgacaucaucgaccacgaguucuccgagaucgagacccgccucaacaugaucaacgacaagaucgacgaccagauccaggacaucugggccuacaacgccgagcuccucguccuccucgagaaccagaagacccucgacgagcacgacgccaacgucaacaaccucuacaacaaggucaagcgcgcccucggcuccaacgccgucgaggacggcaagggcugcuucgaccucuaccacaagugcgacaaccagugcauggagaccauccgcaacggcaccuacaaccgccgcaaguaccaggaggagucccgccucgagcgccagaagaucgagggcgucaagcucgaguccgagggcaccuacaagauccucaccaucuacuccaccgucgccuccucccucgucaucgccaugggcuucgccgccuuccucuucugggccauguccaacggcuccugccgcugcaacaucugcaucuga

SEQ ID NO: 106335 - RNA, 1683 nt, Artificial Sequence
  derived and/or modified CDS sequence (opt2) from hemagglutinin__InfluenzaA__AGQ81152
auggaggccgccaccaucaucaccauccuccucgucaucaccggcuccaacgccgacaagaucugcaucggcuaccaguccaccaacuccaccgagaccgucgacacccucaccgagaacaacguccccgucacccacgccaaggagcuccuccacaccgagcacaacggcaugcucugcgccaccaaccucggccgcccccucauccucgacaccugcaccaucgagggccucaucuacggcaaccccuccugcgaccucccccucgagggccgcgacugguccuacaucgucgagcgccccuccgccgucaacggcgucugcuaccccggcaacgucgagaaccucgaggagcuccgcucccucuucuccuccgccuccuccuaccagaagauccagaucuuccccgacuccaucuggaacgucuccuacuccggcaccuccaaggccugcuccgacuccuucuaccgcuccaugcgcuggcucacccagaagaacaacaacuaccccguccaggacgcccaguacaccaacaaccgcggcaagaacauccucuucauguggggcaucaaccacccccccaccgacaccguccagaccaaccucuacacccgcaccgacaccaccaccuccgucgccaccgaggacaucaaccgcaccuucaagccccucaucggcccccgcccccucgucaacggccuccagggccgcaucgacuacuacugggccguccucaagcccggccagacccuccgcguccgcuccaacggcaaccucaucgcccccugguacggccacauccuccucggcgagucccacggccgcauccucaagaccgaccucaaguccggcaacugcgucguccagugccagaccgagcgcggcggccucaacaccacccuccccuuccacaacgucuccaaguacgccuucggcaacugccccaaguacaucggcgucaagucccucaagcucgccgucggccuccgcaacguccccgcccgcuccucccgcggccucuucggcgccaucgccggcuucaucgagggcggcugguccggccucgucgccggcugguacggcuuccagcacuccaacgaccagggcaccggcauggccgccgaccgcgacuccacccagaaggccaucgacaagaucaccuccaaggucaacaacaucgucgacaagaugaacaagcaguacgagaucaucgaccacgaguucuccgagaucgagacccgccucaacaugaucaacgacaagaucgacgaccagauccaggacaucugggccuacaacgccgagcuccucguccuccucgagaaccagaagacccucgacgagcacgacgccaacgucaacaaccucuacaacaaggucaagcgcgcccucggcuccaacgccgucgaggacggcaagggcugcuucgaccucuaccacaagugcgacaaccagugcauggagaccauccgcaacggcaccuacaaccgccgcaaguaccaggaggagucccgccucgagcgccagaagaucgagggcgucaagcucgaguccgagggcaccuacaagauccucaccaucuacuccaccgucgccuccucccucgucaucgccaugggcuucgccgccuuccucuucugggccauguccaacggcuccugccgcugcaacaucugcaucuga

SEQ ID NO: 106336 - RNA, 1683 nt, Artificial Sequence
  derived and/or modified CDS sequence (opt2) from hemagglutinin__InfluenzaA__AGQ81153
auggaggccgccaccaucaucaccauccuccucgucaucaccggcuccaacgccgacaagaucugcaucggcuaccaguccaccaacuccaccgagaccgucgacacccucaccgagaacaacguccccgucacccacgccaaggagcuccuccacaccgagcacaacggcaugcucugcgccaccaaccucggccgcccccucauccucgacaccugcaccaucgagggccucaucuacggcaaccccuccugcgaccucccccucgagggccgcgacugguccuacaucgucgagcgccccuccgccgucaacggcgucugcuaccccggcaacgucgagaaccucgaggagcuccgcucccucuucuccuccgccuccuccuaccagaagauccagaucuuccccgacuccaucuggaacgucuccuacggcggcaucuccaaggccugcuccaacuccuucuaccgcuccaugcgcuggcucacccagaagaacaacaacuaccccguccaggacgcccaguacaccaacaaccgcggcaagaacauccucuucauguggggcaucaaccacccccccaccaacaccacccagaccgaccucuacacccgcaccgacaccaccaccuccgucgccaccgaggacauccaccgcaccuucaagccccucaucggcccccgcccccucgucaacggccuccagggccgcaucgacuacuacugggccguccucaagcccggccagacccuccgcguccgcuccaacggcaaccucaucgcccccugguacggccacauccuccucggcaagucccacggccgcauccucaagaccgaccucaaguccggcaacugcgucguccagugccagaccgagcgcggcggccucaacaccacccuccccuuccacaacgucuccaaguacgccuucggcaacugccccaaguacaucggcgucaagucccucaagcucgccgucggccuccgcaacguccccgcccgcuccucccgcggccucuucggcgccaucgccggcuucaucgagggcggcugguccggccucgucgccggcugguacggcuuccagcacuccaacgaccagggcaccggcauggccgccgaccgcgacuccacccagaaggccaucgacaagaucaccuccaaggucaacaacaucgucgacaagaugaacaagcaguacgagaucaucgaccacgaguucuccgagaucgagacccgccucaacaugaucaacgacaagaucgacgaccagauccaggacaucugggccuacaacgccgagcuccucguccuccucgagaaccagaagacccucgacgagcacgacgccaacgucaacaaccucuacaacaaggucaagcgcgcccucggcuccaacgccgucgaggacggcaagggcugcuucgaccucuaccacaagugcgacaaccagugcauggagaccauccgcaacggcaccuacaaccgccgcaaguaccaggaggagucccgccucgagcgccagaagaucgagggcgucaagcucgaguccgagggcaccuacaagauccucaccaucuacuccaccgucgccuccucccucgucaucgccaugggcuucgccgccuuccucuucugggccauguccaacggcuccugccgcugcaacaucugcaucuga

SEQ ID NO: 106337 - RNA, 1683 nt, Artificial Sequence
  derived and/or modified CDS sequence (opt2) from hemagglutinin__InfluenzaA__AGQ81155
auggaggccgccaccaucaucaccauccuccucgucaucaccggcuccaacgccgacaagaucugcaucggcuaccaguccaccaacuccaccgagaccgucgacacccucaccgagaacaacguccccgucacccacgccaaggagcuccuccacaccgagcacaacggcaugcucugcgccaccaaccucggccgcccccucauccucgacaccugcaccaucgagggccucaucuacggcaaccccuccugcgaccucccccucgagggccgcgacugguccuacaucgucgagcgccccuccgccgucaacggcgucugcuaccccggcaacgucgagaaccucgaggagcuccgcucccucuucuccuccgccuccuccuaccagaagauccagaucuuccccgacuccaucuggaacgucuccuacaacggcaccuccaaggccugcuccgacuccuucuaccgcuccaugcgcuggcucacccagaagaacaacaacuaccccguccaggacgcccaguacaccaacaaccgcggcaagaacauccucuucauguggggcaucaaccacccccccaccgacaccacccagaccaaccucuacacccgcaccgacaccaccaccuccgucgccaccgaggacaucaaccgcaccuucaagccccucaucggcccccgcccccucgucaacggccuccagggccgcaucgacuacuacugggccguccucaagcccggccagacccuccgcguccgcuccaacggcaaccucaucgcccccugguacggccacauccuccucggcgagucccacggccgcauccucaagaccgaccucaaguccggcaacugcgucguccagugccagaccgagcgcggcggccucaacaccacccuccccuuccacaacgucuccaaguacgccuucggcgacugccccaaguacaucggcgucaagucccucaagcucgccgucggccuccgcaacguccccgcccgcuccucccgcggccucuucggcgccaucgccggcuucaucgagggcggcugguccggccucgucgccggcugguacggcuuccagcacuccaacgaccagggcaccggcauggccgccgaccgcgacuccacccagaaggccaucgacaagaucaccuccaaggucaacaacaucgucgacaagaugaacaagcaguacgagaucaucgaccacgaguucuccgagaucgagacccgccucaacaugaucaacgacaagaucgacgaccagauccaggacaucugggccuacaacgccgagcuccucguccuccucgagaaccagaagacccucgacgagcacgacgccaacgucaacaaccucuacaacaaggucaagcgcgcccucggcuccaacgccgucgaggacggcaagggcugcuucgaccucuaccacaagugcgacaaccagugcauggagaccauccgcaacggcaccuacaaccgccgcaaguaccaggaggagucccgccucgagcgccaggagaucgagggcgucaagcucgaguccgagggcaccuacaagauccucaccaucuacuccaccgucgccuccucccucgucaucgccaugggcuucgccgccuuccucuucugggccauguccaacggcuccugccgcugcaacaucugcaucuga

SEQ ID NO: 106338 - RNA, 1683 nt, Artificial Sequence
  derived and/or modified CDS sequence (opt2) from hemagglutinin__InfluenzaA__AGQ81156
auggaggccgccaccaucaucaccauccuccucgucaucaccggcuccaacgccgacaagaucugcaucggcuaccaguccaccaacuccaccgagaccgucgacacccucaccgagaacaacguccccgucacccacgccaaggagcuccuccacaccgagcacaacggcaugcucugcgccaccaaccucggccgcccccucauccucgacaccugcaccaucgagggccucaucuacggcaaccccuccugcgaccucccccucgagggccgcgacugguccuacaucgucgagcgccccuccgccgucaacggcgucugcuaccccggcaacgucgagaaccucgaggagcuccgcucccucuucuccuccgccuccuccuaccagaagauccagaucuuccccgacuccaucuggaacgucuccuacggcggcaucuccaaggccugcuccaacuccuucuaccgcuccaugcgcuggcucacccagaagaacaacaacuaccccguccaggacgcccaguacaccaacaaccgcggcaagaacauccucuucauguggggcaucaaccacccccccaccaacaccacccagaccgaccucuacacccgcaccgacaccaccaccuccgucgccaccgaggacauccaccgcaccuucaagccccucaucggcccccgcccccucgucaacggccuccagggccgcaucgacuacuacugggccguccucaagcccggccagacccuccgcguccgcuccaacggcaaccucaucgcccccugguacggccacauccuccucggcgagucccacggccgcauccucaagaccgaccucaaguccggcaacugcgucguccagugccagaccgagcgcggcggccucaacaccacccuccccuuccacaacgucuccaaguacgccuucggcaacugccccaaguacaucggcgucaagucccucaagcucgccgucggccuccgcaacguccccgcccgcuccucccgcggccucuucggcgccaucgccggcuucaucgagggcggcugguccggccucgucgccggcugguacggcuuccagcacuccaacgaccagggcaccggcauggccgccgaccgcgacuccacccagaaggccaucgacaagaucaccuccaaggucaacaacaucgucgacaagaugaacaagcaguacgagaucaucgaccacgaguucuccgagaucgagacccgccucaacaugaucaacgacaagaucgacgaccagauccaggacaucugggccuacaacgccgagcuccucguccuccucgagaaccagaagacccucgacgagcacgacgccaacgucaacaaccucuacaacaaggucaagcgcgcccucggcuccaacgccgucgaggacggcaagggcugcuucgaccucuaccacaagugcgacaaccagugcauggagaccauccgcaacggcaccuacaaccgccgcaaguaccaggaggagucccgccucgagcgccagaagaucgagggcgucaagcucgaguccgagggcaccuacaagauccucaccaucuacuccaccgucgccuccucccucgucaucgccaugggcuucgccgccuuccucuucugggccauguccaacggcuccugccgcugcaacaucugcaucuga

SEQ ID NO: 106339 - RNA, 1683 nt, Artificial Sequence
  derived and/or modified CDS sequence (opt2) from hemagglutinin__InfluenzaA__AGQ81157
auggaggccgccaccaucaucaccauccuccucgucaucaccggcaacaacgccgacaagaucugcaucggcuaccaguccaccaacuccaccgagaccgucgacacccucaccgagaacaacguccccgucacccacgccaaggagcuccuccacaccgagcacaacggcaugcucugcgccaccaaccucggccgcccccucauccucgacaccugcaccaucgagggccucaucuacggcaaccccuccugcgaccucccccucgagggccgcgacugguccuacaucgucgagcgccccuccgccgucaacggcgucugcuaccccggcaacgucgagaaccucgaggagcuccgcucccucuucuccuccgccuccuccuaccagaagauccagaucuuccccgacuccaucuggaacgucuccuacaacggcaccuccaaggccugcuccgacuccuucuaccgcuccaugcgcuggcucacccagaagaacaacaacuaccccguccaggacgcccaguacaccaacaaccgcggcaagaacauccucuucauguggggcaucaaccacccccccaccgacaccacccagaccaaccucuacacccgcaccgacaccaccaccuccgucgccaccgaggacaucaaccgcaccuucaagccccucaucggcccccgcccccucgucaacggccuccagggccgcaucgacuacuacugggccguccucaagcccggccagacccuccgcguccgcuccaacggcaaccucaucgcccccugguacggccacauccuccucggcgagucccacggccgcauccucaagaccgaccucaaguccggcaacugcgucguccagugccagaccgagcgcggcggccucaacaccacccuccccuuccacaacgucuccaaguacgccuucggcgacugccccaaguacaucggcgucaagucccucaagcucgccgucggccuccgcaacguccccgcccgcuccucccgcggccucuucggcgccaucgccggcuucaucgagggcggcugguccggccucgucgccggcugguacggcuuccagcacuccaacgaccagggcaccggcauggccgccgaccgcgacuccacccagaaggccaucgacaagaucaccuccaaggucaacaacaucgucgacaagaugaacaagcaguacgagaucaucgaccacgaguucuccgagaucgagacccgccucaacaugaucaacgacaagaucgacgaccagauccaggacaucugggccuacaacgccgagcuccucguccuccucgagaaccagaagacccucgacgagcacgacgccaacgucaacaaccucuacaacaaggucaagcgcgcccucggcuccaacgccgucgaggacggcaagggcugcuucgaccucuaccacaagugcgacaaccagugcauggagaccauccgcaacggcaccuacaaccgccgcaaguaccaggaggagucccgccucgagcgccagaagaucgagggcgucaagcucgaguccgagggcaccuacaagauccucaccaucuacuccaccgucgccuccucccucgucaucgccaugggcuucgccgccuuccucuucugggccauguccaacggcuccugccgcugcaacaucugcaucuga

SEQ ID NO: 106340 - RNA, 1683 nt, Artificial Sequence
  derived and/or modified CDS sequence (opt2) from hemagglutinin__InfluenzaA__AGQ81158
auggaggucgucaccaucaucaccauccuccucgucaucacccgcuccaacgccgacaagaucugcaucggcuaccaguccaccaacuccaccgagaccgucgacacccucaccgagaacaacguccccgucacccacgccaaggagcuccuccacaccgagcacaacggcaugcucugcgccaccaaccucggccgcccccucauccucgacaccugcaccaucgagggccucaucuacggcaaccccuccugcgaccucccccucgagggccgcgagugguccuacaucgucgagcgccccuccgccgucaacggcgucugcuaccccggcaacgucgagaaccucgaggagcuccgcucccucuucuccuccgccuccuccuaccagcgcauccagaucuuccccgacuccaucuggaacgucuccuacuccggcaccuccaaggccugcuccgacuccuucuaccgcuccaugcgcuggcucacccagaagaacaacaacuaccccguccaggacgcccaguacaccaacaaccgcggcaagaacauccucuucauguggggcaucaaccacccccccaccgacaccgcccagaccaaccucuacacccgcaccgacaccaccaccuccgucgccaccgaggacaucaaccgcaccuucaagccccucaucggcccccgcccccucgucaacggccuccagggccgcaucgacuacuacugggccguccucaagcccggccagacccuccgcguccgcuccaacggcaaccucaucgcccccugguacggccacauccuccucggcgagucccacggccgcauccucaagaccgaccucaaguccggcuccugcgucguccagugccagaccgagcgcggcggccucaacaccacccuccccuuccacaacgucuccaaguacgccuucggcaacugccccaaguacaucggcgucaagucccucaagcucgccgucggccuccgcaacguccccgcccgcuccucccgcggccucuucggcgccaucgccggcuucaucgagggcggcugguccggccucgucgccggcugguacggcuuccagcacuccaacgaccagggcaccggcauggccgccgaccgcgacuccacccagaaggccaucgacaagaucaccuccaaggucaacaacaucgucgacaagaugaacaagcaguacgagaucaucaaccacgaguucuccgagaucgagacccgccucaacaugaucaacgacaagaucgacgaccagauccaggacaucugggccuacaacgccgagcuccucguccuccucgagaaccagaagacccucgacgagcacgacgccaacgucaacaaccucuacaacaaggucaagcgcgcccucggcuccaacgccgucgaggacggcaagggcugcuucgaccucuaccacaagugcgacaaccagugcauggagaccauccgcaacggcaccuacaaccgccgcauguaccaggaggagucccgccucgagcgccagaagaucgagggcgucaagcucgaguccgagggcaccuacaagauccucaccaucuacuccaccgucgccuccucccucgucaucgccaugggcuucgccgccuuccucuucugggccauguccaacggcuccugccgcugcaacaucugcaucuga

SEQ ID NO: 106341 - RNA, 1683 nt, Artificial Sequence
  derived and/or modified CDS sequence (opt2) from hemagglutinin__InfluenzaA__AGQ81159
auggaggccgccaccaucaucaccauccuccucgucaucaccggcuccaacgccgacaagaucugcaucggcuaccaguccaccaacuccaccgagaccgucgacacccucaccgagaacaacguccccgucacccacgccaaggagcuccuccacaccgagcacaacggcaugcucugcgccaccaaccucggccgcccccucauccucgacaccugcaccaucgagggccucaucuacggcaaccccuccugcgaccucccccucgagggccgcgacugguccuacaucgucgagcgccccuccgccgucaacggcgucugcuaccccggcaacgucgagaaccucgaggagcuccgcucccucuucuccuccgccuccuccuaccagaagauccagaucuuccccgacuccaucuggaacgucuccuacgacggcaucuccaaggccugcuccaacuccuucuaccgcuccaugcgcuggcucaccaagaagaacaacuccuaccccguccaggacgcccaguacaccaacaacaucggcaagaacauccucuucauguggggcaucaaccacccccccaccaacaccacccagaccgaccucuacacccgcaccgacaccaccaccuccgucgccaccgaggacauccaccgcaccuucaagccccucaucggcccccgcccccccgucaacggccuccucggccgcaucgacuacuacugggccguccucaagcccggccagacccuccgcguccgcuccaacggcaaccucaucgcccccugguacggccacauccuccucggcgagucccacggccgcauccucaagaccgaccucaaguccggcaacugcgucguccagugccagaccgagcgcggcggccucaacaccacccuccccuuccacaacgucuccaaguacgccuucggcaacugccccaaguacaucggcgucaagucccucaagcucgccgucggccuccgcaacguccccgcccgcuccucccgcggccucuucggcgccaucgccggcuucaucgagggcggcugguccggccucgucgccggcugguacggcuuccagcacuccaacgaccagggcaccggcauggccgccgaccgcgacuccacccagaaggccaucgacaagaucaccuccaaggucaacaacaucgucgacaagaugaacaagcaguacgagaucaucgaccacgaguucuccgagaucgagacccgccucaacaugaucaacgacaagaucgacgaccagauccaggacaucugggccuacaacgccgagcuccucguccuccucgagaaccagaagacccucgacgagcacgacgccaacgucaacaaccucuacaacaaggucaagcgcgcccucggcuccaacgccgucgaggacggcaagggcugcuucgaccucuaccacaagugcgacaaccagugcauggagaccauccgcaacggcaccuacaaccgccgcaaguaccaggaggagucccgccucgagcgccagaagaucgagggcgucaagcucgaguccgagggcaccuacaagauccucaccaucuacuccaccgucgccuccucccucgucaucgccaugggcuucgccgccuuccucuucugggccauguccaacggcuccugccgcugcaacaucugcaucuga

SEQ ID NO: 106342 - RNA, 1683 nt, Artificial Sequence
  derived and/or modified CDS sequence (opt2) from hemagglutinin__InfluenzaA__AGQ81161
auggagaccgucucccucaucaccauccuccucgucgccaccgucuccaacgccgacaagaucugcaucggcuaccaguccaccaacuccaccgagaccgucgacacccucaccgagaacaacguccccgucacccacgccaaggagcuccuccacaccgagcacaacggcaugcucugcgccaccucccucggccagccccucauccucgacaccugcaccaucgagggccucaucuacggcaaccccuccugcgacccccuccucgagggccgcgagugguccuacaucgucgagcgccccuccgccgucaacggccucugcuaccccggcaacgucgagaaccucgaggagcuccgcucccucuucuccuccgcccgcuccuaccagcgcauccagaucuuccccgacaccaucuggaacgucuccuacgacggcaccuccaaggccugcuccggcuccuucuaccgcaacaugcgcuggcucacccagaagaacuccgacuaccccauccaggacgcccaguacaccaacaaccagggcaagaacauccucuucauguggggcaucaaccacccccccaccgacaccacccagcgcgaccucuacacccgcaccgacaccaccaccuccgucgccaccgaggagaucaaccgcaucuucaagccccucaucggcccccgcccccucgucaacggccucaugggccgcaucgacuacuacugguccguccucaagcccggccagacccuccgcaucaaguccgacggcaaccucaucgcccccugguacggccacauccucuccggcgagucccacggccgcauccucaagaccgaccucaagaagggcuccugcaccguccagugccagaccgagaagggcggccucaacaccacccuccccuuccagaacgucuccaaguacgccuucggcaacugcuccaaguacaucggcaucaagucccucaagcucgccgucggccuccgcaacguccccucccgcuccucccgcggccucuucggcgccaucgccggcuucaucgagggcggcugguccggccucgucgccggcugguacggcuuccagcacuccaacgaccagggcgucggcauggccgccgaccgcgacuccacccagaaggccaucgacaagaucaccuccaaggucaacaacaucgucgacaagaugaacaagcaguacgagaucaucgaccacgaguucuccgaggucgagacccgccucaacaugaucaacaacaagaucgacgaccagauccaggacaucugggccuacaacgccgagcuccucguccuccucgagaaccagaagacccucgacgagcacgacgccaacgucaacaaccucuacaacaaggucaagcgcgcccucggcuccaacgccgucgaggacggcaagggcugcuucgagcucuaccacaagugcgacgaccagugcauggagaccauccgcaacggcaccuacaaccgccgcaaguaccaggaggaguccaagcucgagcgccagaagaucgagggcgucaagcucgaguccgagggcaccuacaagauccucaccaucuacuccaccgucgccuccucccucgucaucgccaugggcuucgccgccuuccucuucugggccauguccaacggcuccugccgcugcaacaucugcaucuga

SEQ ID NO: 106343 - RNA, 1683 nt, Artificial Sequence
  derived and/or modified CDS sequence (opt2) from hemagglutinin__InfluenzaA__AGQ81162
auggagaccgucucccucaucaccauccuccucgucgccaccgucuccaacgccgacaagaucugcaucggcuaccaguccaccaacuccaccgagaccgucgacacccucaccgagaacaacguccccgucacccacgccaaggagcuccuccacaccgagcacaacggcaugcucugcgccaccucccucggccagccccucauccucgacaccugcaccaucgagggccucaucuacggcaaccccuccugcgaccuccuccucgagggccgcgagugguccuacaucgucgagcgccccuccgccgucaacggccucugcuaccccggcaacgucgagaaccucgaggagcuccgcucccucuucuccuccgcccgcuccuaccagcgcauccagaucuuccccgacaccaucuggaacgucuccuacgacggcaccuccaaggccugcuccggcuccuucuaccgcuccaugcgcuggcucacccagaagaacuccgacuaccccauccaggacgcccaguacaccaacaaccagggcaagaacauccucuucauguggggcaucaaccacccccccaccgacaccacccagcgcgaccucuacacccgcaccgacaccaccaccuccgucgccaccgaggagaucaaccgcaucuucaagccccucaucggcccccgcccccucgucaacggccucaugggccgcaucgacuacuacugguccguccucaagcccggccagacccuccgcaucaaguccgacggcaaccucaucgcccccugguacggccacauccucuccggcgagucccacggccgcauccucaagaccgaccucaagaagggcuccugcaccguccagugccagaccgagaagggcggccucaacaccacccuccccuuccagaacgucuccaaguacgccuucggcaacugcuccaaguacaucggcaucaagucccucaagcucgccgucggccuccgcaacguccccucccgcuccucccgcggccucuucggcgccaucgccggcuucaucgagggcggcugguccggccucgucgccggcugguacggcuuccagcacuccaacgaccagggcgucggcauggccgccgaccgcgacuccacccagaaggccaucgacaagaucaccuccaaggucaacaacaucgucgacaagaugaacaagcaguacgagaucaucgaccacgaguucuccgaggucgagacccgccucaacaugaucaacaacaagaucgacgaccagauccaggacaucugggccuacaacgccgagcuccucguccuccucgagaaccagaagacccucgacgagcacgacgccaacgucaacaaccucuacaacaaggucaagcgcgcccucggcuccaacgccgucgaggacggcaagggcugcuucgagcucuaccacaagugcgacgaccagugcauggagaccauccgcaacggcaccuacaaccgcaagaaguaccaggaggaguccaagcucgagcgccagaagaucgagggcgucaagcucgaguccgagggcaccuacaagauccucaccaucuacuccaccgucgccuccucccucgucaucgccaugggcuucgccgccuuccucuucugggccauguccaacggcuccugccgcugcaacaucugcaucuga

SEQ ID NO: 106344 - RNA, 1683 nt, Artificial Sequence
  derived and/or modified CDS sequence (opt2) from hemagglutinin__InfluenzaA__AGQ81164
auggagaccgucucccucaucaccauccuccucgucgccaccgucuccaacgccgacaagaucugcaucggcuaccaguccaccaacuccaccgagaccgucgacacccucaccgagaacaacguccccgucacccacgccaaggagcuccuccacaccgagcacaacggcaugcucugcgccaccucccucggccagccccucauccucgacaccugcaccaucgagggccucaucuacggcaaccccuccugcgaccuccuccucgagggccgcgagugguccuacaucgucgagcgccccuccgccgucaacggccucugcuaccccggcaacgucgagaaccucgaggagcuccgcucccucuucuccuccgcccgcuccuaccagcgcauccagaucuuccccgacaccaucuggaacgucuccuacgacggcaccuccaaggccugcuccggcuccuucuaccgcuccaugcgcuggcucacccagaagaacuccgacuaccccauccaggacgcccaguacaccaacaaccagggcaagaacauccucuucauguggggcaucaaccacccccccaccgacaccacccagcgcgaccucuacacccgcaccgacaccaccaccuccgucgccaccgaggagaucaaccgcaucuucaagccccucaucggcccccgcccccucgucaacggccucaugggccgcaucgacuacuacugguccguccucaagcccggccagacccuccgcaucaaguccgacggcaaccucaucgcccccugguacggccacauccucuccggcgagucccacggccgcauccucaagaccgaccucaagaagggcuccugcaccguccagugccagaccgagaagggcggccucaacaccacccuccccuuccagaacgucuccaaguacgccuucggcaacugcuccaaguacaucggcaucaagucccucaagcucgccgucggccuccgcaacguccccucccgcuccucccgcggccucuucggcgccaucgccggcuucaucgagggcggcugguccggccucgucgccggcugguacggcuuccagcacuccaacgaccagggcgucggcauggccgccgaccgcgacuccacccagaaggccaucgacaagaucaccuccaaggucaacaacaucgucgacaagaugaacaagcaguacgagaucaucgaccacgaguucuccgaggucgagacccgccucaacaugaucaacaacaagaucgacgaccagauccaggacaucugggccuacaacgccgagcuccucguccuccucgagaaccagaagacccucgacgagcacgacgccaacgucaacaaccucuacaacaaggucaagcgcgcccucggcuccaacgccgucgaggacggcaagggcugcuucgagcucuaccacaagugcgacgaccagugcauggagaccauccgcaacggcaccuacaaccgccgcaaguaccaggaggaguccaagcucgagcgccagaagaucgagggcgucaagcucgaguccgagggcaccuacaagauccucaccaucuacuccaccgucgccuccucccucgucaucgccaugggcuucgccgccuuccucuucugggccauguccaacggcuccugccgcugcaacaucugcaucuga

SEQ ID NO: 106345 - RNA, 1683 nt, Artificial Sequence
  derived and/or modified CDS sequence (opt2) from hemagglutinin__InfluenzaA__AGQ81167
auggagaccgucucccucaucaccauccuccucgucgccaccgucuccaacgccgacaagaucugcaucggcuaccaguccaccaacuccaccgagaccgucgacacccucaccgagaacaacguccccgucacccacgccaaggagcuccuccacaccgagcacaacggcaugcucugcgccaccucccucggccagccccucauccucgacaccugcaccaucgagggccucaucuacggcaaccccuccugcgaccuccuccucgagggccgcgagugguccuacaucgucgagcgccccuccgccgucaacggccucugcuaccccggcaacgucgagaaccucgaggagcuccgcucccucuucuccuccgcccgcuccuaccagcgcauccagaucuuccccgacaccaucuggaacgucuccuacaacggcaccuccaaggccugcuccggcuccuucuaccgcuccaugcgcuggcucacccagaagaacuccaacuaccccauccaggacgcccaguacaccaacaaccagggcaagaacauccucuucauguggggcaucaaccacccccccaccgacaccacccagcgcgaccucuacacccgcaccgacaccaccaccuccgucgccaccgaggagaucaaccgcaucuucaagccccucaucggcccccgcccccucgucaacggccucaugggccgcaucgacuacuacugguccguccucaagcccggccagacccuccgcaucaaguccgacggcaaccucaucgcccccugguacggccacauccucuccggcgagucccacggccgcauccucaagaccgaccucaagaagggcuccugcaccguccagugccagaccgagaagggcggccucaacaccacccuccccuuccagaacgucuccaaguacgccuucggcaacugcuccaaguacaucggcaucaagucccucaagcucgccgucggccuccgcaacguccccucccgcuccucccgcggccucuucggcgccaucgccggcuucaucgagggcggcugguccggccucgucgccggcugguacggcuuccagcacuccaacgaccagggcgucggcauggccgccgaccgcgacuccacccagaaggccaucgacaagaucaccuccaaggucaacaacaucgucgacaagaugaacaagcaguacgagaucaucgaccacgaguucuccgaggucgagacccgccucaacaugaucaacaacaagaucgacgaccagauccaggacaucugggccuacaacgccgagcuccucguccuccucgagaaccagaagacccucgacgagcacgacgccaacgucaacaaccucuacaacaaggucaagcgcgcccucggcuccaacgccgucgaggacggcaagggcugcuucgagcucuaccacaagugcgacgaccagugcauggagaccauccgcaacggcaccuacaaccgccgcaaguaccaggaggaguccaagcucgagcgccagaagaucgagggcgucaagcucgaguccgagggcaccuacaagauccucaccaucuacuccaccgucgccuccucccucgucaucgccaugggcuucgccgccuuccucuucugggccauguccaacggcuccugccgcugcaacaucugcaucuga

SEQ ID NO: 106346 - RNA, 1683 nt, Artificial Sequence
  derived and/or modified CDS sequence (opt2) from hemagglutinin__InfluenzaA__AGQ81168
auggagaccgucucccucaucaccauccuccucgucgucaccgucuccaacgccgacaagaucugcaucggcuaccaguccaccaacuccaccgagaccgucgacacccucaccgagaacaacguccccgucacccacgcccgcgagcuccuccacaccgagcacaacggcaugcucugcgccaccucccucggccacccccucauccucgacaccugcaccaucgagggccucaucuacggcaaccccuccugcgaccuccuccucggcggccgcgagugguccuacaucgucgagcgccccuccgccgucaacggccucugcuaccccggcaacgucgagaaccucgaggagcuccgcucccucuucuccuccgcccgcuccuaccagcgcauccagaucuuccccgacaccaucuggaacgucuccuacuccggcaccuccaaggccugcuccgacuccuucuaccgcuccaugcgcuggcucacccagaagggcaacgccuaccccauccaggacgcccaguacaccaacaaccagggcaagaacauccucuucauguggggcaucaaccacccccccaccgacaccgcccagaccaaccucuacacccgcaccgacaccaccaccuccgucgccaccgaggagaucaaccgcaccuucaagccccucaucggcccccgcccccucgucaacggccucaugggccgcaucaacuacuacugguccguccucaagcccggccagacccuccgcaucaaguccaacggcaaccucaucgcccccugguacggccacauccucuccggcgagucccacggccgcauccucaagaccgaccucaagcgcggcuccugcaccguccagugccagaccgagaagggcggccucaacaccacccuccccuuccagaacgucuccaaguacgccuucggcaacugcuccaaguacaucggcaugaagucccucaagcucgccgucggccuccgcaacguccccucccgcuccucccgcggccucuucggcgccaucgccggcuucaucgagggcggcugguccggccucgucgccggcugguacggcuuccagcacuccaacgaccagggcgucggcauggccgccgaccgcgacuccacccagaaggccaucgacaagaucaccuccaaggucaacaacaucgucgacaagaugaacaagcaguacgagaucaucgaccacgaguucuccgaggucgagacccgccucaacaugaucaacaacaagaucgacgaccagauccaggacaucugggccuacaacgccgagcuccucguccuccucgagaaccagaagacccucgacgagcacgacgccaacgucaacaaccucuacaacaaggucaagcgcgcccucggcuccaacgccgucgaggacggcaagggcugcuucgagcucuaccacaagugcgacgaccagugcauggagaccauccgcaacggcaccuacaaccgccgcaaguaccaggaggaguccaagcucgagcgccagaagaucgagggcgucaagcucgaguccgagggcaccuacaagauccucaccaucuacuccaccgucgccuccucccucgucaucgccaugggcuucgccgccuuccucuucugggccauguccaacggcuccugccgcugcaacaucugcaucuga

SEQ ID NO: 106347 - RNA, 1683 nt, Artificial Sequence
  derived and/or modified CDS sequence (opt2) from hemagglutinin__InfluenzaA__AGQ81169
auggagaccgucucccucaucaccauccuccucgucgucaccgucuccaacgccgacaagaucugcaucggcuaccaguccaccaacuccaccgagaccgucgacacccucaccgagaacaacguccccgucacccacgcccgcgagcuccuccacaccgagcacaacggcaugcucugcgccaccucccucggccacccccucauccucgacaccugcaccaucgagggccucaucuacggcaaccccuccugcgaccuccuccucggcggccgcgagugguccuacaucgucgagcgccccuccgccgucaacggccucugcuaccccggcaacgucgagaaccucgaggagcuccgcucccucuucuccuccgcccgcuccuaccagcgcauccagaucuuccccgacaccaucuggaacgucuccuacuccggcaccuccaaggccugcuccgacuccuucuaccgcuccaugcgcuggcucacccagaaggacaacgccuaccccauccaggacgcccaguacaccaacaaccaggagaagaacauccucuucauguggggcaucaaccacccccccaccgacaccguccagaccaaccucuacacccgcaccgacaccaccaccuccgucgccaccgaggagaucaaccgcaccuucaagccccucaucggcccccgcccccucgucaacggccucaugggccgcaucaacuacuacugguccguccucaagcccggccagacccuccgcaucaaguccaacggcaaccucaucgcccccugguacggccacauccucuccggcgagucccacggccgcauccucaagaccgaccucaagcgcggcuccugcaccguccagugccagaccgagaagggcggccucaacaccacccuccccuuccagaacgucuccaaguacgccuucggcaacugcuccaaguacaucggcaugaagucccucaagcucgccgucggccuccgcaacguccccucccgcuccucccgcggccucuucggcgccaucgccggcuucaucgagggcggcugguccggccucgucgccggcugguacggcuuccagcacuccaacgaccagggcgucggcauggccgccgaccgcgacuccacccagaaggccaucgacaagaucaccuccaaggucaacaacaucgucgacaagaugaacaagcaguacgagaucaucgaccacgaguucuccgaggucgagacccgccucaacaugaucaacaacaagaucgacgaccagauccaggacaucugggccuacaacgccgagcuccucguccuccucgagaaccagaagacccucgacgagcacgacgccaacgucaacaaccucuacaacaaggucaagcgcgcccucggcuccaacgccgucgaggacggcaagggcugcuucgagcucuaccacaagugcgacgaccagugcauggagaccauccgcaacggcaccuacaaccgccgcaaguaccaggaggaguccaagcucgagcgccagaagaucgagggcgucaagcucgaguccgagggcaccuacaagauccucaccaucuacuccaccgucgccuccucccucgucaucgccaugggcuucgccgccuuccucuucugggccauguccaacggcuccugccgcugcaacaucugcaucuga

SEQ ID NO: 106348 - RNA, 1683 nt, Artificial Sequence
  derived and/or modified CDS sequence (opt2) from hemagglutinin__InfluenzaA__AGQ81170
auggagaccgucucccucaucaccauccuccucgucgucaccgucuccaacgccgacaagaucugcaucggcuaccaguccaccaacuccaccgagaccgucgacacccucaccgagaacaacguccccgucacccacgcccgcgagcuccuccacaccgagcacaacggcaugcucugcgccaccucccucggccacccccucauccucgacaccugcaccaucgagggccucaucuacggcaaccccuccugcgaccuccuccucggcggccgcgagugguccuacaucgucgagcgccccuccgccgucaacggccucugcuaccccggcaacgucgagaaccucgaggagcuccgcucccucuucuccuccgcccgcuccuaccagcgcauccagaucuuccccgacaccaucuggaacgucuccuacuccggcaccuccaaggccugcuccgacuccuucuaccgcuccaugcgcuggcucacccagaaggacaacgccuaccccauccaggacgcccaguacaccaacaaccagggcaagaacauccucuucauguggggcaucaaccacccccccaccgacaccgcccagaccaaccucuacacccgcaccgacaccaccaccuccgucgccaccgaggagaucaaccgcaccuucaagccccucaucggcccccgcccccucgucaacggccucaugggccgcaucaacuacuacugguccguccucaagcccggccagacccuccgcaucaaguccaacggcaaccucaucgcccccugguacggccacauccucuccggcgagucccacggccgcauccucaagaccgaccucaagcgcggcuccugcaccguccagugccagaccgagaagggcggccucaacaccacccuccccuuccagaacgucuccaaguacgccuucggcaacugcuccaaguacaucggcaugaagucccucaagcucgccgucggccuccgcaacguccccucccgcuccucccgcggccucuucggcgccaucgccggcuucaucgagggcggcugguccggccucgucgccggcugguacggcuuccagcacuccaacgaccagggcgucggcauggccgccgaccgcgacuccacccagaaggccaucgacaagaucaccuccaaggucaacaacaucgucgacaagaugaacaagcaguacgagaucaucgaccacgaguucuccgaggucgagacccgccucaacaugaucaacaacaagaucgacgaccagauccaggacaucugggccuacaacgccgagcuccucguccuccucgagaaccagaagacccucgacgagcacgacgccaacgucaacaaccucuacaacaaggucaagcgcgcccucggcuccaacgccgucgaggacggcaagggcugcuucgagcucuaccacaagugcgacgaccagugcauggagaccauccgcaacggcaccuacaaccgccgcaaguaccaggaggaguccaagcucgagcgccagaagaucgagggcgucaagcucgaguccgagggcaccuacaagauccucaccaucuacuccaccgucgccuccucccucgucaucgccaugggcuucgccgccuuccucuucugggccauguccaacggcuccugccgcugcaacaucugcaucuga

SEQ ID NO: 106349 - RNA, 1683 nt, Artificial Sequence; identical to SEQ ID NO: 106348
  derived and/or modified CDS sequence (opt2) from hemagglutinin__InfluenzaA__AGQ81171

SEQ ID NO: 106350 - RNA, 1683 nt, Artificial Sequence; identical to SEQ ID NO: 106348
  derived and/or modified CDS sequence (opt2) from hemagglutinin__InfluenzaA__AGQ81172

SEQ ID NO: 106351 - RNA, 1683 nt, Artificial Sequence
  derived and/or modified CDS sequence (opt2) from hemagglutinin__InfluenzaA__AGQ81173
auggagaccgccucccucaucaccauccuccucgucgucaccgucuccaacgccgacaagaucugcaucggcuaccaguccaccaacuccaccgagaccgucgacacccucaccgagaacaacguccccgucacccacgccaaggagcuccuccacaccgagcacaacggcaugcucugcgccaccucccucggcaacccccucauccucgacaccugcaccaucgagggccucaucuacggcaaccccuccugcgaccuccuccucggcggccgcgagugguccuacaucgucgagcgccccuccgccgucaacggccucugcuaccccggcaacgucgagaaccucgaggagcuccgcucccucuucuccuccgcccgcuccuaccagcgcauccagaucuuccccgacaccaucuggaacgucuccuacuccggcaccuccaaggccugcuccgacuccuucuaccgcuccaugcgcuggcucacccagaaggacaacgccuaccccauccaggacgcccaguacaccaacaaccagggcaagaacauccucuucauguggggcaucaaccacccccccaccgacaccgcccagaccaaccucuacacccgcaccgacaccaccaccuccgucgccaccgaggagaucaaccgcaccuucaagccccucaucggcccccgcccccucgucaacggccucaugggccgcaucaacuacuacugguccguccucaagcccggccagacccuccgcaucaaguccaacggcaaccucaucgcccccugguacggccacauccucuccggcgagucccacggccgcauccucaagaccgaccucaagcgcggcuccugcaccguccagugccagaccgagaagggcggccucaacaccacccuccccuuccagaacgucuccaaguacgccuucggcaacugcuccaaguacaucggcaugaagucccucaagcucgccgucggccuccgcaacguccccucccgcuccucccgcggccucuucggcgccaucgccggcuucaucgagggcggcugguccggccucgucgccggcugguacggcuuccagcacuccaacgaccagggcgucggcauggccgccgaccgcgacuccacccagaaggccaucgacaagaucaccuccaaggucaacaacaucgucgacaagaugaacaagcaguacgagaucaucgaccacgaguucuccgaggucgagacccgccucaacaugaucaacaacaagaucgacgaccagauccaggacaucugggccuacaacgccgagcuccucguccuccucgagaaccagaagacccucgacgagcacgacgccaacgucaacaaccucuacaacaaggucaagcgcgcccucggcuccaacgccgucgaggacggcaagggcugcuucgagcucuaccacaagugcgacgaccagugcauggagaccauccgcaacggcaccuacaaccgccgcaaguaccaggaggaguccaagcucgagcgccagaagaucgagggcgucaagcucgaguccgagggcaccuacaagauccucaccaucuacuccaccgucgccuccucccucgucaucgccaugggcuucgccgccuuccucuucugggccauguccaacggcuccugccgcugcaacaucugcaucuga

SEQ ID NO: 106352 - RNA, 1683 nt, Artificial Sequence; identical to SEQ ID NO: 106348
  derived and/or modified CDS sequence (opt2) from hemagglutinin__InfluenzaA__AGQ81175

SEQ ID NO: 106353 - RNA, 1683 nt, Artificial Sequence
  derived and/or modified CDS sequence (opt2) from hemagglutinin__InfluenzaA__AGQ81177
auggagaccgucucccucaucaccauccuccucgucgccaccgucuccaacgccgacaagaucugcaucggcuaccaguccaccaacuccaccgagaccgucgacacccucaccgagaacaacguccccgucacccacgccaaggagcuccuccacaccgagcacaacggcaugcucugcgccaccucccucggccagccccucauccucgacaccugcaccaucgagggccucaucuacggcaaccccuccugcgaccuccuccucgagggccgcgagugguccuacaucgucgagcgccccuccgccgucaacggccucugcuaccccggcaacgucgagaaccucgaggagcuccgcucccucuucuccuccgcccgcuccuaccagcgcauccagaucuuccccgacaccaucuggaacgucuccuacaacggcaccuccaaggccugcuccggcuccuucuaccgcuccaugcgcuggcucacccgcaagaacggcgacuaccccauccaggacgcccaguacaccaacaaccagggcaagaacauccucuucauguggggcaucaaccacccccccaccgacaccacccagcgcgaccucuacacccgcaccgacaccaccaccuccgucgccaccgaggagaucaaccgcaucuucaagccccucaucggcccccgcccccucgucaacggccucaugggccgcaucgacuacuacugguccguccucaagcccggccagacccuccgcaucaaguccgacggcaaccucaucgcccccugguacggccacauccucuccggcgagucccacggccgcauccucaagaccgaccucaagcgcggcuccugcaccguccagugccagaccgagaagggcggccucaacaccacccuccccuuccagaacgucuccaaguacgccuucggcaacugcuccaaguacaucggcaucaagucccucaagcucgccgucggccuccgcaacguccccucccgcuccucccgcggccucuucggcgccaucgccggcuucaucgagggcggcugguccggccucgucgccggcugguacggcuuccagcacuccaacgaccagggcgucggcauggccgccgaccgcgacuccacccagaaggccaucgacaagaucaccuccaaggucaacaacaucgucgacaagaugaacaagcaguacgagaucaucgaccacgaguucuccgaggucgagacccgccucaacaugaucaacaacaagaucgacgaccagauccaggacaucugggccuacaacgccgagcuccucguccuccucgagaaccagaagacccucgacgagcacgacgccaacgucaacaaccucuacaacaaggucaagcgcgcccucggcuccaacgccgucgaggacggcaagggcugcuucgagcucuaccacaagugcgacgaccagugcauggagaccauccgcaacggcaccuacaaccgccgcaaguaccaggaggaguccaagcucgagcgccagaagaucgagggcgucaagcucgaguccgagggcaccuacaagauccucaccaucuacuccaccgucgccuccucccucgucaucgccaugggcuucgccgccuuccucuucugggccauguccaacggcuccugccgcugcaacaucugcaucuga

SEQ ID NO: 106354 - RNA, 1683 nt, Artificial Sequence; identical to SEQ ID NO: 106353
  derived and/or modified CDS sequence (opt2) from hemagglutinin__InfluenzaA__AGQ81178

SEQ ID NO: 106355 - RNA, 1683 nt, Artificial Sequence; identical to SEQ ID NO: 106345
  derived and/or modified CDS sequence (opt2) from hemagglutinin__InfluenzaA__AGQ81181

SEQ ID NO: 106356 - RNA, 1683 nt, Artificial Sequence; identical to SEQ ID NO: 106345
  derived and/or modified CDS sequence (opt2) from hemagglutinin__InfluenzaA__AGQ81183

SEQ ID NO: 106357 - RNA, 1683 nt, Artificial Sequence; identical to SEQ ID NO: 106344
  derived and/or modified CDS sequence (opt2) from hemagglutinin__InfluenzaA__AGQ81184

SEQ ID NO: 106358 - RNA, 1683 nt, Artificial Sequence
  derived and/or modified CDS sequence (opt2) from hemagglutinin__InfluenzaA__AGQ81185
auggagaccgccucccucaucaccauccuccucgucgccaccgucuccaacgccgacaagaucugcaucggcuaccaguccaccaacuccaccgagaccgucgacacccucaccgagaacaacguccccgucacccacgccaaggagcuccuccacaccgagcacaacggcaugcucugcgccaccucccucggccagccccucauccucgacaccugcaccaucgagggccucaucuacggcaaccccuccugcgaccuccuccucgagggccgcgagugguccuacaucgucgagcgccccuccgccgucaacggccucugcuaccccggcaacgucgagaaccucgaggagcuccgcucccucuucuccuccgcccgcuccuaccagcgcauccagaucuuccccgacaccaccuggaacgucuccuacaacggcaccuccaaggccugcuccggcuccuucuaccgcuccaugcgcuggcucacccagaagaacuccaacuaccccauccaggacgcccaguacaccaacaaccagggcaagaacauccucuucauguggggcaucaaccacccccccaccgacaccacccagcgcgaccucuacacccgcaccgacaccaccaccuccgucgccaccgaggagaucaaccgcaucuucaagccccucaucggcccccgcccccucgucaacggccucaugggccgcaucgacuacuacugguccguccucaagcccggccagacccuccgcaucaaguccgacggcaaccucaucgcccccugguacggccacauccucuccggcgagucccacggccgcauccucaagaccgaccucaagcgcggcuccugcaccguccagugccagaccgagaagggcggccucaacaccacccuccccuuccagaacgucuccaaguacgccuucggcaacugcuccaaguacaucggcaucaagucccucaagcucgccgucggccuccgcaacguccccucccgcuccucccgcggccucuucggcgccaucgccggcuucaucgagggcggcugguccggccucgucgccggcugguacggcuuccagcacuccaacgaccagggcgucggcauggccgccgaccgcgacuccacccagaaggccaucgacaagaucaccuccaaggucaacaacaucgucgacaagaugaacaagcaguacgagaucaucgaccacgaguucuccgaggucgagacccgccucaacaugaucaacaacaagaucgacgaccagauccaggacaucugggccuacaacgccgagcuccucguccuccucgagaaccagaagacccucgacgagcacgacgccaacgucaacaaccucuacaacaaggucaagcgcgcccucggcuccaacgccgucgaggacggcaagggcugcuucgagcucuaccacaagugcgacaaccagugcauggagaccauccgcaacggcaccuacaaccgccgcaaguaccaggaggaguccaagcucgagcgccagaagaucgagggcgucaagcucgaguccgagggcaccuacaagauccucaccaucuacuccaccgucgccuccucccucgucaucgccaugggcuucgccgccuuccucuucugggccauguccaacggcuccugccgcugcaacaucugcaucuga

SEQ ID NO: 106359 - RNA, 1683 nt, Artificial Sequence
  derived and/or modified CDS sequence (opt2) from hemagglutinin__InfluenzaA__AGQ81186
auggagaccgucucccucaucaccauccuccucgucgccaccgucuccaacgccgacaagaucugcaucggcuaccaguccaccaacuccaccgagaccgucgacacccucaccgagaacaacguccccgucacccacgccaaggagcuccuccacaccgagcacaacggcaugcucugcgccaccucccucggccagccccucauccucgacaccugcaccaucgagggccucaucuacggcaaccccuccugcgaccuccuccucgagggccgcgagugguccuacaucgucgagcgccccuccgccgucaacggccucugcuaccccggcaacgucgagaaccucgaggagcuccgcucccucuucuccuccgcccgcuccuaccagcgcauccagaucuuccccgacaccaucuggaacgucuccuacgacggcaccuccaaggccugcuccggcuccuucuaccgcuccaugcgcuggcucacccagaagaacuccgacuaccccauccaggacgcccaguacaccaacaaccagggcaagaacauccucuucauguggggcaucaaccacccccccaccgacaccacccagcgcgaccucuacacccgcaccgacaccaccaccuccgucgccaccgaggagaucaaccgcaucuucaagccccucaucggcccccgcccccucgucaacggccucaugggccgcaucgacuacuacugguccguccucaagcccggccagacccuccgcaucaaguccgacggcaaccucaucgcccccugguacggccacauccucuccggcgagucccacggccgcauccucaagaccgaccucaagaagggcuccugcaccguccagugccagaccgagaagggcggccucaacaccacccuccccuuccagaacgucuccaaguacgccuucggcaacugcuccaaguacaucggcaucaagucccucaagcucgccaucggccuccgcaacguccccucccgcuccucccgcggccucuucggcgccaucgccggcuucaucgagggcggcugguccggccucgucgccggcugguacggcuuccagcacuccaacgaccagggcgucggcauggccgccgaccgcgacuccacccagaaggccaucgacaagaucaccuccaaggucaacaacaucgucgacaagaugaacaagcaguacgagaucaucgaccacgaguucuccgaggucgagacccgccucaacaugaucaacaacaagaucgacgaccagauccaggacaucugggccuacaacgccgagcuccucguccuccucgagaaccagaagacccucgacgagcacgacgccaacgucaacaaccucuacaacaaggucaagcgcgcccucggcuccaacgccgucgaggacggcaagggcugcuucgagcucuaccacaagugcgacgaccagugcauggagaccauccgcaacggcaccuacaaccgcaagaaguaccaggaggaguccaagcucgagcgccagaagaucgagggcgucaagcucgaguccgagggcaccuacaagauccucaccaucuacuccaccgucgccuccucccucgucaucgccaugggcuucgccgccuuccucuucugggccauguccaacggcuccugccgcugcaacaucugcaucuga

SEQ ID NO: 106360 - RNA, 1683 nt, Artificial Sequence; identical to SEQ ID NO: 106348
  derived and/or modified CDS sequence (opt2) from hemagglutinin__InfluenzaA__AGQ81190

SEQ ID NO: 106361 - RNA, 1683 nt, Artificial Sequence; identical to SEQ ID NO: 106348
  derived and/or modified CDS sequence (opt2) from hemagglutinin__InfluenzaA__AGQ81191

SEQ ID NO: 106362 - RNA, 1683 nt, Artificial Sequence; identical to SEQ ID NO: 106353
  derived and/or modified CDS sequence (opt2) from hemagglutinin__InfluenzaA__AGQ81192

SEQ ID NO: 106363 - RNA, 1683 nt, Artificial Sequence
  derived and/or modified CDS sequence (opt2) from hemagglutinin__InfluenzaA__AGQ81193
auggagaccgucucccucaucaccauccuccucgucgccaccgucuccaacgccgacaagaucugcaucggcuaccaguccaccaacuccaccgagaccgucgacacccucaccgagaacaacguccccgucacccacgccaaggagcuccuccacaccgagcacaacggcaugcucugcgccaccucccucggccagccccucauccucgacaccugcaccaucgagggccucaucuacggcaaccccuccugcgaccuccuccucgagggccgcgagugguccuacaucgucgagcgccccuccgccgucaacggccucugcuaccccggcaacgucgagaaccucgaggagcuccgcucccucuucuccuccgcccgcuccuaccagcgcauccagaucuuccccgacaccaucuggaacgucuccuacaccggcaccuccaaggccugcuccggcuccuucuaccgcuccaugcgcuggcucacccagaagaacggcgacuaccccauccaggacgcccaguacaccaacaaccagggcaagaacauccucuucauguggggcaucaaccacccccccaccgacaccacccagcgcgaccucuacacccgcaccgacaccaccaccuccgucgccaccgaggagaucaaccgcaucuucaagccccucaucggcccccgcccccucgucaacggccucaugggccgcaucgacuacuacugguccguccucaagcccggccagacccuccgcaucaaguccgacggcaaccucaucgcccccugguacggccacguccucuccggcgagucccacggccgcauccucaagaccgaccucaagcgcggcuccugcaccguccagugccagaccgagaagggcggccucaacaccacccuccccuuccagaacgucuccaaguacgccuucggcaacugcuccaaguacaucggcaucaagucccucaagcucgccgucggccuccgcaacguccccucccgcuccucccgcggccucuucggcgccaucgccggcuucaucgagggcggcugguccggccucgucgccggcugguacggcuuccagcacuccaacgaccagggcgucggcauggccgccgaccgcgacuccacccagaaggccaucgacaagaucaccuccaaggucaacaacaucgucgacaagaugaacaagcaguacgagaucaucgaccacgaguucuccgaggucgagacccgccucaacaugaucaacaacaagaucgacgaccagauccaggacaucugggccuacaacgccgagcuccucguccuccucgagaaccagaagacccucgacgagcacgacgccaacgucaacaaccucuacaacaaggucaagcgcgcccucggcuccaacgccgucgaggacggcaagggcugcuucgagcucuaccacaagugcgacgaccagugcauggagaccauccgcaacggcaccuacaaccgccgcaaguaccaggaggaguccaagcucgagcgccagaagaucgagggcgucaagcucgaguccgagggcaccuacaagauccucaccaucuacuccaccgucgccuccucccucgucaucgccaugggcuucgccgccuuccucuucugggccauguccaacggcuccugccgcugcaacaucugcaucuga

SEQ ID NO: 106364 - RNA, 1683 nt, Artificial Sequence; identical to SEQ ID NO: 106348
  derived and/or modified CDS sequence (opt2) from hemagglutinin__InfluenzaA__AGQ81194

SEQ ID NO: 106365 - RNA, 1686 nt, Artificial Sequence
  derived and/or modified CDS sequence (opt2) from hemagglutinin__InfluenzaA__AGQ81195
auguacaagaucgucgucaucaucacccuccucggcaccgucaagggccucgacaagaucugccucggccaccacgccgucgccaacggcaccaucgucaagacccucaccaacgagcaggaggaggucaccaacgccaccgagaccgucgagggcaagucccucaaccgccucugcaugaagggccgcaaccacaaggaccucggcaacugccaccccaucggcaugcucaucggcacccccgccugcgaccuccaccucaccggcaccugggacacccucaucgagcgcgagaacgccaucgccuacugcuaccccggcgccaccaucaacgaggaggcccuccgccagaagaucauggaguccggcggcaucuccaagaucuccaccggcuucaccuacggcuccuccaucaacuccgccggcaccacccgcgccugcaugcgcaacggcggcaacuccuucuacgccgagcucaaguggcucgucuccaaguccaagggccagaacuucccccagaccaccaacaccuaccgcaacaccgacaccuccgagcaccucaucauguggggcauccaccaccccuccuccacccaggagaagaacgaccucuacggcacccagucccucuccaucuccgucggcuccuccaccuaccagaacaacuucguccccgucgucggcgcccgcccccaggucaacggccaguccggccgcaucgacuuccacuggacccucguccagcccggcgacaacaucaccuucucccacaacggcggccucaucgcccccucccgcgucuccaagcucaucggccgcggccucggcauccaguccgacgccuccaucgacaacaacugcgaguccaagugcuucuggcgcggcggcuccaucaacacccgccuccccuuccagaaccucuccccccgcaccgucggccagugccccaaguacgucaacaagcgcucccucaugcucgccaccggcaugcgcaacguccccgagaucaugcagggccgcggccucuucggcgccaucgccggcuucaucgagaacggcugggagggcauggucgacggcugguacggcuuccgccaccagaacgcccagggcaccggccaggccgccgacuacaaguccacccaggccgccaucgaccagaucaccggcaagcucaaccgccucaucgagaagaccaacaccgaguucgaguccaucgaguccgaguucuccgagaucgagcaccagaucggcaacgucaucaacuggaccaaggacuccaucaccgacaucuggaccuaccaggccgagcuccucgucgccauggagaaccagcacaccaucgacauggccgacuccgagaugcucaaccucuacgagcgcguccgcaagcagcuccgccagaacgccgaggaggacggcaagggcugcuucgagaucuaccacgccugcgacgacuccugcauggaguccauccgcaacaacaccuacgaccacucccaguaccgcgaggaggcccuccucaaccgccucaacaucaaccccgucacccucuccuccggcuacaaggacaucauccucugguucuccuucggcgccuccugcuucguccuccucgccgucgucaugggccucgucuucuucugccucaagaacggcaacaugcgcugcaccaucugcaucuga

SEQ ID NO: 106366 - RNA, 1686 nt, Artificial Sequence
  derived and/or modified CDS sequence (opt2) from hemagglutinin__InfluenzaA__AGQ81196
auguacaagaucgucgucaucaucgcccuccucggcgccgucaagggccucgacaagaucugccucggccaccacgccgucgccaacggcaccaucgucaagacccucaccaacgagcaggaggaggucaccaacgccaccgagaccgucgaguccgccucccucaaccgccucugcaugaagggccgcucccacaaggaccucggcaacugccaccccaucggcaugcucaucggcacccccgccugcgaccuccaccucaccggcaccugggacacccucaucgagcgcgagaacgccaucgccuacugcuaccccggcgccaccgucaacgaggaggcccuccgccagaagaucauggaguccggcggcaucuccaagaucuccaccggcuucaccuacggcuccuccaucaacuccgccggcaccaccaaggccugcaugcgcaaccgcggcaacuccuucuacgccgagcucaaguggcucgucuccaaguccaagggccagaacuucccccagaccaccaacaccuaccgcaacaccgacaccgccgagcaccucaucauguggggcauccaccaccccuccuccacccaggagaagaacgaccucuacggcacccagucccucuccaucuccgucggcuccuccaccuaccagaacaacuucguccccgucgucggcgcccgcccccaggucaacggccaguccggccgcaucgacuuccacuggacccucguccagcccggcgacaacaucaccuucucccacaacggcggccucaucgcccccucccgcgucuccaagcucgucggccgcggccucggcauccaguccgacgcccccaucgacaacaacugcgaguccaagugcuucuggcgcggcggcuccaucaacacccgccuccccuuccagaaccucuccccccgcaccgucggccagugccccaaguacgucaacaagcgcucccucaugcucgccaccggcaugcgcaacguccccgagaucaugcagggccgcggccucuucggcgccaucgccggcuucaucgagaacggcugggagggcauggucgacggcugguacggcuuccgccaccagaacgcccagggcaccggccaggccgccgacuacaaguccacccagaccgccaucgaccagaucaccggcaagcucaaccgccucaucgagaagaccaacaccgaguucgaguccaucgaguccgaguucuccgagaucgagcaccagaucggcaacgucaucaacuggaccaaggacuccaucaccgacaucuggaccuaccaggccgagcuccucgucgccauggagaaccagcacaccaucgacauggccgacuccgagaugcucaaccucuacgagcgcguccgcaagcagcuccgccagaacgccgaggaggacggcaagggcugcuucgagaucuaccacgccugcgacgacuccugcauggaguccauccgcaacaacaccuacgaccacucccaguaccgcgaggaggcccuccucaaccgccucaacaucaaccccgucaagcucuccuccggcuacaaggacaucauccucugguucuccuucggcgccuccugcuucguccuccucgccgucgucaugggccucgucuucuucugccucaagaacggcaacaugcgcugcaccaucugcaucuga

SEQ ID NO: 106367 - RNA, 1686 nt, Artificial Sequence
  derived and/or modified CDS sequence (opt2) from hemagglutinin__InfluenzaA__AGQ81198
auguacaagaucgucgucaucaucgcccuccucggcgccgucaagggccucgacaagaucugccucggccaccacgccgucgccaacggcaccaucgucaagacccucaccaacgagcaggaggaggucaccaacgccaccgagaccgucgaguccaccucccucaaccgccucugcaugaagggccgcaaccacaaggaccucggcaacugccaccccaucggcaugcucaucggcacccccgccugcgaccuccaccucaccggcaccugggacacccucaucgagcgcgagaacgccaucgccuacugcuaccccggcgccaccaucaacgaggaggcccuccgccagaagaucauggaguccggcggcaucuccaagaucuccaccggcuucaccuacggcuccuccaucaacuccgccggcaacaccaaggccugcaugcgcaacggcggcaacuccuucuacgccgagcuccgcuggcucgucuccaagaacaagggccagaacuucccccagaccaccaacaccuaccgcaacaccgacaccgccgagcaccucaucaucuggggcauccaccaccccuccuccaccaaggagaagaacgaccucuacggcacccagucccucuccaucuccgucggcuccuccaccuaccagaacaacuucguccccgucgucggcgcccgcccccaggucaacggccaguccggccgcaucgacuuccacuggacccucguccagcccggcgacaacaucaccuucucccacaacggcggccucaucgcccccucccgcgucuccaagcucaucggccgcggccucggcauccaguccgacgcccccaucgacaacaacugcgaguccaagugcuucuggcgcggcggcuccaucaacacccgccuccccuuccagaaccucuccccccgcaccgucggccagugccccaaguacgucaacaagaagucccucaugcucgccaccggcaugcgcaacguccccgagaucaugcagggccgcggccucuucggcgccaucgccggcuucaucgagaacggcugggagggcauggucgacggcugguacggcuuccgccaccagaacgcccagggcaccggccaggccgccgacuacaaguccacccaggccgccaucgaccagaucaccggcaagcucaaccgccucaucgagaagaccaacaccgaguucgaguccaucgaguccgaguucuccgagaucgagcaccagaucggcaacgucaucaacuggaccaaggacuccaucaccgacaucuggaccuaccaggccgagcuccucgucgccauggagaaccagcacaccaucgacauggccgacuccgagaugcucaaccucuacgagcgcguccgcaagcagcuccgccagaacgccgaggaggacggcaagggcugcuucgagaucuaccacgccugcgacgacuccugcauggaguccauccgcaacaacaccuacgaccacucccaguaccgcgaggaggcccuccucaaccgccucaacaucaaccccgucacccucuccuccggcuacaaggacaucauccucugguucuccuucggcgccuccugcuucguccuccucgccgucgucaugggccucgucuucuucugccucaagaacggcaacaugcgcugcaccaucugcaucuga

SEQ ID NO: 106368 - RNA, 1686 nt, Artificial Sequence
  derived and/or modified CDS sequence (opt2) from hemagglutinin__InfluenzaA__AGQ81199
auguacaagaucgucgucaucaucgcccuccucggcgccgucaagggccucgacaagaucugccucggccaccacgccgucgccaacggcaccaucgucaagacccucaccaacgagcaggaggaggucaccaacgccaccgagaccgucgaguccgccucccucaaccgccucugcaugaagggccgcucccacaaggaccucggcaacugccaccccaucggcaugcucaucggcacccccgccugcgaccuccaccucaccggcaccugggacacccucaucgagcgcgagaacgccaucgccuacugcuaccccggcgccaccgucaacgaggaggcccuccgccagaagaucauggaguccggcggcaucuccaagaucuccaccggcuucaccuacggcuccuccaucaacuccgccggcaccaccaaggccugcaugcgcaacggcggcaacuccuucuacgccgagcucaaguggcucgucuccaaguccaagggccagaacuucccccagaccaccaacaccuaccgcaacaccgacaccgccgagcaccucaucauguggggcauccaccaccccuccuccacccaggagaagaacgaccucuacggcacccagucccucuccaucuccgucggcuccuccaccuaccagaacaacuucguccccgucgucggcgcccgcccccaggucaacggccaguccggccgcaucgacuuccacuggacccucguccagcccggcgacaacaucaccuucucccacaacggcggccucaucgcccccucccgcgucuccaagcucgucggccgcggccucggcauccaguccgacgcccccaucgacaacaacugcgaguccaagugcuucuggcgcggcggcuccaucaacacccgccuccccuuccagaaccucuccccccgcaccgucggccagugccccaaguacgucaacaagcgcucccucaugcucgccaccggcaugcgcaacguccccgagaucaugcagggccgcggccucuucggcgccaucgccggcuucaucgagaacggcugggagggcauggucgacggcugguacggcuuccgccaccagaacgcccagggcaccggccaggccgccgacuacaaguccacccagaccgccaucgaccagaucaccggcaagcucaaccgccucaucgagaagaccaacaccgaguucgaguccaucgaguccgaguucuccgagaucgagcaccagaucggcaacgucaucaacuggaccaaggacuccaucaccgacaucuggaccuaccaggccgagcuccucgucgccauggagaaccagcacaccaucgacauggccgacuccgagaugcucaaccucuacgagcgcguccgcaagcagcuccgccagaacgccgaggaggacggcaagggcugcuucgagaucuaccacgccugcgacgacuccugcauggaguccauccgcaacaacaccuacgaccacucccaguaccgcgaggaggcccuccucaaccgccucaacaucaaccccgucaagcucuccuccggcuacaaggacaucauccucugguucuccuucggcgccuccugcuucguccuccucgccgucgucaugggccucgucuucuucugccucaagaacggcaacaugcgcugcaccaucugcaucuga

SEQ ID NO: 106369 - RNA, 1698 nt, Artificial Sequence
  derived and/or modified CDS sequence (opt2) from hemagglutinin__InfluenzaA__AGQ81200
augaagaagacccuccucuucgccgccaucuuccucuacgucaaggccgacgagaucugcaucggcuaccucuccaacaacuccaccgacaaggucgacaccaucaucgagaacaacgucaccgucaccuccuccgucgagcucgucgagaccgagcacaccggcuccuucugcuccaucaacggcaagcagcccaucggccucggcgacugcuccuucgccggcuggauccucggcaaccccaugugcgacgaccucaucggcaagaccuccugguccuacaucgucgagaagcccaaccccgccaacggcaucugcuaccccggcacccucgagaacgaggaggagcuccgccucaaguucuccggcguccucgaguucuccaaguucgaggccuucaccuccaccggcuggggcgccgucaacuccggcgccggcgucaccgccgccugcaaguucggcuccuccaacuccuucuuccgcaacauggucuggcucauccaccaguccggcaccuaccccgucaucaagcgcaccuucaacaacaccaagggccgcgacguccucgucgucuggggcauccaccaccccgccacccucaaggagcaccaggaccucuacaagaaggacuccuccuacgucgccgucggcuccgagaccuacaaccgccgcuucauccccgagaucuccacccgccccaaggucaacggccaggccggccgcaugaccuucuacuggaccaucgucaagcccggcgaguccaucaccuucgaguccaacggcgccuuccucgccccccgcuacgccuucgagaucgucuccgucggcaacggcaagcucuuccgcuccgagcucaacaucgaguccugcuccaccaagugccagaccgagaucggcggcaucaacaccaacaaguccuuccacuccguccaccgcaacaccaucggcgacugccccaaguacgucaacgucaagucccucaagcucgccaccggccuccgcaacguccccgccaucgccucccgcggccucuucggcgccaucgccggcuucaucgagggcggcuggcccggccucaucaacggcugguacggcuuccagcaccgcaacgaggagggcaccggcaucgccgccgacaaggaguccacccagaaggccaucgaccagaucaccuccaaggucaacaacaucgucgacaagaugaacaccaacuucgaguccguccagcacgaguucuccgagaucgaggagcgcaucaaccagcucuccaagcacgucgacgacuccgucgucgacaucugguccuacaacgcccagcuccucguccuccucgagaacgagaagacccucgaccuccacgacuccaacguccgcaaccuccacgagaagguccgccgcaugcucaaggacaacgccaaggacgagggcaacggcugcuucaccuucuaccacaagugcgacaacgagugcaucgagcgcguccgcaacggcaccuacgaccacaaggaguucgaggaggaguccaagaucaaccgccaggagaucgagggcgucaagcucgacuccuccggcaacgucuacaagauccucuccaucuacuccugcaucgccuccucccucguccucgccgcccucaucaugggcuucauccucugggccugcuccaacggcuccugccgcugcaccaucugcaucuga

SEQ ID NO: 106370 - RNA, 1698 nt, Artificial Sequence
  derived and/or modified CDS sequence (opt2) from hemagglutinin__InfluenzaA__AGQ81202
augaagaagacccuccucuucgccgccaucuuccucuacgucaaggccgacgagaucugcaucggcuaccucuccaacaacuccaccgacaaggucgacaccaucaucgagaacaacgucaccgucaccuccuccgucgagcucgucgagaccgagcacaccggcuccuucugcuccaucaacggcaagcagcccaucucccucggcgacugcuccuucgccggcuggauccucggcaaccccaugugcgacgaccucaucggcaagaccuccugguccuacaucgucgagaagcccaaccccgccaacggcaucugcuaccccggcacccucgagaacgaggaggagcuccgccucaaguucuccggcguccucgaguucuccaaguucgaggccuucaccuccaacggcuggggcgccgucaacuccggcgccggcgucaccgccgccugcaaguucggcuccuccaacuccuucuuccgcaacaccgucuggcucauccaccaguccggcaccuaccccgucaucaagcgcaccuucaacaacaccaagggccgcgacguccucgucgucuggggcguccaccaccccgccacccucaaggagcaccaggaccucuacaagaaggacuccuccuacgucgccgucggcuccgagaccuacaaccgccgcuucauccccgagaucuccacccgccccaaggucaacggccaggccggccgcaugaccuucuacuggaccaucgucaagcccggcgaguccaucaccuucgaguccaacggcgccuuccucgccccccgcuacgccuucgagaucgucuccgucggcaacggcaagcucuuccgcuccgagcucaacaucgaguccugcuccaccaagugccagaccgagaucggcggcaucaacaccaacaaguccuuccacuccguccaccgcaacaccaucggcgacugccccaaguacgucaacgucaagucccucaagcucgccaccggccuccgcaacguccccgccaucgccucccgcggccucuucggcgccaucgccggcuucaucgagggcggcuggcccggccucaucaacggcugguacggcuuccagcaccgcaacgaggagggcaccggcaucgccgccgacaaggaguccacccagaaggccaucgaccagaucaccuccaaggucaacaacaucgucgaccgcaugaacaccaacuucgaguccguccagcacgaguccuccgagaucgaggagcgcaucaaccagcucuccaagcacgucgacgacuccauggucgacaucugguccuacaacgcccagcuccucguccuccucgagaacgagaagacccucgaccuccacgacuccaacguccgcaaccuccacgagaagguccgccgcaugcucaaggacaacgccaaggacgagggcaacggcugcuucaccuucuaccacaagugcgacaacaagugcaucgagcgcguccgcaacggcaccuacgaccacaaggaguucgaggaggaguccaagaucaaccgccaggagaucgagggcgucaagcucgacuccuccggcaacgucuacaagauccucuccaucuacuccugcaucgccuccucccucguccucgccgcccucaucaugggcuucauccucugggccugcuccaacggcuccugccgcugcaccaucugcaucuga

SEQ ID NO: 106371 - RNA, 1698 nt, Artificial Sequence
  derived and/or modified CDS sequence (opt2) from hemagglutinin__InfluenzaA__AGQ81203
augaagaagacccuccucuucgccgccaucuuccucuacgucaaggccgacgagaucugcaucggcuaccucuccaacaacuccaccgacaaggucgacaccaucaucgagaacaacgucaccgucaccuccuccgucgagcucgucgagaccgagcacaccggcuccuucugcuccaucaacggcaagcagcccaucucccucggcgacugcuccuucgccggcuggauccucggcaaccccaugugcgacgaccucaucggcaagaccuccugguccuacaucgucgagaagcccaaccccgccaacggcaucugcuaccccggcacccucgagaacgaggaggagcuccgccucaaguucuccggcguccucgaguucaacaaguucgaggccuucaccuccaacggcuggggcgccgucaacuccggcgccggcgucaccgccgccugcaaguucggcuccuccaacuccuucuuccgcaacauggucuggcucauccaccaguccggcaccuaccccgucaucaagcgcaccuucaacaacaccaagggccgcgacguccucgucgucuggggcauccaccaccccgccacccucaaggagcaccaggaccucuacaagaaggacuccuccuacgucgccgucggcuccgagaccuacaaccgccgcuucauccccgagaucuccacccgccccaaggucaacggccaggccggccgcaugaccuucuacuggaccaucgucaagcccggcgaguccaucaccuucgaguccaacggcgccuuccucgccccccgcuacgccuucgagaucgucuccgucggcaacggcaagcucuuccgcuccgagcucaacaucgaguccugcuccaccaagugccagaccgagaucggcggcaucaacaccaacaaguccuuccacuccguccaccgcaacaccaucggcgacugccccaaguacgucaacgucaagucccucaagcucgccaccggccuccgcaacguccccgccaucgccucccgcggccucuucggcgccaucgccggcuucaucgagggcggcuggcccggccucaucaacggcugguacggcuuccagcaccgcaacgaggagggcaccggcaucgccgccgacaaggaguccacccagaaggccaucgaccagaucaccuccaaggucaacaacaucgucgaccgcaugaacaccaacuucgaguccguccagcacgaguucuccgagaucgaggagcgcaucaaccagcucuccaagcacgucgacgacuccgucgucgacaucugguccuacaacgcccagcuccucguccuccucgagaacgagaagacccucgaccuccacgacuccaacguccgcaaccuccacgagaagguccgccgcaugcucaaggacaacgccaaggacgagggcaacggcugcuucaccuucuaccacaagugcgacaacgagugcaucgagcgcguccgcaacggcaccuacgaccacaaggaguucgaggaggaguccaagaucaaccgccaggagaucgagggcgucaagcucgacuccuccggcaacgucuacaagauccucuccaucuacuccugcaucgccuccucccucguccucgccgcccucaucaugggcuucauccucugggccugcuccaacggcuccugccgcugcaccaucugcaucuga

SEQ ID NO: 106372 - RNA, 1698 nt, Artificial Sequence
  derived and/or modified CDS sequence (opt2) from hemagglutinin__InfluenzaA__AGQ81204
augaagaagacccuccucuucgccgccaucuuccucuacgucaaggccgacgagaucugcaucggcuaccucuccaacaacuccaccgacaaggucgacaccaucaucgagaacaacgucaccgucaccuccuccgucgagcucgucgagaccgagcacaccggcuccuucugcuccaucaacggcaagcagcccaucucccucggcgacugcuccuucgccggcuggauccucggcaaccccaugugcgacgaccucaucggcaagaccuccugguccuacaucgucgagaagcccaaccccgccaacggcaucugcuaccccggcacccucgagaacgaggaggagcuccgccucaaguucuccggcguccucgaguucaacaaguucgaggccuucaccuccaacggcuggggcgccgucaacuccggcgccggcgucaccgccgccugcaaguucggcuccuccaacuccuucuuccgcaacauggucuggcucauccaccaguccggcaccuaccccgucaucaagcgcaccuucaacaacaccaagggccgcgacguccucgucgucuggggcauccaccaccccgccacccucaaggagcaccaggaccucuacaagaaggacuccuccuacgucgccgucggcuccgagaccuacaaccgccgcuucauccccgagaucuccacccgccccaaggucaacggccaggccggccgcaugaccuucuacuggaccaucgucaagcccggcgaguccaucaccuucgaguccaacggcgccuuccucgccccccgcuacgccuucgagaucgucuccgucggcaacggcaagcucuuccgcuccgagcucaacaucgaguccugcuccaccaagugccagaccgagaucggcggcaucaacaccaacaaguccuuccacuccguccaccgcaacaccaucggcgacugccccaaguacgucaacgucaagucccucaagcucgccaccggccuccgcaacguccccgccaucgccucccgcggccucuucggcgccaucgccggcuucaucgagggcggcuggcccggccucaucaacggcugguacggcuuccagcaccgcaacgaggagggcaccggcaucgccgccgacaaggaguccacccagaaggccaucgaccagaucaccuccaaggucaacaacaucgucgaccgcaugaacaccaacuucggcuccguccagcacgaguucuccgagaucgaggagcgcaucaaccagcucuccaagcacgucgacgacuccgucgucgacaucugguccuacaacgcccagcuccucguccuccucgagaacgagaagacccucgaccuccacgacuccaacguccgcaaccuccacgagaagguccgccgcaugcucaaggacaacgccaaggacgagggcaacggcugcuucaccuucuaccacaagugcgacaacgagugcaucgagcgcguccgcaacggcaccuacgaccacaaggaguucgaggaggaguccaagaucaaccgccaggagaucgagggcgucaagcucgacuccuccggcaacgucuacaagauccucuccaucuacuccugcaucgccuccucccucguccucgccgcccucaucaugggcuucauccucugggccugcuccaacggcuccugccgcugcaccaucugcaucuga

SEQ ID NO: 106373 - RNA, 1698 nt, Artificial Sequence
  derived and/or modified CDS sequence (opt2) from hemagglutinin__InfluenzaA__AGQ81205
augaagaagacccuccucuucgccgccaucuuccucuacgucaaggccgacgagaucugcaucggcuaccucuccaacaacuccaccgacaaggucgacaccaucaucgagaacaacgucaccgucaccuccuccgucgagcucgucgagaccgagcacaccggcuccuucugcuccaucaacggcaagcagcccaucucccucggcgacugcuccuucgccggcuggauccucggcaaccccaugugcgacgaccucaucggcaagaccuccugguccuacaucgucgagaagcccaaccccgccaacggcaucugcuaccccggcacccucgagaacgaggaggagcuccgccucaaguucuccggcguccucgaguucaacaaguucgaggccuucaccuccaacggcuggggcgccgucaacuccggcgccggcgucaccgccaccugcaaguucggcuccuccaacuccuucuuccgcaacauggucuggcucauccaccaguccggcaccuaccccgucaucaagcgcaccuucaacaacaccaagggccgcgacguccucgucgucuggggcauccaccaccccgccacccucaaggagcaccaggaccucuacaagaaggacuccuccuacgucgccgucggcuccgagaccuacaaccgccgcuucauccccgagaucuccacccgccccaaggucaacggccaggccggccgcaugaccuucuacuggaccaucgucaagcccggcgaguccaucaccuucgaguccaacggcgccuuccucgccccccgcuacgccuucgagaucgucuccgucggcaacggcaagcucuuccgcuccgagcucaacaucgaguccugcuccaccaagugccagaccgagaucggcggcaucaacaccaacaaguccuuccacuccguccaccgcaacaccaucggcgacugccccaaguacgucaacgucaagucccucaagcucgccaccggccuccgcaacguccccgccaucgccucccgcggccucuucggcgccaucgccggcuucaucgagggcggcuggcccggccucaucaacggcugguacggcuuccagcaccgcaacgaggagggcaccggcaucgccgccgacaaggaguccacccagaaggccaucgaccagaucaccuccaaggucaacaacaucgucgaccgcaugaacaccaacuucgaguccguccaguacgaguucuccgagaucgaggagcgcaucaaccagcucuccaagcacgucgacgacuccgucgucgacaucugguccuacaacgcccagcuccucguccuccucgagaacgagaagacccucgaccuccacgacuccaacguccgcaaccuccacgagaagguccgccgcaugcucaaggacaacgccaaggacgagggcaacggcugcuucaccuucuaccacaagugcgacaacgagugcaucgagcgcguccgcaacggcaccuacgaccacaaggaguucgaggaggaguccaagaucaaccgccaggagaucgagggcgucaagcucgacuccuccggcaacgucuacaagauccucuccaucuacuccugcaucgccuccucccucguccucgccgcccucaucaugggcuucauccucugggccugcuccaacggcuccugccgcugcaccaucugcaucuga

SEQ ID NO: 106374 - RNA, 1698 nt, Artificial Sequence
  derived and/or modified CDS sequence (opt2) from hemagglutinin__InfluenzaA__AGQ81206
augaagaagacccuccucuucgccgccaucuuccucuacgccaaggccgacgagaucugcaucggcuaccucuccaacaacuccaccgacaaggucgacaccaucaucgagaacaacgucaccgucaccuccuccgucgagcucgucgagaccgagcacaccggcuccuucugcuccaucaacggcaagcagcccaucucccucggcgacugcuccuucgccggcuggauccucggcaaccccaugugcgacgaccucaucggcaagaccuccugguccuacaucgucgagaagcccaaccccgccaacggcaucugcuaccccggcacccucgagaacgaggaggagcuccgcuccaaguucuccggcguccucgaguucuccaaguucgaggccuucaccuccaacggcuggggcgccgucaacuccggcgccggcgucaccgccgccugcaaguucggcuccuccaacuccuucuuccgcaacauggucuggcucauccaccaguccggcaccuaccccgucaucaagcgcaccuucaacaacaccaagggccgcgacguccucgucgucuggggcauccaccaccccgccacccucaaggagcaccaggaccucuacaagaaggacuccuccuacgucgccgucggcuccgagaccuacaaccgccgcuucauccccgagaucuccacccgccccaaggucaacggccaggccggccgcaugaccuucuacuggaccaucgucaagcccgaggaguccaucaccuucgaguccaacggcgccuuccucgccccccgcuacgccuucgagaucgucuccgucggcaacggcaagcucuuccgcuccgagcucaacaucgaguccugcuccaccaagugccagaccgagaucggcggcaucaacaccaacaaguccuuccacuccguccaccgcaacaccaucggcgacugccccaaguacgucaacgucaagucccucaagcucgccaccggccuccgcaacguccccgccaucgccucccgcggccucuucggcgccaucgccggcuucaucgagggcggcuggcccggccucaucaacggcugguacggcuuccagcaccgcaacgaggagggcaccggcaucgccgccgacaaggaguccacccagaaggccaucgaccagaucaccuccaaggucaacaacaucgucgaccgcaugaacaccaacuucgaguccguccagcacgaguucuccgagaucgaggagcgcaucaaccagcucuccaagcacgucgacgacuccgucgucgacaucugguccuacaacgcccagcuccucguccuccucgagaacgagaagacccucgaccuccacgacuccaacguccgcaaccuccacgagaagguccgccgcaugcucaaggacaacgccaaggacgagggcaacggcugcuucaccuucuaccacaagugcgacaacgagugcaucgagcgcguccgcaacggcaccuacgaccacaaggaguucgaggaggaguccaagaucaaccgccaggagaucgagggcgucaagcucgacuccuccggcaacgucuacaagauccucuccaucuacuccugcaucgccuccucccucauccucgccgcccucaucaugggcuucauccucugggccugcuccaacggcuccugccgcugcaccaucugcaucuga

SEQ ID NO: 106375 - RNA, 1698 nt, Artificial Sequence
  derived and/or modified CDS sequence (opt2) from hemagglutinin__InfluenzaA__AGQ81209
augaagaagacccuccucuucgccgccaucuuccucuacgucaaggccgacgagaucugcaucggcuaccucuccaacaacuccaccgacaaggucgacaccaucaucgagaacaacgucaccgucaccuccuccgucgagcucgucgagaccgagcacaccggcuccuucugcuccaucaacggcaagcagcccaucucccucggcgacugcuccuucgccggcuggauccucggcaaccccaugugcgacgaccucaucggcaagaccuccugguccuacaucgucgagaagcccaaccccgccaacggcaucugcuaccccggcacccucgagaacgaggaggagcuccgccucaaguucuccggcauccucgaguucuccaaguucgaggccuucaccuccaacggcuggggcgccgucaacuccggcgccggcgucaccgccgccugcaaguucggcuccuccaacuccuucuuccgcaacauggucuggcucauccaccaguccggcaccuaccccgucaucaagcgcaccuucaacaacaccaagggccgcgacguccucaucgucuggggcauccaccaccccgccacccucaaggagcaccaggaccucuacaagaaggacuccuccuacgucgccgucggcuccgagaccuacaaccgccgcuucauccccgagaucuccacccgccccaaggucaacggccaggccggccgcaugaccuucuacuggaccaucgucaagcccggcgaguccaucaccuucgaguccaacggcgccuuccucgccccccgcuacgccuucgagaucgucuccgucggcaacggcaagcucuuccgcuccgagcucaacaucgaguccugcuccaccaagugccagaccgagaucggcggcaucaacaccaacaaguccuuccacuccguccaccgcaacaccaucggcgacugccccaaguacgucaacgucaagucccucaagcucgccaccggccuccgcaacguccccgccaucgccucccgcggccucuucggcgccaucgccggcuucaucgagggcggcuggcccggccucaucaacggcugguacggcuuccagcaccgcaacgaggagggcaccggcaucgccgccgacaaggaguccacccagaaggccaucgaccagaucaccuccaaggucaacaacaucgucgaccgcaugaacaccaacuucgaguccguccagcacgaguucuccgagaucgaggagcgcaucaaccagcucuccaagcacgucgacgacuccgucgucgacaucugguccuacaacgcccagcuccucguccuccucgagaacgagaagacccucgaccuccacgacuccaacguccgcaaccuccacgagaagguccgccgcaugcucaaggacaacgccaaggacgagggcaacggcugcuucaccuucuaccacaagugcgacaacgagugcaucgagcgcguccgcaacggcaccuacgaccacaaggaguucgaggaggaguccaagaucaaccgccaggagaucgagggcgucaagcucgacuccuccggcaacgucuaccgcauccucuccaucuacuccugcaucgccuccucccucguccucgccgcccucaucaugggcuucauccucugggccugcuccaacggcuccugccgcugcaccaucugcaucuga

SEQ ID NO: 106376 - RNA, 1698 nt, Artificial Sequence
  derived and/or modified CDS sequence (opt2) from hemagglutinin__InfluenzaA__AGQ81211
augaagaagacccuccucuucgccgccaucuuccucuacgucaaggccgacgagaucugcaucggcuaccucuccaacaacuccaccgacaaggucgacaccaucaucgagaacaacgucaccgucaccuccuccgucgagcucgucgagaccgagcacaccggcuccuucugcuccaucaacggcaagcagcccaucucccucggcgacugcuccuucgccggcuggauccucggcaaccccaugugcgacgaccucaucggcaagaccuccugguccuacaucgucgagaagcccaaccccgccaacggcaucugcuaccccggcacccucgagaacgaggaggagcuccgccucaaguucuccggcguccucgaguucuccaaguucgaggccuucaccuccaacggcuggggcgccgucaacuccggcgccggcgucaccgccgccugcaaguucggcuccuccaacuccuucuuccgcaacauggucuggcucauccaccaguccggcaccuaccccgucaucaagcgcaccuucaacaacaccaagggccgcgacguccucaucgucuggggcauccaccaccccgccacccucaaggagcaccaggaccucuacaagaaggacuccuccuacgucgccgucggcuccgagaccuacaaccgccgcuucauccccgagaucuccacccgccccaaggucaacggccaggccggccgcaugaccuucuacuggaccaucgucaagcccggcgaguccaucaccuucgaguccaacggcgccuuccucgccccccgcuacgccuucgagaucgucuccgucggcaacggcaagcucuuccgcuccgagcucaacaucgaguccugcuccaccaagugccagaccgagaucggcggcaucaacaccaacaaguccuuccacuccguccaccgcaacaccaucggcgacugccccaaguacgucaacgucaagucccucaagcucgccaccggccuccgcaacguccccgccaucgccucccgcggccucuucggcgccaucgccggcuucaucgagggcggcuggcccggccucaucaacggcugguacggcuuccagcaccgcaacgaggagggcaccggcaucgccgccgacaaggaguccacccagaaggccaucgaccagaucaccuccaaggucaacaacaucgucgaccgcaugaacaccaacuucgaguccguccagcacgaguucuccgagaucgaggagcgcaucaaccagcucuccaagcacgucgacgacuccgucgucgacaucugguccuacaacgcccagcuccucguccuccucgagaacgagaagacccucgaccuccacgacuucaacguccgcaaccuccacgagaagguccgccgcaugcucaaggacaacgccaaggacgagggcaacggcugcuucaccuucuaccacaagugcgacaacgagugcaucgagcgcguccgcaacggcaccuacgaccacaaggaguucgaggaggaguccaagaucaaccgccaggagaucgagggcgucaagcucgacuccuccggcaacgucuaccgcauccucuccaucuacuccugcaucgccuccucccucguccucgccgcccucaucaugggcuucauccucugggccugcuccaacggcuccugccgcugcaccaucugcaucuga

SEQ ID NO: 106377 - RNA, 1698 nt, Artificial Sequence
  derived and/or modified CDS sequence (opt2) from hemagglutinin__InfluenzaA__AGQ81213
augaagaagacccuccucuucgccgccaucuuccucuacguccgcgccgacgagaucugcaucggcuaccucuccaacaacuccaccgacaaggucgacaccaucaucgagaacaacgucaccgucaccuccuccgucgagcucgucgagaccgagcacaccggcuccuucugcuccaucaacggcaagcagcccaucucccucggcgacugcuccuucgccggcuggauccucggcaaccccaugugcgacggccucaucggcaagaccuccugguccuacaucgucgagaagcccaaccccgccaacggcaucugcuaccccggcacccucgagaacgaggaggagcuccgccucaaguucucccgcguccucgaguucuccaaguucgaggccuucaccuccaacggcuggggcgccgucaacuccggcgccggcgucaccgccgccugcaaguucggcuccuccaacuccuucuuccgcaacauggucuggcucauccaccaguccggcaccuaccccgucaucaagcgcaccuucaacaacaccaagggccgcgacguccucgucgucuggggcauccaccaccccgccacccucaaggagcaccaggaccucuacaagaaggacuccuccuacgucgccgucggcuccgagaccuacaaccgccgcuucauccccgagaucuccacccgccccaccgucaacggccaggccggccgcaugaccuucuacuggaccaucgucaagcccggcgaguccaucaccuucgaguccaacggcgccuuccucgccccccgcuacgccuucgagaucgucuccgucggcaacggcaagcucuuccgcuccgagcucaacaucgaguccugcuccaccaagugccagaccgagaucggcggcaucaacaccaacaaguccuuccacuccguccaccgcaacaccaucggcgacugccccaaguacgucaacgucaagucccucaagcucgccaccggccuccgcaacguccccgccaucgccucccgcggccucuucggcgccaucgccggcuucaucgagggcggcuggcccggccucaucaacggcugguacggcuuccagcaccgcaacgaggagggcaccggcaucgccgccgacaaggaguccacccagaaggccaucgaccagaucaccuccaaggucaacaacaucgucgaccgcaugaacaccaacuucgaguccguccagcacgaguucuccgagaucgaggagcgcaucaaccagcucuccaagcacgucgacgacuccgucgucgacaucugguccuacaacgcccagcuccucguccuccucgagaacgagaagacccucgaccuccacgacuccaacguccgcaaccuccacgagaagguccgccgcaugcucaaggacaacgccaaggacgagggcaacggcugcuucaccuucuaccacaagugcgacaacgagugcaucgagcgcguccgcaacggcaccuacgaccacaaggaguucgaggaggaguccaagaucaaccgccaggagaucgagggcgucaagcucgacuccuccggcaacgucuacaagauccucuccaucuacuccugcaucgccuccucccucguccucgccgcccucaucaugggcuucauccucugggccugcuccaacggcuccugccgcugcaccaucugcaucuga

SEQ ID NO: 106378 - RNA, 1698 nt, Artificial Sequence
  derived and/or modified CDS sequence (opt2) from hemagglutinin__InfluenzaA__AGQ81214
augaagaagacccuccucuucgccgccaucuuccucuacgucaaggccgacgagaucugcaucggcuaccucuccaacaacuccaccgacaaggucgacaccaucaucgagaacaacgucaccgucaccuccuccgucgagcucgucgagaccgagcacaccggcuccuucugcuccaucaacggcaagcagcccaucucccucggcgacugcuccuucgccggcuggauccucggcaaccccaugugcgacgaccucaucggcaagaccuccugguccuacaucgucgagaagcccaaccccgccaacggcaucugcuaccccggcacccucgagaacgaggaggagcuccgccucaaguucuccggcguccucgaguucuccaaguucgaggccuucaccuccaacggcuggggcgccgucaacuccggcgccggcgucaccgccgccugcaaguucggcuccuccaacuccuucuuccgcaacauggucuggcucauccaccaguccggcaccuaccccgucaucaagcgcaccuucaacaacaccaagggccgcgacguccucaucgucuggggcauccaccaccccgccacccucaaggagcaccaggaccucuacaagaaggacuccuccuacgucgccgucggcuccgagaccuacaaccgccgcuucauccccgagaucuccacccgccccaaggucaacggccaggccggccgcaugaccuucuacuggaccaucgucaagcccggcgaguccaucaccuucgaguccaacggcgccuuccucgccccccgcuacgccuucgagaucgucuccgucggcaacggcaagcucuuccgcuccgagcucaacaucgaguccugcuccaccaagugccagaccgagaucggcggcaucaacaccaacaaguccuuccacuccguccaccgcaacaccaucggcgacugccccaaguacgucaacgucaagucccucaagcucgccaccggccuccgcaacguccccgccaucaccucccgcggccucuucggcgccaucgccggcuucaucgagggcggcuggcccggccucaucaacggcugguacggcuuccagcaccgcaacgaggagggcaccggcaucgccgccgacaaggaguccacccagaaggccaucgaccagaucaccuccaaggucaacaacaucgucgaccgcaugaacaccaacuucgaguccguccagcacgaguucuccgagaucgagggccgcaucaaccagcucuccaagcacgucgacgacuccgucgucgacaucugguccuacaacgcccagcuccucguccuccucgagaacgagaagacccucgaccuccacgacuccaacguccgcaaccuccacgagaagguccgccgcaugcucaaggacaacgccaaggacgagggcaacggcugcuucaccuucuaccacaagugcgacaacgagugcaucgagcgcguccgcaacggcaccuacgaccacaaggaguucgaggaggaguccaagaucaaccgccaggagaucgagggcgucaagcucgacuccuccggcaacgucuacaagauccucuccaucuacuccugcaucgccuccucccucguccucgccgcccucaucaugggcuucauccucugggccugcuccaacggcuccugccgcugcaccaucugcaucuga

SEQ ID NO: 106379 - RNA, 1698 nt, Artificial Sequence
  derived and/or modified CDS sequence (opt2) from hemagglutinin__InfluenzaA__AGQ81215
augaagaagacccuccucuucgccgccaucuuccucuacgucaaggccgacgagaucugcaucggcuaccucuccaacaacuccaccgacaaggucgacaccaucaucgagaacaacgucaccgucaccuccuccgucgagcucgucgagaccgagcacaccggcuccuucugcuccaucaacggcaagcagcccaucucccucggcgacugcuccuucgccggcuggauccucggcaaccccaugugcgacggccucaucggcaagaccuccugguccuacaucgucgagaagcccaaccccgccaacggcaucugcuaccccggcacccucgagaacgaggaggagcuccgccucaaguucuccggcauccucgaguucuccaaguucgaggccuucaccuccaacggcuggggcgccgucaacuccggcgccggcgucaccgccgccugcaaguucggcuccuccaacuccuucuuccgccacauggucuggcucauccaccaguccggcaccuaccccgucaucaagcgcaccuucaacaacaccaagggccgcgacguccucgucgucuggggcauccaccaccccgccacccucaaggagcagcaggaccucuacaagaaggacuccuccuacgucgccgucggcuccgagaccuacaaccgccgcuucauccccgagaucuccacccgccccaaggucaacggccaggccggccgcaugaccuucuacuggaccaucgucaagcccggcgaguccaucaccuucgaguccaacggcgccuuccucgccccccgcuacgccuucgagaucgucuccgucggcaacggcaagcucuuccgcuccgagcucaacaucgaguccugcuccaccaagugccagaccgagaucggcggcaucaacaccaacaaguccuuccacuccguccaccgcaacaccaucggcgacugccccaaguacgucaacgucaagucccucaagcucgccaccggccuccgcaacguccccgccaucgccucccgcggccucuucggcgccaucgccggcuucaucgagggcggcuggcccggccucaucaacggcugguacggcuuccagcaccgcaacgaggagggcaccggcaucgccgccgacaaggaguccacccagaaggccaucgaccagaucaccuccaaggucaacaacaucgucgaccgcaugaacaccaacuucgaguccguccagcacgaguucuccgagaucgaggagcgcaucaaccagcucuccaagcacgucgacgacuccgucgucgacaucugguccuacaacgcccagcuccucguccuccucgagaacgagaagacccucgaccuccacgacuccaacguccgcaaccuccacgagaagguccgccgcaugcucaaggacaacgccaaggacgagggcaacggcugcuucaccuucuaccacaagugcgacaacgagugcaucgagcgcguccgcaacggcaccuacgaccacaaggaguucgaggaggaguccaagaucaaccgccaggagaucgagggcgucaagcucgacuccuccggcaacgucuacaagauccucuccaucuacuccugcaucgccuccucccucguccucgccgcccucaucaugggcuucauccucugggccugcuccaacggcuccugccgcugcaccaucugcaucuga

SEQ ID NO: 106380 - RNA, 1698 nt, Artificial Sequence
  derived and/or modified CDS sequence (opt2) from hemagglutinin__InfluenzaA__AGQ81216
augaagaagacccuccucuucgccgccaucuuccucuacgucaaggccgacgagaucugcaucggcuaccucuccaacaacuccaccgacaaggucgacaccaucaucgagaacaacgucaccgucaccuccuccgucgagcucgucgagaccgagcacaccggcuccuucugcuccaucaacggcaagcagcccaucucccucggcgacugcuccuucgccggcuggauccucggcaaccccaugugcgacgaccucaucggcaagaccuccugguccuacaucgucgagaagcccaaccccgccaacggcaucugcuaccccggcacccucgagaacgaggaggagcuccgccucaaguucuccggcguccucgaguucuccaaguucgaggccuucaccuccaacggcuggggcgccgucaacuccggcgccggcgucaccgccgccugcaaguucggcuccuccaacuccuucuuccgcaacauggucuggcucauccaccaguccggcaccuaccccgucaccaagcgcaccuucaacaacaccaagggccgcgacguccucgucgucuggggcauccaccaccccgccacccucaaggagcaccaggaccucuacaagaaggacuccuccuacgucgccgucggcuccgagaccuacaaccgccgcuucacccccgagaucuccacccgccccaaggucaacggccaggccggccgcaugaccuucuacuggaccaucgucaagcccggcgaguccaucaccuucgaguccaacggcgccuuccucgccccccgcuacgccuucgagaucgucuccgucggcaacggcaagcucuuccgcuccgagcucaacaucgaguccugcuccaccaagugccagaccgagaucggcggcaucaacaccaacaaguccuuccacuccguccaccgcaacaccaucggcgacugccccaaguacgucaacgucaagucccucaagcucgccaccggccuccgcaacguccccgccaucgccuccaagggccucuucggcgccaucgccggcuucaucgagggcggcuggcccggccucaucaacggcugguacggcuuccagcaccgcaacgaggagggcaccggcaucgccgccgacaaggaguccacccagaaggccaucgaccagaucaccuccaaggucaacaacaucgucgaccgcaugaacaccaacuucgaguccguccgccacgaguucuccgagaucgaggagcgcaucaaccagcucuccaagcacgucgacgacuccgucgucgacaucugguccuacaacgcccagcuccucguccuccucgagaacgagaagacccucgaccuccacgacuccaacguccgcaaccuccacgagcgcguccgccgcaugcucaaggacaacgccaaggacgagggcaacggcugcuucaccuucuaccacaagugcgacaacgagugcaucgagcgcguccgcaacggcaccuacgaccacaaggaguucgaggaggaguccaagaucaaccgccaggagaucgagggcgucaagcucgacuccuccggcaacgucuacaagauccucuccaucuacuccugcaucgccuccucccucguccucgccgcccucaucaugggcuucauccucugggccugcggcaacggcuccugccgcugcaccaucugcaucuga

SEQ ID NO: 106381 - RNA, 1698 nt, Artificial Sequence
  derived and/or modified CDS sequence (opt2) from hemagglutinin__InfluenzaA__AGQ81217
augaagaagacccuccucuucgccgccaucuuccucuacgccaaggccgacgagaucugcaucggcuaccucuccaacaacuccaccgacaaggucgacaccaucaucgagaacaacgucaccgucaccuccuccgucgagcucgucgagaccgagcacaccggcuccuucugcuccaucaacggcaagcagcccaucucccucggcgacugcuccuucgccggcuggauccucggcaaccccaugugcgacgaccucaucggcaagaccuccugguccuacaucgucgagaagcccaaccccgccaacggcaucugcuaccccggcacccucgagaacgaggaggagcuccgccucaaguucuccggcguccucgaguucucccgcuucgaggccuucaccuccaacggcuggggcgccgucaacuccggcgccggcgucaccgccgccugcaaguucggcuccuccaacuccuucuuccgcaacauggucuggcucauccaccaguccggcaccuaccccgucaucaagcgcaccuucaacaacaccaagggccgcgacguccucgucgucuggggcauccaccaccccgccacccucaaggagcaccaggaccucuacaagaaggacuccuccuacgucgccgucggcuccgagaccuacaaccgccgcuucauccccgagaucuccacccgccccaaggucaacggccaggccggccgcaugaccuucuacuggaccaucgucaagcccgaggaguccaucaccuucgaguccaacggcgccuuccucgccccccgcuacgccuucgagaucgucuccgucggcaacggcaagcucuuccgcuccgagcucaacaucgaguccugcuccaccaagugccagaccgagaucggcggcaucaacaccaacaaguccuuccacuccguccaccgcaacaccaucggcgacugccccaaguacgucaacgucaagucccucaagcucgccaccggccuccgcaacguccccgccaucgccucccgcggccucuucggcgccaucgccggcuucaucgagggcggcuggcccggccucaucaacggcugguacggcuuccagcaccgcaacgaggagggcaccggcaucgccgccgacaaggaguccacccagaaggccaucgaccagaucaccuccaaggucaacaacaucgucgaccgcaugaacaccaacuucgaguccguccagcacgaguucuccgagaucgaggagcgcaucaaccagcucuccaagcacgucgacgacuccgucgucgacaucugguccuacaacgcccagcuccucguccuccucgagaacgagaagacccucgaccuccacgacuccaacguccgcaaccuccacgagaagguccgccgcaugcucaaggacaacgccaaggacgagggcaacggcugcuucaccuucuaccacaagugcgacaacgagugcaucgagcgcguccgcaacggcaccuacgaccacaaggaguucgaggaggaguccaagaucaaccgccaggagaucgagggcgucaagcucgacuccuccggcaacgucuacaagauccucuccaucuacuccugcaucgccuccucccucauccucgccgcccucaucaugggcuucauccucugggccugcuccaacggcuccugccgcugcaccaucugcaucuga

SEQ ID NO: 106382 - RNA, 1704 nt, Artificial Sequence
  derived and/or modified CDS sequence (opt2) from hemagglutinin__InfluenzaA__AGQ88499
auggagaagaucguccuccucuucgccaccaucucccucgucaaguccgaccacaucugcaucggcuaccacgccaacaacuccaccgagcaggucgacaccaucauggagaagaacgucaccgucacccacgcccaggacauccucgagaagacccacaacggcaagcucugcgaccucaacggcgucaagccccucauccucaaggacugcuccgucgccggcuggcuccucggcaaccccaugugcgacgaguucaucaacguccccgagugguccuacaucgucgagaaggccaaccccgccaacgaccucugcuaccccggcaacuucaacgacuacgaggagcucaagcaccuccucucccgcaucaaccacuucgagaagauccagaucauccccaaggacuccuggaccgaccacgaggccucccucggcgucuccgccgccugccccuaccagggcaacuccuccuucuuccgcaacgucgucuggcucaucaagaaggacaacgccuaccccaccaucaagaagggcuacaacaacaccaaccaggaggaccuccucguccucuggggcauccaccaccccaacaacgaggccgagcagacccgccucuaccagaaccccaccaccuacaucuccaucggcaccuccacccucaaccagcgccucguccccaagaucgccacccgcuccaagaucaacggccaguccggccgcaucgacuucuucuggaccauccucaagcccaacgacgccauccacuucgaguccaacggcaacuucaucgcccccgaguacgccuacaagaucgucaagaagggcgacuccaccaucaugaaguccgaggucgaguacggcaacugcaacacccgcugccagacccccaucggcgccaucaacuccuccaugcccuuccacaacauccacccccucaccaucggcgagugccccaaguacgucaaguccaacaagcucguccucgccaccggccuccgcaacuccccccagcgcgagcgccgccgcaagcgcggccucuucggcgccaucgccggcuucaucgagggcggcuggcagggcauggucgacggcugguacggcuaccaccacuccaacgagcagggcuccggcuacgccgccgacaaggaguccacccagaaggccaucgacggcgucaccaacaaggucaacuccaucaucgacaagaugaacacccaguucgaggccgucggccgcgaguucaacaaccucgagcgccgcaucgagaaccucaacaagaagauggaggacggcuuccucgacgucuggaccuacaacgccgagcuccucguccucauggagaacgagcgcacccucgacuaccacgacuccaacguccgcaaccucuacgacaagguccgccuccagcucaaggacaacgccaaggagcucggcaacggcugcuucgaguucuaccacaagugcaacaacgagugcauggaguccguccgcaacggcaccuacgacuacccccaguacuccgaggaggcccgccucaagcgcgaggagaucuccggcgucaagcucgaguccaucggcaucuaccagauccucuccaucuacuccaccgucgccuccucccucguccucgccaucaugauggccggccucucccucuggaugugcuccaacggcucccuccagugccgcaucugcaucuga

SEQ ID NO: 106383 - RNA, 1683 nt, Artificial Sequence; identical to SEQ ID NO: 106273
  derived and/or modified CDS sequence (opt2) from hemagglutinin__InfluenzaA__AGR33888

SEQ ID NO: 106384 - RNA, 1683 nt, Artificial Sequence; identical to SEQ ID NO: 106273
  derived and/or modified CDS sequence (opt2) from hemagglutinin__InfluenzaA__AGR33889

SEQ ID NO: 106385 - RNA, 1683 nt, Artificial Sequence
  derived and/or modified CDS sequence (opt2) from hemagglutinin__InfluenzaA__AGR33890
augaacacccagauccucgucuucgcccucaucgccaucacccccaccaacuccgacaagaucugccucggccaccacgccgucuccaacggcaccaaggucaacacccucaccgagcgcggcgucgaggucgucaacgccaccgagaccgucgagcgcaccuccaucccccgcaucugcuccaagggcaagcgcaccgucgaccucggccagugcggccuccucggcaccaucaccggccccccccagugcgaccaguuccucgaguucuccgccgaccucaucaucgagcgccgcgagggcuccgacgucugcuaccccggcaaguucgucaacgaggaggcccuccgccagauccuccgcgaguccggcggcaucgacaaggaggccaugggcuucaccuacuccggcauccgcaccaacggcgccaccuccgccugccgccgcuccggcuccuccuucuacgccgagaugaaguggcuccucuccaacaccgacaacgccgccuucccccccaugaccaaguccuacaagaacacccgcaaggcccccgcccucaucaucuggggcauccaccacuccgucuccaccgccgagcagaccaagcucuacggcuccggcaacaagcucgucaccguccgcuccuccaacuaccagcaguccuucguccccucccccggcgccggcccccaggucaacggccaguccggccgcaucgacuuccacuggcucaugcucaaccccaacgacaccgucaccuucuccuucaacggcgccuucaucgcccccgaccgcgccuccuuccuccgcggcaaguccaugggcauccaguccggcguccaggucgacgccaacugcgagggcgacugcuaccacuccggcggcaccaucaucuccaaccuccccuuccagaacaucgacucccgcgucgucggcaagugcccccgcuacgucaagcagaagucccuccuccucgccaccggcaugaagaacguccccgagauccccaagggccgcggccucuucggcgccaucgccggcuucaucgagaacggcugggagggccucaucgacggcugguacggcuuccgccaccagaacgcccagggcgagggcaccgccgccgacuacaaguccacccaguccgccaucaaccagaugaccggcaagcucaaccgccucaucgagaagaccaaccagcaguucgagcucaucgacaacgaguucaccgaggucgagaagcagaucggcaacgucaucaacuggacccgcgacuccaucaccgaggucugguccuacaacgccgagcuccucgucgccauggagaaccagcacaccaucgaccucgccgacuccgagaugaacaagcucuacgagcgcgucaagcgccagcuccgcgagaacgccgaggaggacggcaccggcugcuucgagaucuuccacaagugcgacgacgacugcauggccuccauccgcaacaacaccuacgaccacuccaaguaccgcgaggaggccaugcagaaccgcauccagaucgaccccgucaagcucuccuccggcuacaaggacgucauccucugguucuccuucggcgccuccugcuucauccuccucgccaucgccaugggccucgucuucaucugcgucaagaacggcaacaugcgcugcaccaucugcaucuga

SEQ ID NO: 106386 - RNA, 1683 nt, Artificial Sequence
  derived and/or modified CDS sequence (opt2) from hemagglutinin__InfluenzaA__AGR33892
augaacacccagauccucgucuucgcccucaucgccaucauccccaccaacgccgacaagaucugccucggccaccacgccgucuccaacggcaccaaggucaacacccucaccgagcgcggcgucgaggucgucaacgccaccgagaccgucgagcgcaccuccaucccccgcaucugcuccaagggcaagcgcaccgucgaccucggccagugcggccuccucggcaccaucaccggccccccccagugcgaccaguuccucgaguucuccgccgaccucaucaucgagcgccgcgagggcuccgacgucugcuaccccggcaaguucgucaacgaggaggcccuccgccagauccuccgcgaguccggcggcaucaacaaggaggccaugggcuucaccuacuccggcauccgcaccaacggcgccaccuccgccugccgccgcuccggcuccuccuucuacgccgagaugaaguggcuccucuccaacaccgacaacgccgccuucccccccaugaccaaguccuacaagaacacccgcaaggcccccgcccucaucaucuggggcauccaccacuccggcuccaccgccgagcagaccaagcucuacggcuccggcaacaagauggucaccguccgcuccuccaacuaccagcaguccuucguccccucccccggcgccggcccccaggucaacggccaguccggccgcaucgacuuccacuggcucaugcucaaccccaacgacaccgucaccuucuccuucaacggcgccuucaucgcccccgaccgcgccuccuuccuccgcggcaaguccaugggcauccaguccggcguccaggucgacgccaacugcgagggcgacugcuaccacuccggcggcaccaucaucuccaaccuccccuuccagaacaucgacucccgcgucgucggcaagugcccccgcuacgucaagcagaagucccuccuccucgccaccggcaugaagaacguccccgagauccccaagggccgcggccucuucggcgccaucgccggcuucaucgagaacggcugggagggccucaucgacggcugguacggcuuccgccaccagaacgcccagggcgagggcaccgccgccgacuacaaguccacccaguccgccaucaaccagaugaccggcaagcucaaccgccucaucgagaagaccaaccagcaguucgagcucaucgacaacgaguucaccgaggucgagaagcagaucggcaacgucaucaacuggacccgcgacuccaucaccgaggucugguccuacaacgccgagcuccucgucgccauggagaaccagcacaccaucgaccucgccgacuccgagaugaacaagcucuacgagcgcgucaagcgccagcuccgcgagaacgccgaggaggacggcaccggcugcuucgagaucuuccacaagugcgacgacgacugcauggccuccauccgcaacaacaccuacgaccacuccaaguaccgcgaggaggccaugcagaaccgcauccagaucgaccccgucaagcucuccuccggcuacaaggacgucauccucugguucuccuucggcgccuccugcuucauccuccucgccaucgccaugggccucgucuucaucugcgucgagaacggcaacaugcgcugcaccaucugcaucuga

SEQ ID NO: 106387 - RNA, 1683 nt, Artificial Sequence; identical to SEQ ID NO: 106265
  derived and/or modified CDS sequence (opt2) from hemagglutinin__InfluenzaA__AGR33895

SEQ ID NO: 106388 - RNA, 1683 nt, Artificial Sequence; identical to SEQ ID NO: 106344
  derived and/or modified CDS sequence (opt2) from hemagglutinin__InfluenzaA__AGR33897

SEQ ID NO: 106389 - RNA, 1683 nt, Artificial Sequence
  derived and/or modified CDS sequence (opt2) from hemagglutinin__InfluenzaA__AGR33899
auggagaccgucucccucaucaccauccuccucgucgccaccgucuccaacgccgacaagaucugcaucggcuaccaguccaccaacuccaccgagaccgucgacacccucaccgagaacaacguccccgucacccacgccaaggagcuccuccacaccgagcacaacggcaugcucugcgccaccucccucggccagccccucauccucgacaccugcaccaucgagggccucaucuacggcaaccccuccugcgaccuccuccucgagggccgcgagugguccuacaucgucgagcgccccuccgccgucaacggccucugcuaccccggcaacgucgagaaccucgaggagcuccgcucccucuucuccuccgcccgcuccuaccagcgcauccagaucuuccccgacaccaucuggaacgucuccuacaacggcaccuccaaggccugcuccggcuccuucuaccgcuccaugcgcuggcucacccagaagaacuccaacuaccccauccaggacgcccaguacaccaacaaccagggcaagaacauccucuucauguggggcaucaaccacccccccaccgacaccacccagcgcgaccucuacacccgcaccgacaccaccaccuccgucgccaccgaggagaucaaccgcaucuucaagccccucaucggcccccgcccccucgucaacggccucaugggccgcaucgacuacuacugguccguccucaagcccggccagacccuccgcaucaaguccgacggcaaccucaucgcccccugguacggccacauccucuccggcgagucccacggccgcauccucaagaccgaccucaagaagggcuccugcaccguccagugccagaccgagaagggcggccucaacaccacccuccccuuccagaacgucuccaaguacgccuucggcaacugcuccaaguacaucggcaucaagucccucaagcucgccgucggccuccgcaacguccccucccgcuccucccgcggccucuucggcgccaucgccggcuucaucgagggcggcugguccggccucgucgccggcugguacggcuuccagcacuccaacgaccagggcgucggcauggccgccgaccgcgacuccacccagaaggccaucgacaagaucaccuccaaggucaacaacaucgucgacaagaugaacaagcaguacgagaucaucgaccacgaguucuccgaggucgagacccgccucaacaugaucaacaacaagaucgacgaccagauccaggacaucugggccuacaacgccgagcuccucguccuccucgagaaccagaagacccucgacgagcacgacgccaacgucaacaaccucuacaacaaggucaagcgcgcccucggcuccaacgccgucgaggacggcaagggcugcuucgagcucuaccacaagugcgacgaccagugcauggagaccauccgcaacggcaccuacaaccgcuccaaguaccaggaggaguccaagcucgagcgccagaagaucgagggcgucaagcucgaguccgagggcaccuacaagauccucaccaucuacuccaccgucgccuccucccucgucaucgccaugggcuucgccgccuuccucuucugggccauguccaacggcuccugccgcugcaacaucugcaucuga

SEQ ID NO: 106390 - RNA, 1683 nt, Artificial Sequence
  derived and/or modified CDS sequence (opt2) from hemagglutinin__InfluenzaA__AGR33900
auggagaccgucucccucaucaccauccuccucgucgccaccgucuccaacgccgacaagaucugcaucggcuaccaguccaccaacuccaccgagaccgucgacacccucaccgagaacaacguccccgucacccacgccaaggagcuccuccacaccgagcacaacggcaugcucugcgccaccucccucggccagccccucauccucgacaccugcaccaucgagggccucaucuacggcaaccccuccugcgaccuccuccucgagggccgcgagugguccuacaucgucgagcgccccuccgccgucaacggccucugcuaccccggcaacgucgagaaccucgaggagcuccgcucccucuucuccuccgcccgcuccuaccagcgcauccagaucuuccccgacaccaucuggaacgucuccuacaacggcaccuccaaggccugcuccggcuccuucuaccgcuccaugcgcuggcucacccagaagaacuccgacuaccccauccaggacgcccaguacaccaacaaccagggcaagaacauccucuucauguggggcaucaaccacccccccaccgacaccacccagcgcgaccucuacacccgcaccgacaccaccaccuccgucgccaccgaggagaucaaccgcaucuucaagccccucaucggcccccgcccccucgucaacggccucaugggccgcaucgacuacuacugguccguccucaagcccggccagacccuccgcaucaaguccgacggcaaccucaucgcccccugguacggccacauccucuccggcgagucccacggccgcauccucaagaccgaccucaagaagggcuccugcaccguccagugccagaccgagaagggcggccucaacaccacccuccccuuccagaacgucuccaaguacgccuucggcaacugcuccaaguacaucggcaucaagucccucaagcucgccgucggccuccgcaacguccccucccgcuccucccgcggccucuucggcgccaucgccggcuucaucgagggcggcugguccggccucgucgccggcugguacggcuuccagcacuccaacgaccagggcgucggcauggccgccgaccgcgacuccacccagaaggccaucgacaagaucaccuccaaggucaacaacaucgucgacaagaugaacaagcaguacgagaucaucgaccacgaguucuccgaggucgagacccgccucaacaugaucaacaacaagaucgacgaccagauccaggacaucugggccuacaacgccgagcuccucguccuccucgagaaccagaagacccucgacgagcacgacgccaacgucaacaaccucuacaacaaggucaagcgcgcccucggcuccaacgccgucgaggacggcaagggcugcuucgaccucuaccacaagugcgacgaccagugcauggagaccauccgcaacggcaccuacaaccgccgcaaguaccaggaggaguccaagcucgagcgccagaagaucgagggcgucaagcucgaguccgagggcaccuacaagauccucaccaucuacuccaccgucgccuccucccucgucaucgccaugggcuucgccgccuuccucuucugggccauguccaacggcuccugccgcugcaacaucugcaucuga

SEQ ID NO: 106391 - RNA, 1683 nt, Artificial Sequence
  derived and/or modified CDS sequence (opt2) from hemagglutinin__InfluenzaA__AGR33902
auggagaccgccucccucaucaccauccuccucgucgccaccgucuccaacgccgacaagaucugcaucggcuaccaguccaccaacuccaccgagaccgucgacacccucaccgagaacaacguccccgucacccacgccaaggagcuccuccacaccgagcacaacggcaugcucugcgccaccucccucggccagccccucauccucgacaccugcaccaucgagggccucaucuacggcaaccccuccugcgaccuccuccucgagggccgcgagugguccuacaucgucgagcgccccuccgccgucaacggccucugcuaccccggcaacgucgagaaccucgaggagcuccgcucccucuucuccuccgcccgcuccuaccagcgcauccagaucuuccccgacaccaccuggaacgucuccuacaacggcaucuccaaggccugcuccggcuccuucuaccgcuccaugcgcuggcucacccagaagaacuccaacuaccccauccaggacgcccaguacaccaacaaccagggcaagaacauccucuucauguggggcaucaaccacccccccaccgacaccacccagcgcgaccucuacacccgcaccgacaccaccaccuccgucgccaccgaggagaucaaccgcaucuucaagccccucaucggcccccgcccccucgucaacggccucaugggccgcaucgacuacuacugguccguccucaagcccggccagacccuccgcaucaaguccgacggcaaccucaucgcccccugguacggccacauccucuccggcgagucccacggccgcauccucaagaccgaccucaagcgcggcuccugcaccguccagugccagaccgagaagggcggccucaacaccacccuccccuuccagaacgucuccaaguacgccuucggcaacugcuccaaguacaucggcaucaagucccucaagcucgccgucggccuccgcaacguccccucccgcuccucccgcggccucuucggcgccaucgccggcuucaucgagggcggcugguccggccucgucgccggcugguacggcuuccagcacuccaacgaccagggcgucggcauggccgccgaccgcgacuccacccagaaggccaucgacaagaucaccuccaaggucaacaacaucgucgacaagaugaacaagcaguacgagaucaucgaccacgaguucuccgaggucgagacccgccucaacaugaucaacaacaagaucgacgaccagauccaggacaucugggccuacaacgccgagcuccucguccuccucgagaaccagaagacccucgacgagcacgacgccaacgucaacaaccucuacaacaaggucaagcgcgcccucggcuccaacgccgucgaggacggcaagggcugcuucgagcucuaccacaagugcgacaaccagugcauggagaccauccgcaacggcaccuacaaccgccgcaaguaccaggaggaguccaagcucgagcgccagaagaucgagggcgucaagcucgaguccgagggcaccuacaagauccucaccaucuacuccaccgucgccuccucccucgucaucgccaugggcuucgccgccuuccucuucugggccauguccaacggcuccugccgcugcaacaucugcaucuga

SEQ ID NO: 106392 - RNA, 1698 nt, Artificial Sequence; identical to SEQ ID NO: 101549
  derived and/or modified CDS sequence (opt2) from hemagglutinin__InfluenzaA__AGR49817

SEQ ID NO: 106393 - RNA, 1698 nt, Artificial Sequence
  derived and/or modified CDS sequence (opt2) from hemagglutinin__InfluenzaA__AGR49841
augaaggucaagcuccucguccuccucugcaccuucaccgccaccuacgccgacaccaucugcaucggcuaccacgccaacaacuccaccgacaccgucgacaccguccucgagaagaacgucaccgucacccacuccgucaaccuccucgagaacucccacaacggcaagcucugccuccucaagggcaucgccccccuccagcucggcaacugcuccgucgccggcuggauccucggcaaccccgagugcgagcuccucaucuccaaggaguccugguccuacaucgucgagaagcccaaccccgagaacggcaccugcuaccccggccacuucgccgacuacgaggagcuccgcgagcagcucuccuccgucuccuccuucgagcgcuucgagaucuuccccaaggaguccuccuggcccaaccacaccgucaccggcgucuccgccuccugcucccacaacggcgaguccuccuucuaccgcaaccuccucuggcucaccggcaagaacggccucuaccccaaccucuccaaguccuacgccaacaacaaggagaaggagguccucguccucuggggcguccaccacccccccaacaucgucgaccagaagacccucuaccgcaccgagaacgccuacgucuccgucgucuccucccacuacucccgcaaguucacccccgagaucgccaagcgccccaagguccgcgaccaggagggccgcaucaacuacuacuggacccuccucgagccccgcgacaccaucaucuucgaggccaacggcaaccucaucgccccccgcuacgccuucgcccucucccgcggcuucggcuccggcaucaucaacuccaacgcccccaugggcaagugcgacgccaagugccagaccccccagggcgccaucaacuccucccuccccuuccagaacguccaccccgucaccaucggcgagugccccaaguacguccgcuccgccaagcuccgcauggucaccggccuccgcaacauccccuccauccagucccgcggccucuucggcgccaucgccggcuucaucgagggcggcuggaccggcauggucgacggcugguacggcuaccaccaccagaacgagcagggcuccggcuacgccgccgaccagaaguccacccagaacgccaucaacggcaucaccaacaaggucaacuccgucaucgagaagaugaacacccaguucaccgccgucggcaaggaguucaacaagcucgagcgccgcauggagaaccucaacaagaaggucgacgacggcuucaucgacaucuggaccuacaacgccgagcuccucguccuccucgagaacgagcgcacccucgacuuccacgacuccaacgucaagaaccucuacgagaaggucaagucccagcucaagaacaacgccaaggagaucggcaacggcugcuucgaguucuaccacaagugcaacgacgagugcauggaguccgucaagaacggcaccuacgacuaccccaaguacuccgaggaguccaagcucaaccgcgagaagaucgacggcgucaagcucgaguccaucggcgucuaccagauccucgccaucuacuccaccgucgccuccucccucguccuccucgucucccucggcgccaucuccuucuggaugugcuccaacggcucccuccagugccgcaucugcaucuga

SEQ ID NO: 106394 - RNA, 1698 nt, Artificial Sequence; identical to SEQ ID NO: 101549
  derived and/or modified CDS sequence (opt2) from hemagglutinin__InfluenzaA__AGR49853

SEQ ID NO: 106395 - RNA, 1698 nt, Artificial Sequence
  derived and/or modified CDS sequence (opt2) from hemagglutinin__InfluenzaA__AGR49865
augaaggucaagcuccucguccuccucugcaccuucaccgccaccuacgccgacaccaucugcaucggcuaccacgccaacaacuccaccgacaccgucgacaccguccucgagaagaacgucaccgucacccacuccgucaaccuccucgagaacaaccacaacggcaagcucugccuccucaagggcaucgccccccuccagcucggcaacugcuccgucgccggcuggauccucggcaaccccgagugcgagcuccucaucuccaaggaguccugguccuacaucgucgagaagcccaaccccgagaacggcaccugcuaccccggccacuucgccgacuacgaggagcuccgcgagcagcucuccuccgucuccuccuucgagcgcuucgagaucuuccccaaggaguccuccuggcccaaccacaccgucaccggcgucuccgccuccugcucccacaacggcgaguccuccuucuaccgcaaccuccucuggcucaccggcaagaacggccucuaccccaaccucuccaaguccuacgccaacaacaaggagaaggagguccucguccucuggggcguccaccacccccccaacaucgucaaccagaagacccucuaccgcaccgagaacgccuacgucuccgucgucuccucccacuacucccgcaaguucacccccgagaucgccaagcgccccaagguccgcgaccaggagggccgcaucaacuacuacuggacccuccucgagcccggcgacaccaucaucuucgaggccaacggcaaccucaucgccccccgcuacgccuucgcccucaaccgcggcuucggcuccggcaucaucaacuccaacgcccccauggacaagugcgacgccaagugccagaccccccagggcgccaucaacuccucccuccccuuccagaacguccaccccgucaccaucggcgagugccccaaguacguccgcuccgccaagcuccgcauggucaccggccuccgcaacauccccuccauccagucccgcggccucuucggcgccaucgccggcuucaucgagggcggcuggaccggcauggucgacggcugguacggcuaccaccaccagaacgagcagggcuccggcuacgccgccgaccagaaguccacccagaacgccaucaacggcaucaccaacaaggucaacuccgucaucgagaagaugaacacccaguucaccgccgucggcaaggaguucaacaagcucgagcgccgcauggagaaccucaacaagaaggucgacgacggcuucaucgacgucuggaccuacaacgccgagcuccucguccuccucgagaacgagcgcacccucgacuuccacgacuccaacgucaagaaccucuacgagaaggucaagucccagcucaagaacaacgccaaggagaucggcaacggcugcuucgaguucuaccacaagugcaacgacgagugcauggaguccgucaagaacggcaccuacgacuaccccaaguacuccgaggaguccaagcucaaccgcgagaagaucgacggcgucaagcucgaguccaugggcgucuaccagauccucgccaucuacuccaccgucgccuccucccucguccuccucgucucccucggcgccaucuccuucuggaugugcuccaacggcucccuccagugccgcaucugcaucuga

SEQ ID NO: 106396 - RNA, 1701 nt, Artificial Sequence; identical to SEQ ID NO: 98692
  derived and/or modified CDS sequence (opt2) from hemagglutinin__InfluenzaA__AGR49877

SEQ ID NO: 106397 - RNA, 1701 nt, Artificial Sequence; identical to SEQ ID NO: 98470
  derived and/or modified CDS sequence (opt2) from hemagglutinin__InfluenzaA__AGR49888

SEQ ID NO: 106398 - RNA, 1701 nt, Artificial Sequence
  derived and/or modified CDS sequence (opt2) from hemagglutinin__InfluenzaA__AGR49900
augaagaccaucaucgcccucuccuacauccucugccucgucuucgcccagaagcuccccggcaacgacaacuccaccgccacccucugccucggccaccacgccguccccaacggcaccaucgucaagaccaucaccaacgaccagaucgaggucaccaacgccaccgagcucguccaguccuccuccaccggcgagaucugcgacuccccccaccagauccucgacggcgagaacugcacccucaucgacgcccuccucggcgacccccagugcgacggcuuccagaacaagaagugggaccucuucgucgagcgcuccaaggccuacuccaagugcuaccccuacgacguccccgacuacgccucccuccgcucccucgucgccuccuccggcacccucgaguucaacaacgaguccuucaacuggaccggcgucacccagaacggcaccuccuccgccugcauccgccgcuccaacaacuccuucuucucccgccucaacuggcucacccaccucaaguucaaguaccccgcccucaacgucaccaugcccaacaacgagaaguucgacaagcucuacaucuggggcguccaccaccccggcaccgacaacgaccagaucuuccucuacgcccaggccuccggccgcaucaccgucuccaccaagcgcucccagcagaccgucauccccaacaucggcucccgcccccgcguccgcaacauccccucccgcaucuccaucuacuggaccaucgucaagcccggcgacauccuccucaucaacuccaccggcaaccucaucgccccccgcggcuacuucaagauccgcuccggcaaguccuccaucaugcgcuccgacgcccccaucggcaagugcaacuccgagugcaucacccccaacggcuccauccccaacgacaagcccuuccagaacgucaaccgcaucaccuacggcgccugcccccgcuacgucaagcagaacacccucaagcucgccaccggcaugcgcaacguccccgagaagcagacccgcggcaucuucggcgccaucgccggcuucaucgagaacggcugggagggcauggucgacggcugguacggcuuccgccaccagaacuccgagggcaucggccaggccgccgaccucaaguccacccaggccgccaucgaccagaucaacggcaagcucaaccgccucaucggcaagaccaacgagaaguuccaccagaucgagaaggaguucuccgaggucgagggccgcauccaggaccucgagaaguacgucgaggacaccaagaucgaccucugguccuacaacgccgagcuccucgucgcccucgagaaccagcacaccaucgaccucaccgacuccgagaugaacaagcucuucgagaagaccaagaagcagcuccgcgagaacgccgaggacaugggcaacggcugcuucaagaucuaccacaagugcgacaacgccugcaucggcuccauccgcaacggcaccuacgaccacgacgucuaccgcgacgaggcccucaacaaccgcuuccagaucaagggcgucgagcucaaguccggcuacaaggacuggauccucuggaucuccuucgccaucuccugcuuccuccucugcgucgcccuccucggcuucaucaugugggccugccagaagggcaacauccgcugcaacaucugcaucuga

SEQ ID NO: 106399 - RNA, 1701 nt, Artificial Sequence
  derived and/or modified CDS sequence (opt2) from hemagglutinin__InfluenzaA__AGR49912
augaagaccaucaucgcccucuccuacauccucugccucgucuccgcccagaagcuccccggcaacgacaacuccaccgccacccucugccucggccaccacgccguccccaacggcaccaucgucaagaccaucaccaacgaccagaucgaggucaccaacgccaccgagcucguccaguccuccuccaccggcgagaucugcgacuccccccaccagauccucgacggcgagaacugcacccucaucgacgcccuccucggcgacccccagugcgacggcuuccagaacaagaagugggaccucuucgucgagcgcuccaaggccuacuccaacugcuaccccuacgacguccccgacuacgccucccuccgcucccucgucgccuccuccggcacccucgaguucaacaacgaguccuucaacuggaccggcgucacccagaacggcaccuccuccgccugcauccgccgcuccaacaacuccuucuucucccgccucaacuggcucacccaccucaaguucaaguaccccgcccucaacgucaccaugcccaacaacgaggaguucgacaagcucuacaucuggggcguccaccaccccggcaccgacaacgaccagaucuuccucuacgcccaggccuccggccgcaucaccgucuccaccaagcgcucccagcagaccgucauccccaacaucggcucccgcccccgcguccgcaacauccccucccgcaucuccaucuacuggaccaucgucaagcccggcgacauccuccucaucaacuccaccggcaaccucaucgccccccgcggcuacuucaagauccgcuccggcaaguccuccaucaugcgcuccgacgcccccaucggcaagugcaacuccaagugcaucacccccaacggcuccauccccaacgacaagcccuuccagaacgucaaccgcaucaccuacggcgccugcccccgcuacgucaagcagaacacccucaagcucgccaccggcaugcgcaacguccccgagaagcagacccgcggcaucuucggcgccaucgccggcuucaucgagaacggcugggagggcauggucgacggcugguacggcuuccgccaccagaacuccgagggcaucggccaggccgccgaccucaaguccacccaggccgccaucgaccagaucaacggcaagcucaaccgccucaucggcaagaccaacgagaaguuccaccagaucgagaaggaguucuccgaggucgagggccgcauccaggaccucgagaaguacgucgaggacaccaagaucgaccucugguccuacaacgccgagcuccucgucgcccucgagaaccagcacaccaucgaccucaccgacuccgagaugaacaagcucuucgagaagaccaagaagcagcuccgcgagaacgccgaggacaugggcaacggcugcuucaagaucuaccacaagugcgacaacgccugcaucggcuccauccgcaacggcaccuacgaccacgacgucuaccgcgacgaggcccucaacaaccgcuuccagaucaagggcgucgagcucaaguccggcuacaaggacuggauccucuggaucuccuucgccaucuccugcuuccuccucugcgucgcccuccucggcuucaucaugugggccugccagaagggcaacauccgcugcaacaucugcaucuga

SEQ ID NO: 106400 - RNA, 1701 nt, Artificial Sequence
  derived and/or modified CDS sequence (opt2) from hemagglutinin__InfluenzaA__AGR49924
augaagaccaucaucgcccucuccuacauccucugccucgucuccgcccagaagcuccccggcaacgacaacuccaccgccacccucugccucggccaccacgccguccccaacggcaccaucgucaagaccaucaccaacgaccagaucgaggucaccaacgccaccgagcucguccaguccuccuccaccggcgagaucugcgacuccccccaccagauccucgacggcgagaacugcacccucaucgacgcccuccucggcgacccccagugcgacggcuuccagaacaagaagugggaccucuucgucgagcgcuccaaggccuacuccaacugcuaccccuacgacguccccgacuacgccucccuccgcucccucgucgccuccuccggcacccucgaguucaacaacgaguccuucaacuggaccggcgucacccagaacggcaccuccuccgccugcauccgccgcuccaacaacuccuucuucucccgccucaacuggcucacccaccucaaguucaaguaccccgcccucaacgucaccaugcccaacaacgaggaguucgacaagcucuacaucuggggcguccaccaccccggcaccgacaacgaccagaucuuccucuacgcccaggccuccggccgcaucaccgucuccaccaagcgcucccagcagaccgucauccccaacaucggcucccgcccccgcguccgcaacauccccucccgcaucuccaucuacuggaccaucgucaagcccggcgacauccuccucaucaacuccaccggcaaccucaucgccccccgcggcuacuucaagauccgcuccggcaaguccuccaucaugcgcuccgacgcccccaucggcaagugcaacuccaagugcaucacccccaacggcuccauccccaacgacaagcccuuccagaacgucaaccgcaucaccuacggcgccugcccccgcuacgucaagcagaacacccucaagcucgccaccggcaugcgcaacguccccgagaagcagacccgcggcaucuucggcgccaucgccggcuucaucgagaacggcugggagggcauggucgacggcugguacggcuuccgccaccagaacuccgagggcaucggccaggccgccgaccucaaguccacccaggccgccgucgaccagaucaacggcaagcucaaccgccucaucggcaagaccaacgagaaguuccaccagaucgagaaggaguucuccgaggucgagggccgcauccaggaccucgagaaguacgucgaggacaccaagaucgaccucugguccuacaacgccgagcuccucgucgcccucgagaaccagcacaccaucgaccucaccgacuccgagaugaacaagcucuucgagaagaccaagaagcagcuccgcgagaacgccgaggacaugggcaacggcugcuucaagaucuaccacaagugcgacaacgccugcaucggcuccauccgcaacggcaccuacgaccacgacgucuaccgcgacgaggcccucaacaaccgcuuccagaucaagggcgucgagcucaaguccggcuacaaggacuggauccucuggaucuccuucgccaucuccugcuuccuccucugcgucgcccuccucggcuucaucaugugggccugccagaagggcaacauccgcugcaacaucugcaucuga

SEQ ID NO: 106401 - RNA, 1701 nt, Artificial Sequence
  derived and/or modified CDS sequence (opt2) from hemagglutinin__InfluenzaA__AGR49936
augaagaccaucaucgcccucuccuacauccucugccucaucuccgcccagaaguuccccggcaacgacaacuccaccgccacccucugccucggccaccacgccguccccaacggcaccaucgucaagaccaucaccaacgaccagaucgaggucaccaacgccaccgagcucguccaguccuccuccaccggcgagaucugcgacuccccccaccagauccucgacggcgagaacugcacccucaucgacgcccuccucggcgacccccagugcgacggcuuccagaacaagaagugggaccucuucgucgagcgcuccaaggccuacuccaacugcuaccccuacgacguccccggcuacgccucccuccgcucccucgucgccuccuccggcacccucgaguucaacaacgaguccuucaacuggaccggcgucacccagaacggcaccuccuccgccugcauccgccgcuccaacaacuccuucuucucccgccucaacuggcucacccaccucaaguucaaguaccccgcccucaacgucaccaugcccaacaacgaggaguucgacaagcucuacaucuggggcguccaccaccccggcaccgacaacgaccagaucuuccucuacgcccaggccuccggccgcaucaccgucuccaccaagcgcucccagcagaccgucauccccaacaucggcucccgcccccgcguccgcaacauccccucccgcaucuccaucuacuggaccaucgucaagcccggcgacauccuccucaucaacuccaccggcaaccucaucgccccccgcggcuacuucaagauccgcuccggcaaguccuccaucaugcgcuccgacgcccccaucggcaagugcaacuccgagugcaucacccccaacggcuccauccccaacgacaagcccuuccagaacgucaaccgcaucaccuacggcgccugcccccgcuacgucaagcagaacacccucaagcucgccaccggcaugcgcaacguccccgagaagcagacccgcggcaucuucggcgccaucgccggcuucaucgagaacggcugggagggcauggucgacggcugguacggcuuccgccaccagaacuccgagggcaucggccaggccgccgaccucaaguccacccaggccgccaucgaccagaucaacggcaagcucaaccgccucaucggcaagaccaacgagaaguuccaccagaucgagaaggaguucuccgaggucgagggccgcauccaggaccucgagaaguacgucgaggacaccaagaucgaccucugguccuacaacgccgagcuccucgucgcccucgagaaccagcacaccaucgaccucaccgacuccgagaugaacaagcucuucgagaagaccaagaagcagcuccgcgagaacgccgaggacaugggcaacggcugcuucaagaucuaccacaagugcgacaacgccugcaucggcuccauccgcaacggcaccuacgaccacgacgucuaccgcgacgaggcccucaacaaccgcuuccagaucaagggcgucgagcucaaguccggcuacaaggacuggauccucuggaucuccuucgccaucuccugcuuccuccucugcgucgcccuccucggcuucaucaugugggccugccagaagggcaacauccgcugcaacaucugcaucuga

SEQ ID NO: 106402 - RNA, 1701 nt, Artificial Sequence; identical to SEQ ID NO: 103730
  derived and/or modified CDS sequence (opt2) from hemagglutinin__InfluenzaA__AGR49948

SEQ ID NO: 106403 - RNA, 1701 nt, Artificial Sequence; identical to SEQ ID NO: 98563
  derived and/or modified CDS sequence (opt2) from hemagglutinin__InfluenzaA__AGR49960

SEQ ID NO: 106404 - RNA, 1701 nt, Artificial Sequence
  derived and/or modified CDS sequence (opt2) from hemagglutinin__InfluenzaA__AGR49972
augaaggccauccucgucguccuccucuacaccuucgccaccgccaacgccgacacccucugcaucggcuaccacgccaacaacuccaccgacaccgucgacaccguccucgagaagaacgucaccgucacccacuccgucaaccuccucgaggacaagcacaacggcaagcucugcaagcuccgcggcgucgccccccuccaccucggcaagugcaacaucgccggcuggauccucggcaaccccgagugcgagucccucuccaccgccuccuccugguccuacaucgucgagaccuccuccuccgacaacggcaccugcuaccccggcgacuucaucgacuacgaggagcuccgcgagcagcucuccuccgucuccuccuucgagcgcuucgagaucuuccccaagaccuccuccuggcccaaccacgacuccaacaagggcgucaccgccgccugcccccacgccggcgccaaguccuucuacaagaaccucaucuggcucgucaagaagggcaacuccuaccccaagcucuccaaguccuacaucaacgacaagggcaaggagguccucguccucuggggcauccaccaccccuccaccuccgccgaccagcagucccucuaccagaacgccgacgccuacgucuucgucggcuccucccgcuacuccaagaaguucaagcccgagaucgccauccgccccaagguccgcgaccaggagggccgcaugaacuacuacuggaccaucgucgagcccggcgacaagaucaccuucgaggccaccggcaaccucgucgucccccgcuacgccuucgccauggagcgcaacgccggcuccggcaucaucaucuccgacacccccguccacgacugcaacaccaccugccagacccccaagggcgccaucaacaccucccuccccuuccagaacauccaccccaucaccaucggcaagugccccaaguacgucaaguccaccaagcuccgccucgccaccggccuccgcaacguccccuccauccagucccgcggccucuucggcgccaucgccggcuucaucgagggcggcuggaccggcauggucgacggcugguacggcuaccaccaccagaacgagcagggcuccggcuacgccgccgaccucaaguccacccagaacgccaucgacgagaucaccaacaaggucaacuccgucaucgagaagaugaacacccaguucaccgccgucggcaaggaguucaaccaccucgagaagcgcaucgagaaccucaacaagaaggucgacgacggcuuccucgacaucuggaccuacaacgccgagcuccucguccuccucgagaacgagcgcacccucgacuaccacgacuccaacgucaagaaccucuacgagaagguccgcucccagcucaagaacaacgccaaggagaucggcaacggcugcuucgaguucuaccacaagugcgacaacaccugcauggaguccgucaagaacggcaccuacgacuaccccaaguacuccgaggaggccaagcucaaccgcgaggagaucgacggcgucaagcucgaguccacccgcaucuaccagauccucgccaucuacuccaccgucgccuccucccucguccucgucgucucccucggcgccaucuccuucuggaugugcuccaacggcucccuccagugccgcaucugcaucuga

SEQ ID NO: 106405 - RNA, 1698 nt, Artificial Sequence; identical to SEQ ID NO: 102734
  derived and/or modified CDS sequence (opt2) from hemagglutinin__InfluenzaA__AGR49983

SEQ ID NO: 106406 - RNA, 1698 nt, Artificial Sequence; identical to SEQ ID NO: 102734
  derived and/or modified CDS sequence (opt2) from hemagglutinin__InfluenzaA__AGR49995

SEQ ID NO: 106407 - RNA, 1701 nt, Artificial Sequence; identical to SEQ ID NO: 98692
  derived and/or modified CDS sequence (opt2) from hemagglutinin__InfluenzaA__AGR50007

SEQ ID NO: 106408 - RNA, 1701 nt, Artificial Sequence; identical to SEQ ID NO: 98692
  derived and/or modified CDS sequence (opt2) from hemagglutinin__InfluenzaA__AGR50018

SEQ ID NO: 106409 - RNA, 1701 nt, Artificial Sequence; identical to SEQ ID NO: 98692
  derived and/or modified CDS sequence (opt2) from hemagglutinin__InfluenzaA__AGR50029

SEQ ID NO: 106410 - RNA, 1701 nt, Artificial Sequence
  derived and/or modified CDS sequence (opt2) from hemagglutinin__InfluenzaA__AGR50040
augaagaccaucaucgcccucuccuacauccucugccucgucuucgcccagaagcuccccggcaacgacaacuccaccgccacccucugccucggccaccacgccguccccaacggcaccaucgucaagaccaucaccaacgaccagaucgaggucaccaacgccaccgagcucguccaguccuccuccaccggcgagaucugcgacuccccccaccagauccucgacggcgagaacugcacccucaucgacgcccuccucggcgacccccagugcgacggcuuccagaacaagaagugggaccucuucgucgagcgcuccaaggccuacuccaacugcuaccccuacgacguccccgacuacgccucccuccgcucccucgucgccuccuccggcacccucgaguucaacaacgaguccuucaacuggaccggcgucacccagaacggcaccuccuccgccugcauccgccgcuccaacaacuccuucuucucccgccucaacuggcucacccaccucaaguucaaguaccccgcccucaacgucaccaugcccaacaacgagcaguucgacaagcucuacaucuggggcguccaccaccccggcaccgacaacgaccagaucuuccucuacgcccaggccuccggccgcaucaccgucuccaccaagcgcucccagcagaccgucauccccaacaucggcucccgcccccgcguccgcaacauccccucccgcaucuccaucuacuggaccaucgucaagcccggcgacauccuccucaucaacuccaccggcaaccucaucgccccccgcggcuacuucaagauccgcuccggcaaguccuccaucaugcgcuccgacgcccccaucggcaagugcaacuccgagugcaucacccccaacggcuccauccccaacgacaagcccuuccagaacgucaaccgcaucaccuacggcgccugcccccgcuacgucaagcagaacacccucaagcucgccaccggcaugcgcaacguccccgagaagcagacccgcggcaucuucggcgccaucgccggcuucaucgagaacggcugggagggcauggucgacggcugguacggcuuccgccaccagaacuccgagggccgcggccaggccgccgaccucaaguccacccaggccgccaucgaccagaucaacggcaagcucaaccgccucaucggcaagaccaacgagaaguuccaccagaucgagaaggaguucuccgaggucgagggccgcauccaggaccucgagaaguacgucgaggacaccaagaucgaccucugguccuacaacgccgagcuccucgucgcccucgagaaccagcacaccaucgaccucaccgacuccgagaugaacaagcucuucgagaagaccaagaagcagcuccgcgagaacgccgaggacaugggcaacggcugcuucaagaucuaccacaagugcgacaacgccugcaugggcuccauccgcaacggcaccuacgaccacgacgucuaccgcgacgaggcccucaacaaccgcuuccagaucaagggcgucgagcucaaguccggcuacaaggacuggauccucuggaucuccuucgccaucuccugcuuccuccucugcgucgcccuccucggcuucaucaugugggccugccagaagggcaacauccgcugcaacaucugcaucuga

SEQ ID NO: 106411 - RNA, 1701 nt, Artificial Sequence; identical to SEQ ID NO: 98692
  derived and/or modified CDS sequence (opt2) from hemagglutinin__InfluenzaA__AGR50052

SEQ ID NO: 106412 - RNA, 1701 nt, Artificial Sequence; identical to SEQ ID NO: 98692
  derived and/or modified CDS sequence (opt2) from hemagglutinin__InfluenzaA__AGR50063

SEQ ID NO: 106413 - RNA, 1701 nt, Artificial Sequence
  derived and/or modified CDS sequence (opt2) from hemagglutinin__InfluenzaA__AGR50074
augaaggccauccucgucguccuccucuacaccuucgccaccgccaacgccgacacccucugcaucggcuaccacgccaacaacuccaccgacaccgucgacaccguccucgagaagaacgucaccgucacccacuccgucaaccuccucgaggacaagcacaacggcaagcucugcaagcuccgcggcgucgccccccuccaccucggcaagugcaacaucgccggcuggauccucggcaaccccgagugcgagucccucuccaccgccuccuccugguccuacaucgucgagaccuccuccuccgacaacggcaccugcuaccccggcgacuucaucgacuacgaggagcuccgcgagcagcucuccuccgucuccuccuucgagcgcuucgagaucuuccccaagaccuccuccuggcccaaccacgacuccaacaagggcgucaccgccgccugcccccacgccggcgccaaguccuucuacaagaaccucaucuggcucgucaagaagggcaacuccuaccccaagcucuccaaguccuacaucaacgacaagggcaaggagguccucguccucuggggcauccaccaccccuccaccuccgccgaccagcagucccucuaccagaacgccgacgccuacgucuucgucggcuccucccgcuacuccaagaaguucaagcccgagaucgccauccgccccaagguccgcaaccaggagggccgcaugaacuacuacuggacccucgucgagcccggcgacaagaucaccuucgaggccaccggcaaccucgucgucccccgcuacgccuucgccauggagcgcaacgccggcuccggcaucaucaucuccgacacccccguccacgacugcaacaccaccugccagacccccaagggcgccaucaacaccucccuccccuuccagaacauccaccccaucaccaucggcaagugccccaaguacgucaaguccaccaagcuccgccucgccaccggccuccgcaacguccccuccauccagucccgcggccucuucggcgccaucgccggcuucaucgagggcggcuggaccggcauggucgacggcugguacggcuaccaccaccagaacgagcagggcuccggcuacgccgccgaccucaaguccacccagaacgccaucgacgagaucaccaacaaggucaacuccgucaucgagaagaugaacacccaguucaccgccgucggcaaggaguucaaccaccucgagaagcgcaucgagaaccucaacaagaaggucgacgacggcuuccucgacaucuggaccuacaacgccgagcuccucguccuccucgagaacgagcgcacccucgacuaccacgacuccaacgucaagaaccucuacgagaagguccgcucccagcucaagaacaacgccaaggagaucggcaacggcugcuucgaguucuaccacaagugcgacaacaccugcauggaguccgucaagaacggcaccuacgacuaccccaaguacuccgaggaggccaagcucaaccgcgaggagaucgacggcgucaagcucgaguccacccgcaucuaccagauccucgccaucuacuccaccgucgccuccucccucguccucgucgucucccucggcgccaucuccuucuggaugugcuccaacggcucccuccagugccgcaucugcaucuga

SEQ ID NO: 106414 - RNA, 1701 nt, Artificial Sequence; identical to SEQ ID NO: 98692
  derived and/or modified CDS sequence (opt2) from hemagglutinin__InfluenzaA__AGR50085

SEQ ID NO: 106415 - RNA, 1701 nt, Artificial Sequence; identical to SEQ ID NO: 98692
  derived and/or modified CDS sequence (opt2) from hemagglutinin__InfluenzaA__AGR50096

SEQ ID NO: 106416 - RNA, 1701 nt, Artificial Sequence; identical to SEQ ID NO: 98692
  derived and/or modified CDS sequence (opt2) from hemagglutinin__InfluenzaA__AGR50107

SEQ ID NO: 106417 - RNA, 1701 nt, Artificial Sequence; identical to SEQ ID NO: 98885
  derived and/or modified CDS sequence (opt2) from hemagglutinin__InfluenzaA__AGR50118

SEQ ID NO: 106418 - RNA, 1701 nt, Artificial Sequence
  derived and/or modified CDS sequence (opt2) from hemagglutinin__InfluenzaA__AGR50129
augaaggccauccucgucguccuccucuacaccuucgccaccgccaacgccgacacccucugcaucggcuaccacgccaacaacuccaccgacaccgucgacaccguccucgagaagaacgucaccgucacccacuccgucaaccuccucgaggacaagcacaacggcaagcucugcaagcuccgcggcgucgccccccuccaccucggcaagugcaacaucgccggcuggauccucggcaaccccgagugcgagucccucuccaccgccuccuccugguccuacaucgucgagaccuccuccuccgacaacggcaccugcuaccccggcgacuucaucgacuacgaggagcuccgcgagcagcucuccuccgucuccuccuucgagcgcuucgagaucuuccccaagaccuccuccuggcccaaccacgacuccaacaagggcgucaccgccgccugcccccacgccggcgccaaguccuucuacaagaaccucaucuggcucgucaagaagggcaacuccuaccccaagcucuccaaguccuacaucaacgacaagggcaaggagguccucguccucuggggcauccaccaccccuccaccuccgccgaccagcagucccucuaccagaacgccgacgccuacgucuucgucggcuccucccgcuacuccaagaaguucaagcccgagaucgccauccgccccaagguccgcgaccaggagggccgcaugaacuacuacuggacccucgucgagcccggcgacaagaucaccuucgaggccaccggcaaccucgucgucccccgcuacgccuucgccauggagcgcaacgccggcuccggcaucaucaucuccgacacccccguccacgacugcaacaccaccugccagacccccaagggcgccaucaacaccucccuccccuuccagaacauccaccccaucaccaucggccagugccccaaguacgucaaguccaccaagcuccgccucgccaccggccuccgcaacguccccuccauccagucccgcggccucuucggcgccaucgccggcuucaucgagggcggcuggaccggcauggucgacggcugguacggcuaccaccaccagaacgagcagggcuccggcuacgccgccgaccucaaguccacccagaacgccaucgacgagaucaccaacaaggucaacuccgucaucgagaagaugaacacccaguucaccgccgucggcaaggaguucaaccaccucgagaagcgcaucgagaaccucaacaagaaggucgacgacggcuuccucgacaucuggaccuacaacgccgagcuccucguccuccucgagaacgagcgcacccucgacuaccacgacuccaacgucaagaaccucuacgagaagguccgcucccagcucaagaacaacgccaaggagaucggcaacggcugcuucgaguucuaccacaagugcgacaacaccugcauggaguccgucaagaacggcaccuacgacuaccccaaguacuccgaggaggccaagcucaaccgcgaggagaucgacggcgucaagcucgaguccacccgcaucuaccagauccucgccaucuacuccaccgucgccuccucccucguccucgucgucucccucggcgccaucuccuucuggaugugcuccaacggcucccuccagugccgcaucugcaucuga

SEQ ID NO: 106419 - RNA, 1701 nt, Artificial Sequence; identical to SEQ ID NO: 98692
  derived and/or modified CDS sequence (opt2) from hemagglutinin__InfluenzaA__AGR50140

SEQ ID NO: 106420 - RNA, 1701 nt, Artificial Sequence; identical to SEQ ID NO: 98887
  derived and/or modified CDS sequence (opt2) from hemagglutinin__InfluenzaA__AGR50151

SEQ ID NO: 106421 - RNA, 1698 nt, Artificial Sequence; identical to SEQ ID NO: 102734
  derived and/or modified CDS sequence (opt2) from hemagglutinin__InfluenzaA__AGR50162

SEQ ID NO: 106422 - RNA, 1701 nt, Artificial Sequence; identical to SEQ ID NO: 98692
  derived and/or modified CDS sequence (opt2) from hemagglutinin__InfluenzaA__AGR50174

SEQ ID NO: 106423 - RNA, 1701 nt, Artificial Sequence; identical to SEQ ID NO: 98731
  derived and/or modified CDS sequence (opt2) from hemagglutinin__InfluenzaA__AGR50185

SEQ ID NO: 106424 - RNA, 1701 nt, Artificial Sequence; identical to SEQ ID NO: 98692
  derived and/or modified CDS sequence (opt2) from hemagglutinin__InfluenzaA__AGR50196

SEQ ID NO: 106425 - RNA, 1701 nt, Artificial Sequence
  derived and/or modified CDS sequence (opt2) from hemagglutinin__InfluenzaA__AGR50207
augaaggccauccucgucguccuccucuacaccuucgccaccgccaacgccgacacccucugcaucggcuaccacgccaacaacuccaccgacaccgucgacaccguccucgagaagaacgucaccgucacccacuccgucaaccuccucgaggacaagcacaacggcaagcucugcaagcuccgcggcgucgccccccuccaccucggcaagugcaacaucgccggcuggauccucggcaaccccgagugcgagucccucuccaccgccuccuccugguccuacaucgucgagaccuccuccuccgacaacggcaccugcuaccccggcgacuucaucgacuacgaggagcuccgcgagcagcucuccuccgucuccuccuucgagcgcuucgagaucuuccccaagaccuccuccuggcccaaccacgacuccaacaagggcgucaccgccgccugcccccacgccggcgccaaguccuucuacaagaaccucaucuggcucgucaagaagggcaaguccuaccccaagcucuccaaguccuacaucaacgacaagggcaaggagguccucguccucuggggcauccaccaccccuccaccuccgccgaccagcagucccucuaccagaacgccgacgccuacgucuucgucggcuccucccgcuacuccaagaaguucaagcccgagaucgccauccgccccaagguccgcgaccaggagggccgcaugaacuacuacuggacccucgucgagcccggcgacaagaucaccuucgaggccaccggcaaccucgucgucccccgcuacgccuucgccauggagcgcaacgccggcuccggcaucaucaucuccgacacccccguccacgacugcaacaccaccugccagacccccaagggcgccaucaacaccucccuccccuuccagaacauccaccccaucaccaucggcaagugccccaaguacgucaaguccaccaagcuccgccucgccaccggccuccgcaacguccccuccauccagucccgcggccucuucggcgccaucgccggcuucaucgagggcggcuggaccggcauggucgacggcugguacggcuaccaccaccagaacgagcagggcuccggcuacgccgccgaccucaaguccacccagaacgccaucgacgagaucaccaacaaggucaacuccgucaucgagaagaugaacacccaguucaccgccgucggcaaggaguucaaccaccucgagaagcgcaucgagaaccucaacaagaaggucgacgacggcuuccucgacaucuggaccuacaacgccgagcuccucguccuccucgagaacgagcgcacccucgacuaccacgacuccaacgucaagaaccucuacgagaagguccgcucccagcucaagaacaacgccaaggagaucggcaacggcugcuucgaguucuaccacaagugcgacaacaccugcauggaguccgucaagaacggcaccuacgacuaccccaaguacuccgaggaggccaagcucaaccgcgaggagaucgacggcgucaagcucgaguccacccgcaucuaccagauccucgccaucuacuccaccgucgccuccucccucguccucgucgucucccucggcgccaucuccuucuggaugugcuccaacggcucccuccagugccgcaucugcaucuga

SEQ ID NO: 106426 - RNA, 1701 nt, Artificial Sequence; identical to SEQ ID NO: 98692
  derived and/or modified CDS sequence (opt2) from hemagglutinin__InfluenzaA__AGR50218

SEQ ID NO: 106427 - RNA, 1701 nt, Artificial Sequence; identical to SEQ ID NO: 98692
  derived and/or modified CDS sequence (opt2) from hemagglutinin__InfluenzaA__AGR50229

SEQ ID NO: 106428 - RNA, 1701 nt, Artificial Sequence; identical to SEQ ID NO: 98887
  derived and/or modified CDS sequence (opt2) from hemagglutinin__InfluenzaA__AGR50240

SEQ ID NO: 106429 - RNA, 1701 nt, Artificial Sequence; identical to SEQ ID NO: 98745
  derived and/or modified CDS sequence (opt2) from hemagglutinin__InfluenzaA__AGR50251

SEQ ID NO: 106430 - RNA, 1701 nt, Artificial Sequence
  derived and/or modified CDS sequence (opt2) from hemagglutinin__InfluenzaA__AGR50262
augaaggccauccucgucguccuccucuacaccuucgccaccgccaacgccgacacccucugcaucggcuaccacgccaacaacuccaccgacaccgucgacaccguccucgagaagaacgucaccgucacccacuccgucaaccuccucgaggacaagcacaacggcaagcucugcaagcuccgcggcgucgccccccuccaccucggcaagugcaacaucgccggcuggauccucggcaaccccgagugcgagucccucuccaccgccuccuccugguccuacaucgucgagaccuccuccuccgacaacggcaccugcuaccccggcgacuucaucgacuacgaggagcuccgcgagcagcucuccuccgucuccuccuucgagcgcuucgagaucuuccccaagaccuccuccuggcccaaccacgacuccaacaagggcgucaccgccgccugcccccacgccggcgccaaguccuucuacaagaaccucaucuggcucgucaagaagggcaacuccuaccccaagcucuccaaguccuacaucaacgacaagggcaaggagguccucguccucuggggcauccaccaccccuccaccuccgccgaccagcagucccucuaccagaacgccgacgccuacgucuucgucggcuccucccgcuacuccaagaaguucaagcccgagaucgccauccgccccaagguccgcgaccaggagggccgcaugaacuacuacuggacccucgucgagcccggcgacaagaucaccuucgaggccaccggcaaccucgucgucccccgcuacgccuucgccauggagcgcaacgccggcuccggcaucaucaucuccgacacccccguccacgacugcaacaccaccugccagacccccaagggcgccaucaacaccucccuccccuuccagaacauccaccccaucaccaucggcaagugccccaaguacgucaaguccaccaagcuccgccucgccaccggccuccgcaacguccccuccauccagucccgcggccucuucggcgccaucgccggcuucaucgagggcggcuggaccggcauggucgacggcugguacggcuaccaccaccagaacgagcagggcuccggcuacgccgccgaccucaaguccacccagaacgccaucgacgagaucaccaacaaggucaacuccgucaucgagaagaugaacacccaguucaccgccgucggcaaggaguucaaccaccucgagaagcgcaucgagaaccucaacaagaaggucgacgacggcuuccucgacaucuggaccuacaacgccgagcuccucguccuccucgagaacgagaagacccucgacuaccacgacuccaacgucaagaaccucuacgagaagguccgcucccagcucaagaacaacgccaaggagaucggcaacggcugcuucgaguucuaccacaagugcgacaacaccugcauggaguccgucaagaacggcaccuacgacuaccccaaguacuccgaggaggccaagcucaaccgcgaggagaucgacggcgucaagcucgaguccacccgcaucuaccagauccucgccaucuacuccaccgucgccuccucccucguccucgucgucucccucggcgccaucuccuucuggaugugcuccaacggcucccuccagugccgcaucugcaucuga

SEQ ID NO: 106431 - RNA, 1701 nt, Artificial Sequence; identical to SEQ ID NO: 98692
  derived and/or modified CDS sequence (opt2) from hemagglutinin__InfluenzaA__AGR50273

SEQ ID NO: 106432 - RNA, 1701 nt, Artificial Sequence
  derived and/or modified CDS sequence (opt2) from hemagglutinin__InfluenzaA__AGR50284
augaaggccauccucgucguccuccucuacaccuucgccaccgccaacgccgacacccucugcaucggcuaccacgccaacaacuccaccgacaccgucgacaccguccucgagaagaacgucaccgucacccacuccgucaaccuccucgaggacaagcacaacggcaagcucugcaagcuccgcggcgucgccccccuccaccucggcaagugcaacaucgccggcuggauccucggcaaccccgagugcgagucccucuccaccgccuccuccugguccuacaucgucgagaccuccuccuccgacaacggcaccugcuaccccggcgacuucaucgacuacgaggagcuccgcgagcagcucuccuccgucuccuccuucgagcgcuucgagaucuuccccaagaccuccuccuggcccaaccacgacuccaacaagggcgucaccgccgccugcccccacgccggcgccaaguccuucuacaagaaccucaucuggcucgucaagaagggcaacuccuaccccaagcucuccaaguccuacaucaacgacaagggcaaggagguccucguccucuggggcauccaccaccccuccaccuccgccgaccagcagucccucuaccagaacgccgacgccuacgucuucgucggcuccucccgcuacuccaagaaguucaagcccgagaucgccauccgccccaagguccgcgaccaggagggccgcaugaacuacuacuggacccucgucgagcccggcgacaagaucaccuucgaggccaccggcaaccucgucgucccccgcuacgccuucgccauggagcgcaacgccggcuccggcaucaucaucuccgacucccccguccacgacugcaacaccaccugccagacccccaagggcgccaucaacaccucccuccccuuccagaacauccaccccaucaccaucggcaagugccccaaguacgucaaguccaccaagcuccgccucgccaccggccuccgcaacguccccuccauccagucccgcggccucuucggcgccaucgccggcuucaucgagggcggcuggaccggcauggucgacggcugguacggcuaccaccaccagaacgagcagggcuccggcuacgccgccgaccucaaguccacccagaacgccaucgacgagaucaccaacaaggucaacuccgucaucgagaagaugaacacccaguucaccgccgucggcaaggaguucaaccaccucgagaagcgcaucgagaaccucaacaagaaggucgacgacggcuuccucgacaucuggaccuacaacgccgagcuccucguccuccucgagaacgagcgcacccucgacuaccacgacuccaacgucaagaaccucuacgagaagguccgcucccagcucaagaacaacgccaaggagaucggcaacggcugcuucgaguucuaccacaagugcgacaacaccugcauggaguccgucaagaacggcaccuacgacuaccccaaguacuccgaggaggccaagcucaaccgcgaggagaucgacggcgucaagcucgaguccacccgcaucuaccagauccucgccaucuacuccaccgucgccuccucccucguccucgucgucucccucggcgccaucuccuucuggaugugcuccaacggcucccuccagugccgcaucugcaucuga

SEQ ID NO: 106433 - RNA, 1701 nt, Artificial Sequence; identical to SEQ ID NO: 99435
  derived and/or modified CDS sequence (opt2) from hemagglutinin__InfluenzaA__AGR50295

SEQ ID NO: 106434 - RNA, 1701 nt, Artificial Sequence; identical to SEQ ID NO: 98692
  derived and/or modified CDS sequence (opt2) from hemagglutinin__InfluenzaA__AGR50306

SEQ ID NO: 106435 - RNA, 1701 nt, Artificial Sequence; identical to SEQ ID NO: 98692
  derived and/or modified CDS sequence (opt2) from hemagglutinin__InfluenzaA__AGR50317

SEQ ID NO: 106436 - RNA, 1701 nt, Artificial Sequence; identical to SEQ ID NO: 106425
  derived and/or modified CDS sequence (opt2) from hemagglutinin__InfluenzaA__AGR50328

SEQ ID NO: 106437 - RNA, 1701 nt, Artificial Sequence
  derived and/or modified CDS sequence (opt2) from hemagglutinin__InfluenzaA__AGR50339
augaaggccauccucgucguccuccucuacaccuucgccaccgccaacgccgacacccucugcaucggcuaccacgccaacaacuccaccgacaccgucgacaccguccucgagaagaacgucaccgucacccacuccgucaaccuccucgaggacaagcacaacggcaagcucugcaagcuccgcggcgucgccccccuccaccucggcaagugcaacaucgccggcuggauccucggcaaccccgagugcgagucccucuccaccgccuccuccugguccuacaucgucgagaccuccuccuccgacaacggcaccugcuaccccggcgacuucaucgacuacgaggagcuccgcgagcagcucuccuccgucuccuccuucgagcgcuucgagaucuuccccaagaccuccuccuggcccaaccacgacuccaacaagggcgucaccgccgccugcccccacgccggcgccaaguccuucuacaagaaccucaucuggcucgucaagaagggcaacuccuaccccaagcucuccaaguccuacaucaacgacaagggcaaggagguccucguccucuggggcauccaccaccccuccaccuccgccgaccagcagucccucuaccagaacgccgacgccuacgucuucgucggcuccucccgcuacuccaagaaguucaagcccgagaucgccauccgccccaagguccgcgaccaggagggccgcaugaacuacuacuggacccucgucgagcccggcgacaagaucaccuucgaggccaccggcaaccucgucgucccccgcuacgccuucgccauggagcgcaacgccggcuccggcaucaucaucuccgacacccccguccacgacugcaacaccaccugccagaccuccaagggcgccaucaacaccucccuccccuuccagaacauccaccccaucaccaucggcaagugccccaaguacgucaaguccaccaagcuccgccucgccaccggccuccgcaacguccccuccauccagucccgcggccucuucggcgccaucgccggcuucaucgagggcggcuggaccggcauggucgacggcugguacggcuaccaccaccagaacgagcagggcuccggcuacgccgccgaccucaaguccacccagaacgccaucgacgagaucaccaacaaggucaacuccgucaucgagaagaugaacacccaguucaccgccgucggcaaggaguucaaccaccucgagaagcgcaucgagaaccucaacaagaaggucgacgacggcuuccucgacaucuggaccuacaacgccgagcuccucguccuccucgagaacgagcgcacccucgacuaccacgacuccaacgucaagaaccucuacgagaagguccgcucccagcucaagaacaacgccaaggagaucggcaacggcugcuucgaguucuaccacaagugcgacaacaccugcauggaguccgucaagaacggcaccuacgacuaccccaaguacuccgaggaggccaagcucaaccgcgaggagaucgacggcgucaagcucgaguccacccgcaucuaccagauccucgccaucuacuccaccgucgccuccucccucguccucgucgucucccucggcgccaucuccuucuggaugugcuccaacggcucccuccagugccgcaucugcaucuga

SEQ ID NO: 106438 - RNA, 1701 nt, Artificial Sequence
  derived and/or modified CDS sequence (opt2) from hemagglutinin__InfluenzaA__AGR50350
augaaggccauccucgucguccuccucuacaccuucgccaccgccaacgccgacacccucugcaucggcuaccacgccaacaacuccaccgacaccgucgacaccguccucgagaagaacgucaccgucacccacuccgucaaccuccucgaggacaagcacaacggcaagcucugcaagcuccgcggcgucgccccccuccaccucggcaagugcaacaucgccggcuggaucaugggcaaccccgagugcgagucccucuccaccgccuccuccugguccuacaucgucgagaccuccuccuccgacaacggcaccugcuaccccggcgacuucaucgacuacgaggagcuccgcgagcagcucuccuccgucuccuccuucgagcgcuucgagaucuuccccaagaccuccuccuggcccaaccacgacuccaacaagggcgucaccgccgccugcccccacgccggcgccaaguccuucuacaagaaccucaucuggcucgucaagaagggcaacuccuaccccaagcucuccaaguccuacaucaacgacaagggcaaggagguccucguccucuggggcauccaccaccccuccaccuccgccgaccagcagucccucuaccagaacgccgacgccuacgucuucgucggcuccucccgcuacuccaagaaguucaagcccgagaucgccauccgccccaagguccgcgaccaggagggccgcaugaacuacuacuggacccucgucgagcccggcgacaagaucaccuucgaggccaccggcaaccucgucgucccccgcuacgccuucgccauggagcgcaacgccggcuccggcaucaucaucuccgacacccccguccacgacugcaacaccaccugccagacccccaagggcgccaucaacaccucccuccccuuccagaacauccaccccaucaccaucggcaagugccccaaguacgucaaguccaccaagcuccgccucgccaccggccuccgcaacguccccuccauccagucccgcggccucuucggcgccaucgccggcuucaucgagggcggcuggaccggcauggucgacggcugguacggcuaccaccaccagaacgagcagggcuccggcuacgccgccgaccucaaguccacccagaacgccaucgacgagaucaccaacaaggucaacuccgucaucgagaagaugaacacccaguucaccgccgucggcaaggaguucaaccaccucgagaagcgcaucgagaaccucaacaagaaggucgacgacggcuuccucgacaucuggaccuacaacgccgagcuccucguccuccucgagaacgagcgcacccucgacuaccacgacuccaacgucaagaaccucuacgagaagguccgcucccagcucaagaacaacgccaaggagaucggcaacggcugcuucgaguucuaccacaagugcgacaacaccugcauggaguccgucaagaacggcaccuacgacuaccccaaguacuccgaggaggccaagcucaaccgcgaggagaucgacggcgucaagcucgaguccacccgcaucuaccagauccucgccaucuacuccaccgucgccuccucccucguccucgucgucucccucggcgccaucuccuucuggaugugcuccaacggcucccuccagugccgcaucugcaucuga

SEQ ID NO: 106439 - RNA, 1698 nt, Artificial Sequence
  derived and/or modified CDS sequence (opt2) from hemagglutinin__InfluenzaA__AGR50361
augaagguccagcuccucguccuccucugcaccuucaccgccaccuacgccgacaccaucugcaucggcuaccacgccaacaacuccaccgacaccgucgacaccguccucgagaagaacgucaccgucacccacuccgucaaccuccucgagaacucccacaacggcaagcucugccuccucaagggcaucgccccccuccagcucggcaacugcuccgucgccggcuggauccucggcaaccccgagugcgagcuccucaucuccaaggaguccugguccuacaucgucgagaagcccaaccccgagaacggcaccugcuaccccggccacuucgccgacuacgaggagcuccgcgagcagcucuccuccgucuccuccuucgagcgcuucgagaucuuccccaaggaguccuccuggcccaaccacaccgucaccggcgucuccgccuccugcucccacaacggcgaguccuccuucuaccgcaaccuccucuggcucaccggcaagaacggccucuaccccaaccucuccaaguccuacgccaacaacaaggagaaggagguccucguccucuggggcguccaccacccccccaacaucgucgaccagaagacccucuaccgcaccgagaacgccuacgucuccgucgucuccucccacuacucccgcaaguucacccccgagaucgccaagcgccccaagguccgcgaccaggagggccgcaucaacuacuacuggacccuccucgagcccggcgacaccaucaucuucgaggccaacggcaaccucaucgccccccgcuacgccuucgcccucucccgcggcuucggcuccggcaucaucaacuccaacgcccccaugggcaagugcgacgccaagugccagaccccccagggcgccaucaacuccucccuccccuuccagaacguccaccccgucaccaucggcgagugccccaaguacguccgcuccgccaagcuccgcauggucaccggccuccgcaacauccccuccauccagucccgcggccucuucggcgccaucgccggcuucaucgagggcggcuggaccggcauggucgacggcugguacggcuaccaccaccagaacgagcagggcuccggcuacgccgccgaccagaaguccacccagaacgccaucaacggcaucaccaacaaggucaacuccgucaucgagaagaugaacacccaguucaccgccgucggcaaggaguucaacaagcucgagcgccgcauggagaaccucaacaagaaggucgacgacggcuucaucgacaucuggaccuacaacgccgagcuccucguccuccucgagaacgagcgcacccucgacuuccacgacuccaacgucaagaaccucuacgagaaggucaagucccagcucaagaacaacgccaaggagaucggcaacggcugcuucgaguucuaccacaagugcaacgacgagugcauggaguccgucaagaacggcaccuacgacuaccccaaguacuccgaggaguccaagcucaaccgcgagaagaucgacggcgucaagcucgaguccaugggcgucuaccagauccucgccaucuacuccaccgucgccuccucccucguccuccucgucucccucggcgccaucuccuucuggaugugcuccaacggcucccuccagugccgcaucugcaucuga

SEQ ID NO: 106440 - RNA, 1701 nt, Artificial Sequence
  derived and/or modified CDS sequence (opt2) from hemagglutinin__InfluenzaA__AGT18718
augaaggucauccucgucguccuccucuacaccuucgccaccgccaacgccgacacccucugcaucggcuaccacgccaacaacuccaccgacaccgucgacaccguccucgagaagaacgucaccgucacccacuccgucaaccuccucgaggacaagcacaacggcaagcucugcaagcuccgcggcgucgccccccuccaccucggcaagugcaacaucgccggcuggauccucggcaaccccgagugcgagucccucuccaccgccuccuccugguccuacaucgucgagaccuccuccuccgacaacggcaccugcuaccccggcgacuucaucaacuacgaggagcuccgcgagcagcucuccuccgucuccuccuucgagcgcuucgagaucuuccccaagaccuccuccuggcccaaccacgacuccaacaagggcgucaccgccgccugcccccacgccggcgccaaguccuucuacaagaaccucaucuggcucgucaagaagggcaacuccuaccccaagcucuccaaguccuacaucaacgacaagggcaaggagguccucguccucuggggcauccaccaccccuccaccaccgccgaccagcagucccucuaccagaacgccgacgccuacgucuucgucggcaccucccgcuacuccaagaaguucaagcccgagaucgccauccgccccaagguccgcgaccaggagggccgcaugaacuacuacuggacccucaucgagcccggcgacaagaucaccuucgaggccaccggcaaccucgucgucccccgcuacgccuucgccauggagcgcaacgccggcuccggcaucaucaucuccgacacccccguccacgacugcaacaccaccugccagacccccgagggcgccaucaacaccucccuccccuuccagaacauccaccccaucaccaucggcaagugccccaaguacgucaaguccaccaagcuccgccucgccaccggccuccgcaacguccccuccauccagucccgcggccucuucggcgccaucgccggcuucaucgagggcggcuggaccggcauggucgacggcugguacggcuaccaccaccagaacgagcagggcuccggcuacgccgccgaccucaaguccacccagaacgccaucgacaagaucaccaacaaggucaacuccgucaucgagaagaugaacacccaguucaccgccgucggcaaggaguucaaccaccucgagaagcgcaucgagaaccucaacaagaaggucgacgacggcuuccucgacaucuggaccuacaacgccgagcuccucguccuccucgagaacgagcgcacccucgacuaccacgacuccaacgucaagaaccucuacgagaagguccgcaaccagcucaagaacaacgccaaggagaucggcaacggcugcuucgaguucuaccacaagugcgacaacaccugcauggaguccgucaagaacggcaccuacgacuaccccaaguacuccgaggaggccaagcucaaccgcgagaagaucgacggcgucaagcucgaguccacccgcaucuaccagauccucgccaucuacuccaccgucgccuccucccucguccucgucgucucccucggcgccaucuccuucuggaugugcuccaacggcucccuccagugccgcaucugcaucuga

SEQ ID NO: 106441 - RNA, 1701 nt, Artificial Sequence
  derived and/or modified CDS sequence (opt2) from hemagglutinin__InfluenzaA__AGT18720
augaaggucauccucgucguccuccucuacaccuucgccaccgccaacgccgacacccucugcaucggcuaccacgccaacaacuccaccgacaccgucgacaccguccucgagaagaacgucaccgucacccacuccgucaaccuccucgaggacaagcacaacggcaagcucugcaagcuccgcggcgucgccccccuccaccucggcaagugcaacaucgccggcuggauccucggcaaccccgagugcgagucccucuccaccgccuccuccugguccuacaucgucgagaccuccuccuccgacaacggcaccugcuaccccggcgacuucaucaacuacgaggagcuccgcgagcagcucuccuccgucuccuccuucgagcgcuucgagaucuuccccaaggccuccuccuggcccaaccacgacuccaacaagggcgucaccgccgccugcccccacgccggcgccaaguccuucuacaagaaccucaucuggcucgucaagaagggcaacuccuaccccaagcucuccaaguccuacaucaacgacaagggcaaggagguccucguccucuggggcauccaccaccccaacaccaccgccgaccagcagucccucuaccagaacgccgacgccuacgucuucgucggcaccucccgcuacuccaagaaguucaagcccgagaucgccauccgccccaagguccgcgaccaggagcgccgcaugaacuacuacuggacccucaucgagcccggcgacaagaucaccuucgaggccaccggcaaccucgucgucccccgcuacgccuucgccauggagcgcaacgccggcuccggcaucaucaucuccgacacccccguccacgacugcaacaccaccugccagacccccgagggcgccaucaacaccucccuccccuuccagaacauccaccccaucaccaucggcaagugccccaaguacgucaaguccaccaagcuccgccucgccaccggccuccgcaacguccccuccauccagucccgcggccucuucggcgccaucgccggcuucaucgagggcggcuggaccggcauggucgacggcugguacggcuaccaccaccagaacgagcagggcuccggcuacgccgccgaccucaaguccacccagaacgccaucgacaagaucaccaacaaggucaacuccgucaucgagaagaugaacacccaguucaccgccgucggcaaggaguucaaccaccucgagaagcgcaucgagaaccucaacaagaaggucgacgacggcuuccucgacaucuggaccuacaacgccgagcuccucguccuccucgagaacgagcgcacccucgacuaccacgacuccaacgucaagaaccucuacgagaagguccgcaaccagcucaagaacaacgccaaggagaucggcaacggcugcuucgaguucuaccacaagugcgacaacaccugcauggaguccgucaagaacggcaccuacgacuaccccaaguacuccgaggaggccaagcucaaccgcgagaagaucgacggcgucaagcucgaguccacccgcaucuaccagauccucgccaucuacuccaccgucgccuccucccucguccucgucgucucccucggcgccaucuccuucuggaugugcuccaacggcucccuccagugccgcaucugcaucuga

SEQ ID NO: 106442 - RNA, 1701 nt, Artificial Sequence
  derived and/or modified CDS sequence (opt2) from hemagglutinin__InfluenzaA__AGT18721
augaaggccauccucgucguccuccucuacaccuucgccaccgccaacgccgacacccucugcaucggcuaccacgccaacaacuccaccgacaccgucgacaccguccucgagaagaacgucaccgucacccacuccgucaaccuccucgaggacaagcacaacggcaagcucugcaagcuccgcggcgucgccccccuccaccucggcaagugcaacaucgccggcuggauccucggcaaccccgagugcgagucccucuccaccgccuccuccugguccuacaucgucgagaccuccuccuccgacaacggcaccugcuaccccggcgacuucaucaacuacgaggagcuccgcgagcagcucuccuccgucuccuccauccagcgcuccgagaucugcaccaagaccuccuccuggcccaaccacgacuccaacaagggcgucaccgccgccugcccccacgccggcgccaaguccuucuacaagaaccucaucuggcucgucaagaagggcaacuccuaccccaagcucuccaaguccuacaucaacgacaagggcaaggagguccucguccucuggggcauccaccaccagaacucccgcggccaccagcagucccucuaccagaacgccgacgccuacgucuucgucggcaccucccgcuacuccaagaaguucaagcccgagaucgccauccgccccaaggucaaggagcaggacggccgcauggacuacuacuggacccucaucgagcccggcgacaagaucaccuucgaggccaccggcaaccucgucgucccccgcuacgccuucgccauggagcgcaacgccggcuccggcaucaucaucuccgacacccccguccacgacugcaacaccaccugccagacccccgagggcgccaucaacaccucccuccccuuccagaacauccaccccaucaccaucggcaagugccccaaguacgucaaguccaccaagcuccgccucgccaccggccuccgcaacguccccuccauccagucccgcggccucuucggcgccaucgccggcuucaucgagggcggcuggaccggcauggucgacggcugguacggcuaccaccaccagaacgagcagggcuccggcuacgccgccgaccucaaguccacccagaacgccaucgacaagaucaccaacaaggucaacuccgucaucgagaagaugaacacccaguucaccgccgucggcaaggaguucaaccaccucgagaagcgcaucgagaaccucaacaagaaggucgacgacggcuuccucgacaucuggaccuacaacgccgagcuccucguccuccucgagaacgagcgcacccucgacuaccacgacuccaacgucaagaaccucuacgagaagguccgcaaccagcucaagaacaacgccaaggagaucggcaacggcugcuucgaguucuaccacaagugcgacaacaccugcauggaguccgucaagaacggcaccuacgacuaccccaaguacuccgaggaggccaagcucaaccgcgagaagaucgacggcgucaagcucgaguccacccgcaucuaccagauccucgccaucuacuccaccgucgccuccucccucguccucgucgucucccucggcgccaucuccuucuggaugugcuccaacggcucccuccagugccgcaucugcaucuga

SEQ ID NO: 106443 - RNA, 1701 nt, Artificial Sequence
  derived and/or modified CDS sequence (opt2) from hemagglutinin__InfluenzaA__AGT18722
augaaggccauccucgucguccuccucuacaccuucgccaccgccaacgccgacacccucugcaucggcuaccacgccaacaacuccaccgacaccgucgacaccguccucgagaagaacgucaccgucacccacuccgucaaccuccucgaggacaagcacaacggcaagcucugcaagcuccgcggcgucgccccccuccaccucggcaagugcaacaucgccggcuggauccucggcaaccccgagugcgagucccucuccaccgccuccuccugguccuacaucgucgagaccuccaaguccaacaaccgcaccugcuaccccggcgacuucaucaacuacgaggagcuccgcgagcagcucuccuccgucuccuccuucgagcgcuucgagaucuuccccaagaccuccuccuggcccaaccacgacuccaacaagggcgucaccgccgccugcccccacgccggcgccaaguccuucuacaagaaccucaucuggcucgucaagaagggcaacuccuaccccaagcucuccaaguccuacaucaacgacaagggcaaggagguccucguccucuggggcauccaccaccccuccaccaccgccgaccagcagucccucuaccagaacgccgacgccuacgucuucgucggcaccucccgcuacuccaagaaguucaagcccgagaucgccauccgccccaagguccgcgaccaggagggccgcaugaacuacuacuggacccucaucgagcccggcgacaagaucaccuucgaggccaccggcaaccucgucgucccccgcuacgccuucgccauggagcgcaacgccggcuccggcaucaucaucuccgacacccccguccacgacugcaacaccaccugccagacccccgagggcgccaucaacaccucccuccccuuccagaacauccaccccaucaccaucggcaagugccccaaguacgucaaguccaccaagcuccgccucgccaccggccuccgcaacguccccuccauccagucccgcggccucuucggcgccaucgccggcuucaucgagggcggcuggaccggcauggucgacggcugguacggcuaccaccaccagaacgagcagggcuccggcuacgccgccgaccucaaguccacccagaacgccaucgacaagaucaccaacaaggucaacuccgucaucgagaagaugaacacccaguucaccgccgucggcaaggaguucaaccaccucgagaagcgcaucgagaaccucaacaagaaggucgacgacggcuuccucgacaucuggaccuacaacgccgagcuccucguccuccucgagaacgagcgcacccucgacuaccacgacuccaacgucaagaaccucuacgagaagguccgcaaccagcucaagaacaacgccaaggagaucggcaacggcugcuucgaguucuaccacaagugcgacaacaccugcauggaguccgucaagaacggcaccuacgacuaccccaaguacuccgaggaggccaagcucaaccgcgagaagaucgacggcgucaagcucgaguccacccgcaucuaccagauccucgccaucuacuccaccgucgccuccucccucguccucgucgucucccucggcgccaucuccuucuggaugugcuccaacggcucccuccagugccgcaucugcaucuga

SEQ ID NO: 106444 - RNA, 1701 nt, Artificial Sequence
  derived and/or modified CDS sequence (opt2) from hemagglutinin__InfluenzaA__AGT18723
augaaggccauccucgucguccuccucuacaccuucgccaccgccaacgccgacacccucugcaucggcuaccacgccaacaacuccaccgacaccgucgacaccguccucgagaagaacgucaccgucacccacuccgucaaccuccucgaggacaagcacaacggcaagcucugcaagcuccgcggcgucgccccccuccaccucggcaagugcaacaucgccggcuggauccucggcaaccccgagugcgagucccucuccaccgccuccuccugguccuacaucgucgagaccuccaagaccaacaaccgcaccugcuaccccggcgacuucaucaacuacgaggagcuccgcgagcagcucuccuccgucuccuccuucgagcgcuucgagaucuuccccaagaccuccuccuggcccaaccacgacuccaacaagggcgucaccgccgccugcccccacgccggcgccaaguccuucuacaagaaccucaucuggcucgucaagaagggcaacuccuaccccaagcucuccaaguccuacaucaacgacaagggcaaggagguccucguccucuggggcauccaccaccagaacaagaaggccgagcagcagacccccuaccagaacgccgacgccuacgucuucgucggcaccucccgcuacuccaagaaguucaagcccgagaucgccauccgccccaagguccgcgaccaggagggccgcauggacuacuacuggacccucaucgagcccggcgacaagaucaccuucgaggccaccggcaaccucgucgucccccgcuacgccuucgccauggagcgcaacgccggcuccggcaucaucaucuccgacacccccguccacgacugcaacaccaccugccagacccccgagggcgccaucaacaccucccuccccuuccagaacauccaccccaucaccaucggcaagugccccaaguacgucaaguccaccaagcuccgccucgccaccggccuccgcaacguccccuccauccagucccgcggccucuucggcgccaucgccggcuucaucgagggcggcuggaccggcauggucgacggcugguacggcuaccaccaccagaacgagcagggcuccggcuacgccgccgaccucaaguccacccagaacgccaucgacaagaucaccaacaaggucaacuccgucaucgagaagaugaacacccaguucaccgccgucggcaaggaguucaaccaccucgagaagcgcaucgagaaccucaacaagaaggucgacgacggcuuccucgacaucuggaccuacaacgccgagcuccucguccuccucgagaacgagcgcacccucgacuaccacgacuccaacgucaagaaccucuacgagaagguccgcaaccagcucaagaacaacgccaaggagaucggcaacggcugcuucgaguucuaccacaagugcgacaacaccugcauggaguccgucaagaacggcaccuacgacuaccccaaguacuccgaggaggccaagcucaaccgcgagaagaucgacggcgucaagcucgaguccacccgcaucuaccagauccucgccaucuacuccaccgucgccuccucccucguccucgucgucucccucggcgccaucuccuucuggaugugcuccaacggcucccuccagugccgcaucugcaucuga

SEQ ID NO: 106445 - RNA, 1701 nt, Artificial Sequence
  derived and/or modified CDS sequence (opt2) from hemagglutinin__InfluenzaA__AGT18724
augaaggccauccucgucguccuccucuacaccuucgccaccgccaacgccgacacccucugcaucggcuaccacgccaacaacuccaccgacaccgucgacaccguccucgagaagaacgucaccgucacccacuccgucaaccuccucgaggacaagcacaacggcaagcucugcaagcuccgcggcgucgucccccuccaccucggcaagugcaacaucgccggcuggauccucggcaaccccgagugcgagucccucuccaccgccuccuccugguccuacaucgucgagaccuccaagaccaacaaccgcaccugcuaccccggcgacuucaucaacuacgaggagcuccgcgagcagcucuccuccgucuccuccuucgagcgcuucgagaucuuccccaagaccuccuccuggcccaaccacgacuccaacaagggcgucaccgccgccugcccccacgccggcgccaaguccuucuacaagaaccucaucuggcucgucaagaagggcaacuccuaccccaagcucuccaaguccuacaucaacgacaagggcaaggagguccucguccucuggggcauccaccaccccuccaccaccgccgaccagcagacccucuaccagaacgccgacgccuacgucuucgucggcaccucccgcuacuccaagaaguucaagcccgagaucgccauccgccccaagguccgcgaccaggagggccgcaugaacuacuaccgcacccucaucgagcccgagaacaagaucaccuucgaggccaccggcaaccucgucgucccccgcuacgccuucgccauggagcgcaacgccggcuccggcaucaucaucuccgacacccccguccacgacugcaacaccaccugccagacccccgagggcgccaucaacaccucccuccccuuccagaacauccaccccaucaccaucggcaagugccccaaguacgucaaguccaccaagcuccgccucgccaccggccuccgcaacguccccuccauccagucccgcggccucuucggcgccaucgccggcuucaucgagggcggcuggaccggcauggucgacggcugguacggcuaccaccaccagaacgagcagggcuccggcuacgccgccgaccucaaguccacccagaacgccaucgacaagaucaccaacaaggucaacuccgucaucgagaagaugaacacccaguucaccgccgucggcaaggaguucaaccaccucgagaagcgcaucgagaaccucaacaagaaggucgacgacggcuuccucgacaucuggaccuacaacgccgagcuccucguccuccucgagaacgagcgcacccucgacuaccacgacuccaacgucaagaaccucuacgagaagguccgcaaccagcucaagaacaacgccaaggagaucggcaacggcugcuucgaguucuaccacaagugcgacaacaccugcauggaguccgucaagaacggcaccuacgacuaccccaaguacuccgaggaggccaagcucaaccgcgagaagaucgacggcgucaagcucgaguccacccgcaucuaccagauccucgccaucuacuccaccgucgccuccucccucguccucgucgucucccucggcgccaucuccuucuggaugugcuccaacggcucccuccagugccgcaucugcaucuga

SEQ ID NO: 106446 - RNA, 1701 nt, Artificial Sequence
  derived and/or modified CDS sequence (opt2) from hemagglutinin__InfluenzaA__AGT18725
augaaggucauccucgucguccuccucuacaccuucgccaccgccaacgccgacacccucugcaucggcuaccacgccaacaacuccaccgacaccgucgacaccguccucgagaagaacgucaccgucacccacuccgucaaccuccucgaggacaagcacaacggcaagcucugcaagcuccgcggcgucgccccccuccaccucggcaagugcaacaucgccggcuggauccucggcaaccccgagugcgagucccucuccaccgccuccuccugguccuacaucgucgagaccuccuccuccgacaacggcaccugcuaccccggcgacuucaucaacuacgaggagcuccgcgagcagcucuccuccgucuccuccuucgagcgcuucgagaucuuccccaagaccuccuccuggcccaaccacgacuccaacaagggcgucaccgccgccugcccccacgccggcgccaaguccuucuacaagaaccucaucuggcucgucaagaagggcaacuccuaccccaagcucuccaaguccuacaucaacgacaagggcaaggagguccucguccucuggggcauccaccaccccuccaccuccgccgaccagcagucccucuaccagaacgccgacgccuacgucuucgucggcaccucccgcuacuccaagaaguucaagcccgagaucgccauccgccccaagguccgcgaccaggagggccgcaugaacuacuacuggacccucgucgagcccggcgacaagaucaccuucgaggccaccggcaaccucgucgucccccgcuacgccuucgccauggagcgcaacgccggcuccggcaucaucaucuccgacacccccguccacgacugcaacaccaccugccagacccccgagggcgccaucaacaccucccuccccuuccagaacauccaccccaucaccaucggcaagugccccaaguacgucaaguccaccaagcuccgccucgccaccggccuccgcaacguccccuccauccagucccgcggccucuucggcgccaucgccggcuucaucgagggcggcuggaccggcauggucgacggcugguacggcuaccaccaccagaacgagcagggcuccggcuacgccgccgaccucaaguccacccagaacgccaucgacaagaucaccaacaaggucaacuccgucaucgagaagaugaacacccaguucaccgccgucggcaaggaguucaaccaccucgagaagcgcaucgagaaccucaacaagaaggucgacgacggcuuccucgacaucuggaccuacaacgccgagcuccucguccuccucgagaacgagcgcacccucgacuaccacgacuccaacgucaagaaccucuacgagaagguccgcacccagcucaagaacaacgccaaggagaucggcaacggcugcuucgaguucuaccacaagugcgacaacaccugcauggaguccgucaagaacggcaccuacgacuaccccaaguacuccgaggaggccaagcucaaccgcgagaagaucgacggcgucaagcucgaguccacccgcaucuaccagauccucgccaucuacuccaccgucgccuccucccucguccucgucgucucccucggcgccaucuccuucuggaugugcuccaacggcucccuccagugccgcaucugcaucuga

SEQ ID NO: 106447 - RNA, 1701 nt, Artificial Sequence
  derived and/or modified CDS sequence (opt2) from hemagglutinin__InfluenzaA__AGT18734
augaaggccauccucgucguccuccucuacaccuucgccaccgccaacgccgacacccucugcaucggcuaccacgccaacaacuccaccgacaccgucgacaccguccucgagaagaacgucaccgucacccacuccgucaaccuccucgaggacaagcacaacggcaagcucugcaagcuccgcggcgucgccccccuccaccucggcaagugcaacaucgccggcuggauccucggcaaccccgagugcgagucccucuccaccgccuccuccugguccuacaucgucgagaccuccuccuccgacaacggcaccugcuaccccggcgacuucaucaacuacgaggagcuccgcgagcagcucuccuccgucuccuccuucgagcgcuucgagaucuuccccaagaccuccuccuggcccaaccacgacuccaacaagggcgucaccgccgccugcccccacgccggcgccaaguccuucuacaagaaccucaucuggcucgucaagaagggcaacuccuaccccaagcucuccaaguccuacaucaacgacaagggcaaggagguccucguccucuggggcauccaccaccccuccaccaccgccgaccagcagucccucuaccagaacgccgacgccuacgucuucgucggcaccucccgcuacuccaagaaguucaagcccgagaucgccauccgccccaagguccgcgaccaggagggccgcaucaacuacuacuggacccucaucgagcccggcgacaagaucaccuucgaggccaccggcaaccucgucgucccccgcuacgccuucgccauggagcgcaacgccggcuccggcaucaucaucuccgacacccccguccacgacugcaacaccaccugccagacccccgagggcgccaucaacaccucccuccccuuccagaacauccaccccaucaccaucggcaagugccccaaguacgucaaguccaccaagcuccgccucgccaccggccuccgcaacguccccuccauccagucccgcggccucuucggcgccaucgccggcuucaucgagggcggcuggaccggcauggucgacggcugguacggcuaccaccaccagaacgagcagggcuccggcuacgccgccgaccucaaguccacccagaacgccaucgacaagaucaccaacaaggucaacuccgucaucgagaagaugaacacccaguucaccgccgucggcaaggaguucaaccaccucgagaagcgcaucgagaaccucaacaagaaggucgacgacggcuuccucgacaucuggaccuacaacgccgagcuccucguccuccucgagaacgagcgcacccucgacuaccacgacuccaacgucaagaaccucuacgagaagguccgcaaccagcucaagaacaacgccaaggagaucggcaacggcugcuucgaguucuaccacaagugcgacaacaccugcauggaguccgucaagaacggcaccuacgacuaccccaaguacuccgaggaggccaagcucaaccgcgagaagaucgacggcgucaagcucgaguccacccgcaucuaccagauccucgccaucuacuccaccgucgccuccucccucguccucgucgucucccucggcgccaucuccuucuggaugugcuccaacggcucccuccagugccgcaucugcaucuga

SEQ ID NO: 106448 - RNA, 1701 nt, Artificial Sequence; identical to SEQ ID NO: 106159
  derived and/or modified CDS sequence (opt2) from hemagglutinin__InfluenzaA__AGT18735

SEQ ID NO: 106449 - RNA, 1701 nt, Artificial Sequence
  derived and/or modified CDS sequence (opt2) from hemagglutinin__InfluenzaA__AGT18748
augaagaccaucaucgcccucuccuacauccucugccucgucuucgcccagaagcuccccggcaacgacaacuccaccgccacccucugccucggccaccacgccguccccaacggcaccaucgucaagaccaucaccaacgaccgcaucgaggucaccaacgccaccgagcucguccagaacuccuccaucggcgagaucugcgacuccccccaccagauccucgacgaggagaacugcacccucaucgacgcccuccucggcgacccccagugcgacgacuuccagaacaagaagugggaccucuucgucgagcgcuccaaggccuacuccaacugcuaccccuacgacguccccgacuacgccucccuccgcucccucgucgccuccuccggcacccucgaguucaacaacgaguccuucaacugggccggcgucacccagaacggcaccuccuccgccugccgccgcggcuccaacuccuccuucuucucccgccucaacuggcucacccaccucaacuucaaguaccccgcccucaacgucaccaugcccaacaacgagcaguucgacaagcucuacaucuggggcguccaccaccccuccaccgacaaggaccagaucuuccucuacgcccaguccuccggccgcaucaccgucuccaccaagcgcucccagcaggccgucauccccaacaucggcucccgcccccgcauccgcaacauccccucccgcaucuccaucuacuggaccaucgucaagcccggcgacauccuccucaucaacuccaccggcaaccucaucgccccccgcggcuacuucaagauccgcuccggcaaguccuccaucaugcgcuccgacgcccccaucggcaagugcaaguccgagugcaucacccccaacggcuccauccccaacgacaagcccuuccagaacgucaaccgcaucaccuacggcgccugcccccgcuacgucaagcaguccacccucaagcucgccaccggcaugcgcaacguccccgagaagcagacccgcggcaucuucggcgccaucgccggcuucaucgagaacggcugggagggcauggucgacggcugguacggcuuccgccaccagaacuccgagggccgcggccaggccgccgaccucaaguccacccaggccgccaucgaccagaucaacggcaagcucaaccgccucaucggcaagaccaacgagaaguuccaccagaucgagaaggaguucuccgaggucgagggccgcauccaggaccucgagaaguacgucgaggacaccaagaucgaccucugguccuacaacgccgagcuccucgucgcccucgagaaccagcacaccaucgaccucaccgacuccgagaugaacaagcucuucgagaagaccaagaagcagcuccgcgagaacgccgaggacaugggcaacggcugcuucaagaucuaccacaagugcgacaacgccugcaucggcuccauccgcaacggcaccuacgaccacgacgucuaccgcgacgaggcccucaacaaccgcuuccagaucaagggcgucgagcucaaguccggcuacaaggacuggauccucuggaucuccuucgccaucuccugcuuccuccucugcgucgcccuccucggcuucaucaugugggccugccagaagggcaacauccgcugcaacaucugcaucuga

SEQ ID NO: 106450 - RNA, 1701 nt, Artificial Sequence
  derived and/or modified CDS sequence (opt2) from hemagglutinin__InfluenzaA__AGT18749
augaagaccaucaucgcccucuccuacauccucugccucgucuucgcccagaagcuccccgagaacgacaacuccaccgccacccucugccucggccaccacgccguccccaacggcaccaucgucaagaccaucaccgacgaccagaucgaggucaccaacgccaccgagcucguccagaacuccuccaccggcgagaucugcgacuccccccaccagauccucgacggcgagaacugcacccucaucgacgcccuccucggcgacccccagugcgacggcuuccagaacaagaagugggaccucuucgucgagcgcuccaaggccuacuccaacugcuaccccuacgacguccccgacuacgccucccuccgcucccucgucgccuccuccggcacccucgaguucaacaacgaguccuucaacuggaccggcgucacccagaacggcaccuccuccgccugcauccgccgcuccaacaacuccuucuucucccgccucaacuggcucacccaccucaacuucaaguaccccgcccucaacgucaccaugcccaacaacgagcaguucgacaagcucuacaucuggggcguccaccaccccggcaccgacaaggaccagaucuuccucuacgcccaggccuccggccgcaucaccgucuccaccaagcgcucccagcaggccgucauccccaacaucggcucccgcccccgcguccgcaacauccccucccgcaucuccaucuacuggaccaucgucaagcccggcgacauccuccucaucaacuccaccggcaaccucaucgccccccgcggcuacuuccgcauccgcuccggccgcuccuccaucaugcgcuccgacgcccccaucggcaagugcaacuccgagugcaucacccccaacggcuccauccccaacgacaagcccuuccagaacgucaaccgcaucaccuacggcgccugcccccgcuacgucaagcagaacacccucaagcucgccaccggcaugcgcaacguccccgagaagcagacccgcggcaucuucggcgccaucgccggcuucaucgagaacggcugggagggcauggucgacggcugguacggcuuccgccaccagaacuccgagggccgcggccaggccgccgaccucaaguccacccaggccgccaucgaccagaucaacggcaagcucaaccgccucaucggcaagaccaacgagaaguuccaccagaucgagaaggaguucuccgaggucgagggccgcauccaggaccucgagaaguacgucgaggacaccaagaucgaccucugguccuacaacgccgagcuccucgucgcccucgagaaccagcacaccaucgaccucaccgacuccgagaugaacaagcucuucgagaagaccaagaagcagcuccgcgagaacgccgaggacaugggcaacggcugcuucaagaucuaccacaagugcgacaacgccugcaucggcuccauccgcaacggcaccuacgaccacgacgucuaccgcgacgaggcccucaacaaccgcuuccagaucaagggcgucgagcucaaguccggcuacaaggacuggauccucuggaucuccuucgccaucuccugcuuccuccucugcgucgcccuccucggcuucaucaugugggccugccagaagggcaacauccgcugcaacaucugcaucuga

SEQ ID NO: 106451 - RNA, 1701 nt, Artificial Sequence
  derived and/or modified CDS sequence (opt2) from hemagglutinin__InfluenzaA__AGT18751
augaagaccgucaucgcccucuccuacauccucugccucgucuucgcccagaagcuccccggcaacgacaacuccaccgccacccucugccucggccaccacgccguccccaacggcaccaucgucaagaccaucaccaacgaccagaucgaggucaccaacgccaccgagcucguccagaacuccuccaccggcgagaucugcgacuccccccaccagauccucgacggcgagaacugcacccucaucgacgcccuccucggcgacccccagugcgacggcuuccagaacaagaagugggaccucuucgucgagcgcuccaaggccuacuccaacugcuaccccuacgacguccccgacuacgccucccuccgcucccucgucgccuccuccggcacccucgaguucaacaacgaguccuucaacuggaccggcgucacccagaacggcaccuccuccgccugcauccgccgcuccaacaacuccuucuucucccgccucaacuggcucacccaccucaacuucaaguaccccgcccucaacgucaccaugcccaacaacgagcaguucgacaagcucuacaucuggggcguccaccaccccggcaccgacaaggaccagaucuuccucuacgcccaggccuccggccgcaucaccgucuccaccaagcgcucccagcaggccgucauccccaacaucggcucccgcccccgcguccgcaacauccccucccgcaucuccaucuacuggaccaucgucaagcccggcgacauccuccucaucaacuccaccggcaaccucaucgccccccgcggcuacuucaagauccgcuccggccgcuccuccaucaugcgcuccgacgcccccaucggcaagugcaacuccgagugcaucacccccaacggcuccauccccaacgacaagcccuuccagaacgucaaccgcaucaccuacggcgccugcccccgcuacgucaagcagaacacccucaagcucgccaccggcaugcgcaacguccccgagaagcagacccgcggcaucuucggcgccaucgccggcuucaucgagaacggcugggagggcauggucgacggcugguacggcuuccgccaccagaacuccgagggccgcggccaggccgccgaccucaaguccacccaggccgccaucgaccagaucaacggcaagcucaaccgccucaucggcaagaccaacgagaaguuccaccagaucgagaaggaguucuccgaggucgagggccgcauccaggaccucgagaaguacgucgaggacaccaagaucgaccucugguccuacaaguccgagcuccucgucgcccucgagaaccagcacaccaucgaccucaccgacuccgagaugaacaagcucuucgagaagaccaagaagcagcuccgcgagaacgccgaggacaugggcaacggcugcuucaagaucuaccacaagugcgacaacgccugcaucggcuccauccgcaacggcaccuacgaccacgacgucuaccgcgacgaggcccucaacaaccgcuuccagaucaagggcgucgagcucaaguccggcuacaaggacuggauccucuggaucuccuucgccaucuccugcuuccuccucugcgucgcccuccucggcuucaucaugugggccugccagaagggcaacauccgcugcaacaucugcaucuga

SEQ ID NO: 106452 - RNA, 1701 nt, Artificial Sequence
  derived and/or modified CDS sequence (opt2) from hemagglutinin__InfluenzaA__AGT18752
augaagaccaucaucgcccucuccuacaucaucugccucgucuucgcccagaagcuccccggcaacgacaacuccaccgccacccucugccucggccaccacgccguccccaacggcaccaucgucaagaccaucaccaacgaccagaucgaggucaccaacgccaccgagcucguccagaacuccuccaccggcgagaucugcaacuccccccaccagauccucgacggcgagaacugcacccucaucgacgcccuccucggcgacccccagugcgacggcuuccagaacaagaagugggaccucuucgucgagcgcuccaaggccuacuccaacugcuaccccuacgacguccccgacuacgccucccuccgcucccucgucgccuccuccggcacccucgaguucaacaacgaguccuucaacuggaccggcgucacccagaacggcaccuccuccgccugcauccgccgcuccaacaacuccuucuucucccgccucaacuggcucacccaccucaacuucaaguaccccgcccucaacgucaccaugcccaacaacgagcaguucgacaagcucuacaucuggggcguccaccaccccggcaccgacaaggaccagaucuuccucuacgcccaggccuccggccgcaucaccgucuccaccaagcgcucccagcaggccgucauccccaacaucggcucccgcccccgcguccgcaacauccccucccgcaucuccaucuacuggaccaucgucaagcccggcgacauccuccucaucaacuccaccggcaaccucaucgccccccgcggcuacuucaagauccgcuccggccgcuccuccaucaugcgcuccgacgcccccaucggcaagugcaacuccgagugcaucacccccaacggcuccauccccaacgacaagcccuuccagaacgucaaccgcaucaccuacggcgccugcccccgcuacgucaagcagaacacccucaagcucgccaccggcaugcgcaacguccccgagaagcagacccgcggcaucuucggcgccaucgccggcuucaucgagaacggcugggagggcauggucgacggcugguacggcuuccgccaccagaacuccgagggccgcggccaggccgccgaccucaaguccacccaggccgccaucgaccagaucaacggcaagcucaaccgccucaucggcaagaccaacgagaaguuccaccagaucgagaaggaguucuccgaggucgagggccgcauccaggaccucgagaaguacgucgaggacaccaagaucgaccucugguccuacuccuccgagcuccucgucgcccucgagaaccagcacaccaucgaccucaccgacuccgagaugaacaagcucuucgagaagaccaagaagcagcuccgcgagaacgccgaggacaugggcaacggcugcuucaagaucuaccacaagugcgacaacgccugcaucggcuccauccgcaacggcaccuacgaccacgacgucuaccgcgacgaggcccucaacaaccgcuuccagaucaagggcgucgagcucaaguccggcuacaaggacuggauccucuggaucuccuucgccaucuccugcuuccuccucugcgucgcccuccucggcuucaucaugugggccugccagaagggcaacauccgcugcaacaucugcaucuga

SEQ ID NO: 106453 - RNA, 1701 nt, Artificial Sequence
  derived and/or modified CDS sequence (opt2) from hemagglutinin__InfluenzaA__AGT18753
augaagaccaucaucgcccucuccuacauccucugccucgucuucgcccagaagcuccccggcaacgacaacuccaccgccacccucugccucggccaccacgccguccccaacggcaccaucgucaagaccaucaccaacgaccagaucgaggucaccaacgccaccgagcucguccagaacuccuccaccggcgagaucugcaacuccccccaccagauccucgacggcgagaacugcacccucaucgacgcccuccucggcgacccccagugcgacggcuuccagaacaagaagugggaccucuucgucgagcgcuccaaggccuacuccaacugcuaccccuacgacguccccgacuacgccucccuccgcucccucgucgccuccuccggcacccucgaguucaacaacgaguccuucaacuggaccggcgucacccagaacggcaccuccuccgccugcauccgccgcuccaacaacuccuucuucucccgccucaacuggcucacccaccucaacuucaaguaccccgcccucaacgucaccaugcccaacaacgagcaguucgacaagcucuacaucuggggcguccaccaccccggcaccgacaaggaccagaucuuccucuacgcccaggccuccggccgcaucaccgucuccaccaagcgcucccagcaggccgucauccccaacaucggcucccgcccccgcguccgcaacauccccucccgcaucuccaucuacuggaccaucgucaagcccggcgacauccuccucaucaacuccaccggcaaccucaucgccccccgcggcuacuucaagauccgcuccggccgcuccuccaucaugcgcuccgacgcccccaucggcaagugcaacuccgagugcaucacccccaacggcuccauccccaacgacaagcccuuccagaacgucaaccgcaucaccuacggcgccugcccccgcuacgucaagcagaacacccucaagcucgccaccggcaugcgcaacguccccgagaagcagacccgcggcaucuucggcgccaucgccggcuucaucgagaacggcugggagggcauggucgacggcugguacggcuuccgccaccagaacuccgagggccgcggccaggccgccgaccucaaguccacccaggccgccaucgaccagaucaacggcaagcucaaccgccucaucggcaagaccaacgagaaguuccaccagaucgagaaggaguucuccgaggucgagggccgcauccaggaccucgagaaguacgucgaggacaccaagaucgaccucugguccuacaaguccgagcuccucgucgcccucgagaaccagcacaccaucgaccucaccgacuccgagaugaacaagcucuucgagaagaccaagaagcagcuccgcgagaacgccgaggacaugggcaacggcugcuucaagaucuaccacaagugcgacaacgccugcaucggcuccauccgcaacggcaccuacgaccacgacgucuaccgcgacgaggcccucaacaaccgcuuccagaucaagggcgucgagcucaaguccggcuacaaggacuggauccucuggaucuccuucgccaucuccugcuuccuccucugcgucgcccuccucggcuucaucaugugggccugccagaagggcaacauccgcugcaacaucugcaucuga

SEQ ID NO: 106454 - RNA, 1701 nt, Artificial Sequence
  derived and/or modified CDS sequence (opt2) from hemagglutinin__InfluenzaA__AGT18754
augaagaccaucaucgcccucuccuacauccucugccucgucuucgcccagaagcuccccgagaacgacaacuccaccgccacccucugccucggccaccacgccguccccaacggcaccaucgucaagaccaucaccgacgaccagaucgaggucaccaacgccaccgagcucguccagaacuccuccaccggcgagaucugcgacuccccccaccagauccucgacggcgagaacugcacccucaucgacgcccuccucggcgacccccagugcgacggcuuccagaacaagaagugggaccucuucgucgagcgcggcaaggccuacuccaacugcuaccccuacgacguccccgacuacgccucccuccgcucccucgucgccaccuccggcacccucgaguucaacaacgaguccuucaacuggaccggcgucacccagaacggcaccuccuccgccugcauccgccgcuccaacaacuccuucuucucccgccucaacuggcucacccaccucaacuucaaguaccccgcccucaacgucaccaugcccaacaacgagcaguucgacaagcucuacaucuggggcguccaccaccccggcaccgacaaggaccagaucuuccucuacgcccaggccuccggccgcaucaccgucuccaccaagcgcucccagcaggccgucauccccaacaucggcucccgcccccgcguccgcaacauccccucccgcaucuccaucuacuggaccaucgucaagcccggcgacauccuccucaucaacuccaccggcaaccucaucgccccccgcggcuacuucaagauccgcuccggccgcuccuccaucaugcgcuccgacgcccccaucggcaagugcaacuccgagugcaucacccccaacggcuccauccccaacgacaagcccuuccagaacgucaaccgcaucaccuacggcgccugcccccgcuacgucaagcagaacacccucaagcucgccaccggcaugcgcaacguccccgagaagcagacccgcggcaucuucggcgccaucgccggcuucaucgagaacggcugggagggcauggucgacggcugguacggcuuccgccaccagaacuccgagggccgcggccaggccgccgaccucaaguccacccaggccgccaucgaccagaucaacggcaagcucaaccgccucaucggcaagaccaacgagaaguuccaccagaucgagaaggaguucuccgaggucgagggccgcauccaggaccucgagaaguacgucgaggacaccaagaucgaccucugguccuacaacgccgagcuccucgucgcccucgagaaccagcacaccaucgaccucaccgacuccgagaugaacaagcucuucgagaagaccaagaagcagcuccgcgagaacgccgaggacaugggcaacggcugcuucaagaucuaccacaagugcgacaacgccugcaucggcuccauccgcaacggcaccuacgaccacgacgucuaccgcgacgaggcccucaacaaccgcuuccagaucaagggcgucgagcucaaguccggcuacaaggacuggauccucuggaucuccuucgccaucuccugcuuccuccucugcgucgcccuccucggcuucaucaugugggccugccagaagggcaacauccgcugcaacaucugcaucuga

SEQ ID NO: 106455 - RNA, 1701 nt, Artificial Sequence
  derived and/or modified CDS sequence (opt2) from hemagglutinin__InfluenzaA__AGT18756
augaagaccaucaucgcccucuccuacguccucugccucgucuucgcccagaagcuccccggcaacgacaacuccaccgccacccucugccucggccaccacgccguccccaacggcaccaucgucaagaccaucaccaacgaccgcaucgaggucaccaacgccaccgagcucguccagaacuccuccaucggcgagaucugcgacuccccccaccagauccucgacggcgagaacugcacccucaucgacgcccuccucggcgacccccagugcgacgacuuccagaacaagaagugggaccucuucgucgagcgcuccaaggccuacuccaacugcuaccccuacgacguccccgacuacgccucccuccgcucccucgucgccuccuccggcacccucgaguucaacaacgaguccuucaacugggccggcgucacccagaacggcaccuccuccgccugccgccgcggcuccaacuccuccuucuucucccgccucaacuggcucacccaccucaacuucaaguaccccgcccucaacgucaccaugcccaacaacgagcaguucgacaagcucuacaucuggggcguccaccaccccggcaccgacaaggaccagaucuuccucuacgcccaguccuccggccgcaucaccgucuccaccaagcgcucccagcaggccgucauccccaacaucggcucccgcccccgcauccgcaacauccccucccgcaucuccaucuacuggaccaucgucaagcccggcgacauccuccucaucaacuccaccggcaaccucaucgccccccgcggcuacuucaagauccgcuccggcaaguccuccaucaugcgcuccgacgcccccaucggcaagugcaaguccgagugcaucacccccaacggcuccauccccaacgacaagcccuuccagaacgucaaccgcaucaccuacggcgccugcccccgcuacgucaagcaguccacccucaagcucgccaccggcaugcgcaacguccccgagaagcagacccgcggcaucuucggcgccaucgccggcuucaucgagaacggcugggagggcauggucgacggcugguacggcuuccgccaccagaacuccgagggccgcggccaggccgccgaccucaaguccacccaggccgccaucgaccagaucaacggcaagcucaaccgccucaucggcaagaccaacgagaaguuccaccagaucgagaaggaguucuccgaggucgagggccgcauccaggaccucgagaaguacgucgaggacaccaagaucgaccucugguccuacaaguccgagcuccucgucgcccucgagaaccagcacaccaucgaccucaccgacuccgagaugaacaagcucuucgagaagaccaagaagcagcuccgcgagaacgccgaggacaugggcaacggcugcuucaagaucuaccacaagugcgacaacgccugcaucggcuccauccgcaacggcaccuacgaccacgacgucuaccgcgacgaggcccucaacaaccgcuuccagaucaagggcgucgagcucaaguccggcuacaaggacuggauccucuggaucuccuucgccaucuccugcuuccuccucugcgucgcccuccucggcuucaucaugugggccugccagaagggcaacauccgcugcaacaucugcaucuga

SEQ ID NO: 106456 - RNA, 1701 nt, Artificial Sequence
  derived and/or modified CDS sequence (opt2) from hemagglutinin__InfluenzaA__AGT18757
augaagaccaucaucgcccucuccuacauccucugccucgucuucgcccagaagcuccccggcaacgacaacuccaccgccacccucugccucggccaccacgccguccccaacggcaccaucgucaagaccaucaccaacgaccgcaucgaggucaccaacgccaccgagcucguccagaacuccuccaucggcgagaucugcgacuccccccaccagauccucgacggcgagaacugcacccucaucgacgcccuccucggcgacccccagugcgacgacuuccagaacaagaagugggaccucuucgucgagcgcuccaaggccuacuccaacugcuaccccuacgacguccccgacuacgccucccuccgcucccucgucgccuccuccggcacccucgaguucaacaacgaguccuucaacugggccggcgucacccagaacggcaccuccuccgccugccgccgcggcuccaacuccuccuucuucucccgccucaacuggcucacccaccucaacuucaaguaccccgcccucaacgucaccaugcccaacaacgagcaguucgacaagcucuacaucuggggcguccaccaccccggcaccgacaaggaccagaucuuccucuacgcccaguccuccggccgcaucaccgucuccaccaagcgcucccagcaggccgucauccccaacaucggcucccgcccccgcauccgcaacauccccucccgcaucuccaucuacuggaccaucgucaagcccggcgacauccuccucaucaacuccaccggcaaccucaucgccccccgcggcuacuucaagauccgcuccggcaaguccuccaucaugcgcuccgacgcccccaucggcaagugcaaguccgagugcaucacccccaacggcuccauccccaacgacaagcccuuccagaacgucaaccgcaucaccuacggcgccugcccccgcuacgucaagcaguccacccucaagcucgccaccggcaugcgcaacguccccgagaagcagacccgcggcaucuucggcgccaucgccggcuucaucgagaacggcugggagggcauggucgacggcugguacggcuuccgccaccagaacuccgagggccgcggccaggccgccgaccucaaguccacccaggccgccaucgaccagaucaacggcaagcucaaccgccucaucggcaagaccaacgagaaguuccaccagaucgagaaggaguucuccgaggucgagggccgcauccaggaccucgagaaguacgucgaggacaccaagaucgaccucugguccuacaacgccgagcuccucgucgcccucgagaaccagcacaccaucgaccucaccgacuccgagaugaacaagcucuucgagaagaccaagaagcagcuccgcgagaacgccgaggacaugggcaacggcugcuucaagaucuaccacaagugcgacaacgccugcaucggcuccauccgcaacggcaccuacgaccacgacgucuaccgcgacgaggcccucaacaaccgcuuccagaucaagggcgucgagcucaaguccggcuacaaggacuggauccucuggaucuccuucgccaucuccugcuuccuccucugcgucgcccuccucggcuucaucaugugggccugccagaagggcaacauccgcugcaacaucugcaucuga

SEQ ID NO: 106457 - RNA, 1701 nt, Artificial Sequence
  derived and/or modified CDS sequence (opt2) from hemagglutinin__InfluenzaA__AGT18758
augaagaccaucaucgcccucuccuacauccucugccucgucuucgcccagaagcuccccggcaacgacaacuccaccgccacccucugccucggccaccacgccguccccaacggcaccaucgucaagaccaucaccaacgaccgcaucgaggucaccaacgccaccgagcucguccagaacuccuccaucggcgagaucugcgacuccccccaccagauccucgacggcgagaacugcacccucaucgacgcccuccucggcgacccccagugcgacgacuuccagaacaagaagugggaccucuucgucgagcgcuccaaggccuacuccaacugcuaccccuacgacguccccgacuacgccucccuccgcucccucgucgccuccuccggcacccucgaguucaacaacgaguccuucaacugggccggcgucacccagaacggcaccuccuccgccugccgccgcggcuccaacuccuccuucuucucccgccucaacuggcucacccaccucaacuucaaguaccccgcccucaacgucaccaugcccaacaacgagcaguucgacaagcucuacaucuggggcguccaccaccccggcaccgacaaggaccagaucuuccucuacgcccaguccuccggccgcaucaccgucuccaccaagcgcucccagcaggccgucauccccaacaucggcucccgcccccgcauccgcaacauccccucccgcaucuccaucuacuggaccaucgucaagcccggcgacauccuccucaucaacuccaccggcaaccucaucgccccccgcggcuacuucaagauccgcuccggcaaguccuccaucaugcgcuccgacgcccccaucggcaagugcaaguccgagugcaucacccccaacggcuccauccccaacgacaagcccuuccagaacgucaaccgcaucaccuacggcgccugcccccgcuacgucaagcaguccacccucaagcucgccaccggcaugcgcaacguccccgagaagcagacccgcggcaucuucggcgccaucgccggcuucaucgagaacggcugggagggcauggucgacggcugguacggcuuccgccaccagaacuccgagggccgcggccaggccgccgaccucaaguccacccaggccgccaucgaccagaucaacggcaagcucaaccgccucaucggcaagaccaacgagaaguuccaccagaucgagaaggaguucuccgaggucgagggccgcauccaggaccucgagaaguacgucgaggacaccaagaucgaccucugguccuacuccuccgagcuccucgucgcccucgagaaccagcacaccaucgaccucaccgacuccgagaugaacaagcucuucgagaagaccaagaagcagcuccgcgagaacgccgaggacaugggcaacggcugcuucaagaucuaccacaagugcgacaacaccugcaucggcuccauccgcaacggcaccuacgaccacgacgucuaccgcgacgaggcccucaacaaccgcuuccagaucaagggcgucgagcucaaguccggcuacaaggacuggauccucuggaucuccuucgccaucuccugcuuccucgucugcgucgcccuccucggcuucaucaugugggccugccagaagggcaacauccgcugcaacaucugcaucuga

SEQ ID NO: 106458 - RNA, 1701 nt, Artificial Sequence
  derived and/or modified CDS sequence (opt2) from hemagglutinin__InfluenzaA__AGT18759
augaagaccaucaucgcccucuccuacauccucugccucgucuucgcccagaagcuccccggcaacgacaacuccaccgccacccucugccucggccaccacgccguccccaacggcaccaucgucaagaccaucaccaacgaccgcaucgaggucaccaacgccaccgagcucguccagaacuccuccaucggcgagaucugcgacuccccccaccagauccucgacggcgagaacugcacccucaucgacgcccuccucggcgacccccagugcgacgacuuccagaacaagaagugggaccucuucgucgagcgcuccaaggccuacuccaacugcuaccccuacgacguccccgacuacgccucccuccgcucccucgucgccuccuccggcacccucgaguucaacaacgaguccuucaacugggccggcgucacccagaacggcaccuccuccgccugccgccgcggcuccaacuccuccuucuucucccgccucaacuggcucacccaccucaacuucaaguaccccgcccucaacgucaccaugcccaacaacgagcaguucgacaagcucuacaucuggggcguccaccaccccggcaccgacaaggaccagaucuuccucuacgcccaguccuccggccgcaucaccgucuccaccaagcgcucccagcaggccgucauccccaacaucggcucccgcccccgcauccgcaacauccccucccgcaucuccaucuacuggaccaucgucaagcccggcgacauccuccucaucaacuccaccggcaaccucaucgccccccgcggcuacuucaagauccgcuccggcaaguccuccaucaugcgcuccgacgcccccaucggcaagugcaaguccgagugcaucacccccaacggcuccauccccaacgacaagcccuuccagaacgucaaccgcaucaccuacggcgccugcccccgcuacgucaagcaguccacccucaagcucgccaccggcaugcgcaacguccccgagaagcagacccgcggcaucuucggcgccaucgccggcuucaucgagaacggcugggagggcauggucgacggcugguacggcuuccgccaccagaacuccgagggccgcggccaggccgccgaccucaaguccacccaggccgccaucgaccagaucaacggcaagcucaaccgccucaucggcaagaccaacgagaaguuccaccagaucgagaaggaguucuccgaggucgagggccgcauccaggaccucgagaaguacgucgaggacaccaagaucgaccucugguccuacuccuccgagcuccucgucgcccucgagaaccagcacaccaucgaccucaccgacuccgagaugaacaagcucuucgagaagaccaagaagcagcuccgcgagaacgccgaggacaugggcaacggcugcuucaagaucuaccacaagugcgacaacgccugcaucggcuccauccgcaacggcaccuacgaccacgacgucuaccgcgacgaggcccucaacaaccgcuuccagaucaagggcgucgagcucaaguccggcuacaaggacuggauccucuggaucuccuucgccaucuccugcuuccucgucugcgucgcccuccucggcuucaucaugugggccugccagaagggcaacauccgcugcaacaucugcaucuga

SEQ ID NO: 106459 - RNA, 1701 nt, Artificial Sequence
  derived and/or modified CDS sequence (opt2) from hemagglutinin__InfluenzaA__AGT18760
augaagaccaucaucgcccucuccuacauccucugccucgucuucgcccagaagcuccccggcaacgacaacuccaccgccacccucugccucggccaccacgccguccccaacggcaccaucgucaagaccaucaccaacgaccgcaucgaggucaccaacgccaccgagcucguccagaacuccuccaucggcgagaucugcgacuccccccaccagauccucgacggcgagaacugcacccucaucgacgcccuccucggcgacccccagugcgacgacuuccagaacaagaagugggaccucuucgucgagcgcaacaaggccuacuccaacugcuaccccuacgacguccccgacuacgccucccuccgcucccucgucgccuccuccggcacccucgaguucaacaacgaguccuucaacugggccggcgucacccagaacggcaccuccuccgccugccgccgcggcuccaacuccuccuucuucucccgccucaacuggcucacccaccucaacuucaaguaccccgcccucaacgucaccaugcccaacaacgagcaguucgacaagcucuacaucuggggcguccaccaccccggcaccgacaaggaccagaucuuccucuacgcccaguccuccggccgcaucaccgucuccaccaagcgcucccagcaggccgucauccccaacaucggcucccgcccccgcauccgcaacauccccucccgcaucuccaucuacuggaccaucgucaagcccggcgacauccuccucaucaacuccaccggcaaccucaucgccccccgcggcuacuucaagauccgcuccggcaaguccuccaucaugcgcuccgacgcccccaucggcaagugcaaguccgagugcaucacccccaacggcuccauccccaacgacaagcccuuccagaacgucaaccgcaucaccuacggcgccugcccccgcuacgucaagcaguccacccucaagcucgccaccggcaugcgcaacguccccgagaagcagacccgcggcaucuucggcgccaucgccggcuucaucgagaacggcugggagggcauggucgacggcugguacggcuuccgccaccagaacuccgagggccgcggccaggccgccgaccucaaguccacccaggccgccaucgaccagaucaacggcaagcucaaccgccucaucggcaagaccaacgagaaguuccaccagaucgagaaggaguucuccgaggucgagggccgcauccaggaccucgagaaguacgucgaggacaccaagaucgaccucugguccuacaaguccgagcuccucgucgcccucgagaaccagcacaccaucgaccucaccgacuccgagaugaacaagcucuucgagaagaccaagaagcagcuccgcgagaacgccgaggacaugggcaacggcugcuucaagaucuaccacaagugcgacaacgccugcaucggcuccauccgcaacggcaccuacgaccacgacgucuaccgcgacgaggcccucaacaaccgcuuccagaucaagggcgucgagcucaaguccggcuacaaggacuggauccucuggaucuccuucgccaucuccugcuuccucgucugcgucgcccuccucggcuucaucaugugggccugccagaagggcaacauccgcugcaacaucugcaucuga

SEQ ID NO: 106460 - RNA, 1701 nt, Artificial Sequence
  derived and/or modified CDS sequence (opt2) from hemagglutinin__InfluenzaA__AGT18761
augaagaccaucaucgcccucuccuacauccucugccucgucuucgcccagaagcuccccggcaacgacaacuccaccgccacccucugccucggccaccacgccguccccaacggcaccaucgucaagaccaucaccaacgaccgcaucgaggucaccaacgccaccgagcucguccagaacuccuccaucggcgagaucugcgacuccccccaccagauccucgacggcgagaacugcacccucaucgacgcccuccucggcgacccccagugcgacgacuuccagaacaagaagugggaccucuucgucgagcgcuccaaggccuacuccaacugcuaccccuacgacguccccgacuacgccucccuccgcucccucgucgccuccuccggcacccucgaguucaacaacgaguccuucaacugggccggcgucacccagaacggcaccuccuccgccugccgccgcggcuccaacuccuccuucuucucccgccucaacuggcucacccaccucaacuucaaguaccccgcccucaacgucaccaugcccaacaacgagcaguucgacaagcucuacaucuggggcguccaccaccccggcaccgacaaggaccagaucuuccucuacgcccaguccuccggccgcaucaccgucuccaccaagcgcucccagcaggccgucauccccaacaucggcucccgcccccgcauccgcaacauccccucccgcaucuccaucuacuggaccaucgucaagcccggcgacauccuccucaucaacuccaccggcaaccucaucgccccccgcggcuacuucaagauccgcuccggcaaguccuccaucaugcgcuccgacgcccccaucggcaagugcaaguccgagugcaucacccccaacggcuccauccccaacgacaagcccuuccagaacgucaaccgcaucaccuacggcgccugcccccgcuacgucaagcaguccacccucaagcucgccaccggcaugcgcaacguccccgagaagcagacccgcggcaucuucggcgccaucgccggcuucaucgagaacggcugggagggcauggucgacggcugguacggcuuccgccaccagaacuccgagggccgcggccaggccgccgaccucaaguccacccaggccgccaucgaccagaucaacggcaagcucaaccgccucaucggcaagaccaacgagaaguuccaccagaucgagaaggaguucuccgaggucgagggccgcauccaggaccucgagaaguacgucgaggacaccaagaucgaccucugguccuacuccuccgaguuccucgucgcccucgagaaccagcacaccaucgaccucaccgacuccgagaugaacaagcucuucgagaagaccaagaagcagcuccgcgagaacgccgaggacaugggcaacggcugcuucaagaucuaccacaagugcgacaacgccugcaucggcuccauccgcaacggcaccuacgaccacgacgucuaccgcgacgaggcccucaacaaccgcuuccagaucaagggcgucgagcucaaguccggcuacaaggacuggauccucuggaucuccuucgccaucuccugcuuccucgucugcgucgcccuccucggcuucaucaugugggccugccagaagggcaacauccgcugcaacaucugcaucuga

SEQ ID NO: 106461 - RNA, 1701 nt, Artificial Sequence
  derived and/or modified CDS sequence (opt2) from hemagglutinin__InfluenzaA__AGT37102
auggaggccaagcucgucguccucuucugcgccuucaccacccucaaggccgacaucaucugcgucggcuaccacgccaacaacuccaccgacaccgucgacaccaucauggagaagaacgucaccgucacccacuccgucaaccuccucgagaacucccacaacggcaagcucugcucccucaacggcaaggccccccuccagcucggcaacugcaacgucgccggcuggauccucggcaaccccgagugcgaccuccuccucaccgccaacuccugguccuacaucaucgagaccuccuccuccaagaacggcaccugcuaccccggcgaguucuccgacuacgaggagcuccgcgagcuccucuccaccgucuccuccuucgagcgcuucgagaucuuccccaaggccaccuccuggcccaaccacgagaccaccaagggcgccaccaucgccugcucccacuccggcgccuccuccuucuaccgcaaccuccucuggaucgucaagaagggcaacuccuaccccaagaucuccaaguccuacaccaacaaccgcggcaaggagguccucgucaucuggggcguccaccacccccccaccgacuccucccagcaggcccucuaccagaacacccacaccuacaucuccgucggcuccuccaaguacuaccagcgcuucacccccgucgucgccgcccgccccaagauccgcgagcaggagggccgcaugaacuacuacuggacccuccucgagcagggcgacaccaucaccuucgaggccaccggcaaccucaucgcccccugguacgccuucgcccucgacaugggcuccuccuccggcaucauggucuccgacgcccccguccacaacugcaccaccaagugccagaccccccacggcgcccucaaguccaaccuccccuuccagaacguccaccccaucaccaucggcgagugccccaaguacgucaaguccacccagcuccgcauggccaccggccuccgcaacauccccuccauccagucccgcggccucuucggcgccaucgccggcuucaucgagggcggcuggaccggcaugaucgacggcugguacggcuaccaccaccagaacgagcagggcuccggcuacgccgccgaccagaaguccacccagaucgccaucgacggcaucuccaacaaggucaacuccaucaucgagaagaugaacguccaguucaccuccgucggcaaggaguucaacgaccucgagaagcgcaucgagaaccucaacaagaaggucgacgacggcuuccucgacgucuggaccuacaacgccgagcuccucguccuccucgagaacgagcgcacccucgacuuccacgacuucaacgucaagaaccucuacgagaaggucaagucccagcuccgcaacaacgccaaggagaucggcaacggcugcuucgaguucuaccacaagugcgacaacgagugcauggagaacgucaagaacggcaccuacaacuaccccaaguacuccgaggaguccaagcucaaccgcgagaagaucgacggcgucaagcucgaguccaucggcguccaccagauccucgccaucuacuccaccgucgccuccucccucguccuccucgucucccucggcgccaucuccuucuggaugugcuccaacggcucccuccagugccgcaucugcaucuga

SEQ ID NO: 106462 - RNA, 1701 nt, Artificial Sequence
  derived and/or modified CDS sequence (opt2) from hemagglutinin__InfluenzaA__AGU01877
augaaggccauccucgucguccuccucuacaccuucgccaccgccaacgccgacacccucugcaucggcuaccacgccaacaacuccaccgacaccgucgacaccguccucgagaagaacgucaccgucacccacuccgucaaccuccucgaggacaagcacaacggcaagcucugcaagcuccgcggcgucgccccccuccaccucggcaagugcaacaucgccggcuggauccucggcaaccccgagugcgagucccucuccaccgccuccuccugguccuacaucgucgagaccuccuccuccgacaacggcaccugcuaccccggcgacuucaucaacuacgaggagcuccgcgagcagcucuccuccgucuccuccuucgagcgcuucgagaucuuccccaagaccuccuccuggcccaaccacgacuccaacaagggcgucaccgccgccugcccccacgccggcgccaaguccuucuacaagaaccucaucuggcucgucaagaagggcaacuccuaccccaagcucuccaaguccuacaucaacgacaagggcaaggagguccucguccucuggggcauccaccaccccuccaccaccaccgaccagcagucccucuaccagaacgccgacgccuacgucuucgucggcaccucccgcuacuccaagaaguucaagcccgagaucgccauccgccccaagguccgcgaccaggagggccgcaugaacuacuacuggacccucaucgagcccggcgacaagaucaccuucgaggccaccggcaaccucgucgucccccgcuacgccuucgccauggagcgcaacgccggcuccggcaucaucaucuccgacacccccguccacgacugcaacaccaccugccagacccccgagggcgccaucaacaccucccuccccuuccagaacauccaccccaucaccaucggcaagugccccaaguacgucaaguccaccaagcuccgccucgccaccggccuccgcaacguccccuccauccagucccgcggccucuucggcgccaucgccggcuucaucgagggcggcuggaccggcauggucgacggcugguacggcuaccaccaccagaacgagcagggcuccggcuacgccgccgaccucaaguccacccagaacgccaucgacaagaucaccaacaaggucaacuccgucaucgagaagaugaacacccaguucaccgccgucggcaaggaguucaaccaccucgagaagcgcaucgagaaccucaacaagaaggucgacgacggcuuccucgacaucuggaccuacaacgccgagcuccucguccuccucgagaacgagcgcacccucgacuaccacgacuccaacgucaagaaccucuacgagaagguccgcaaccagcucaagaacaacgccaaggagaucggcaacggcugcuucgaguucuaccacaagugcgacaacaccugcauggaguccgucaagaacggcaccuacgacuaccccaaguacuccgaggaggccaagcucaaccgcgagaagaucgacggcgucaagcucgaguccacccgcaucuaccagauccucgccaucuacuccaccgucgccuccucccucguccucgucgucucccucggcgccaucuccuucuggaugugcuccaacggcucccuccagugccgcaucugcaucuga

SEQ ID NO: 106463 - RNA, 1701 nt, Artificial Sequence
  derived and/or modified CDS sequence (opt2) from hemagglutinin__InfluenzaA__AGU01878
augaaggccauccucgucgucaugcucuacacccucgccaccgccaacgccgacacccucugcaucggcuaccacgccaacaacuccaccgacaccgucgacaccguccucgagaagaacgucaccgucacccacuccgucaaccuccucgaggacaagcacgacggcaagcucugcaagcuccgcggcgucgccccccuccaccucggcaagugcaacaucgccggcuggauccucggcaaccccgagugcgagucccucuccaccgccuccuccugguccuacaucgucgagaccuccggcuccgacaacggcaccugcuaccccggcgacuucaucgacuacgaggagcuccgcgagcagcucuccuccgucuccuccuucgagcgcuucgagaucuuccccaagaccuccuccuggcccaaccacgacuccaacaagggcgucaccgccgccugcccccacgccggcgccaagggcuucuacaagaaccucaucuggcucgucaagaagggcaacuccuaccccaagcucuccaucuccuacaucaacgacaagggcaaggagguccucguccucuggggcauccaccaccccuccaccaccgccgaccagcagucccucuaccagaacgccgacaccuacgucuucgucggcaccucccgcuacuccaagaaguucaagcccgagaucgccauccgccccaagguccgcgaccaggagggccgcaugaacuacuacuggacccucgucgagcccggcgacaagaucaccuucgaggccaccggcaaccucgucgucccccgcuacgccuucgccauggagcgcaacgccggcuccggcaucaucaucuccgacacccccguccacgacugcaacaccaccugccagacccccaagggcgccaucaacaccucccuccccuuccagaacauccaccccaucaccaucggcaagugccccaaguacgucaaguccaccaagcuccgccucgccaccggccuccgcaacguccccuccauccagucccgcggccucuucggcgccaucgccggcuucaucgagggcggcuggaccggcauggucgacggcugguacggcuaccaccaccagaacgagcagggcuccggcuacgccgccgaccucaaguccacccagaacgccaucgacaagaucaccaacaaggucaacuccgucaucgagaagaugaacacccaguucaccgccgucggcaaggaguucaaccaccucgagaagcgcaucgagaaccucaacaagaaggucgacgacggcuuccucgacaucuggaccuacaacgccgagcuccucguccuccucgagaacgagcgcacccucgacuaccacgacuccaacgucaagaaccucuacgagaagguccgcaaccagcucaagaacaacgccaaggagaucggcaacggcugcuucgaguucuaccacaagugcgacaacaccugcauggaguccgucaagaacggcaccuacgacuaccccaaguacuccgaggaggccaagcucaaccgcgaggagaucgacggcgucaagcucgaguccacccgcaucuaccagauccucgccaucuacuccaccgccgccuccucccucguccucgucgucucccucggcgccaucuccuucuggaugugcuccaacggcucccuccagugccgcaucugcaucuga

SEQ ID NO: 106464 - RNA, 1701 nt, Artificial Sequence
  derived and/or modified CDS sequence (opt2) from hemagglutinin__InfluenzaA__AGU01879
augaaggccauccucgucgucaugcucuacaccuucgccaccgccaacgccgacacccucugcaucggcuaccacgccaacaacuccaccgacaccgucgacaccguccucgagaagaacgucaccgucacccacuccgucaaccuccucgaggacaagcacaacgagaagcucugcaagcuccgcggcgucgccccccuccaccucggcaagugcaacaucgccggcuggauccucggcaaccccgagugcgagucccucuccaccgccuccuccugguccuacaucgucgagaccuccggcuccgacaacggcaccugcuaccccggcgacuucaucgacuacgaggagcuccgcgagcagcucuccuccgucuccuccuucgagcgcuucgagaucuuccccaagaccuccuccuggcccaaccacgacuccaacaagggcgucaccgccgccugcccccaggccggcgccaagggcuucuacaagaaccucaucuggcucgucaagaagggcaacuccuaccccaagcucuccaaguccuacaucaacgacaagggcaaggagguccucguccucuggggcauccaccaccccuccaccaccgccgaccagcagucccucuaccagaacgccgacaccuacgucuucgucggcaccucccgcuacuccaagaaguucaagcccgagaucgccauccgccccaagguccgcgaccaggagggccgcaugaacuacuacuggacccucgucgagcccggcgacaagaucaccuucgaggccaccggcaaccucgucgucccccgcuacgccuucgccauggagcgcaacgccggcuccggcaucaucaucuccgacacccccguccacgacugcaacaccaccugccagacccccaagggcgccaucaacaccucccuccccuuccagaacauccaccccaucaccaucggcaagugccccaaguacgucaaguccaccaagcuccgccucgccaccggccuccgcaacguccccuccauccagucccgcggccucuucggcgccaucgccggcuucaucgagggcggcuggaccggcauggucgacggcugguacggcuaccaccaccagaacgagcagggcuccggcuacgccgccgaccucaaguccacccagaacgccaucgacaagaucaccaacaaggucaacuccgucaucgagaagaugaacacccaguucaccgccgucggcaaggaguucaaccaccucgagaagcgcaucgagaaccucaacaagaaggucgacgacggcuuccucgacaucuggaccuacaacgccgagcuccucguccuccucgagaacgagcgcacccucgacuaccacgacuccaacgucaagaaccucuacgagaagguccgcaaccagcucaagaacaacgccaaggagaucggcaacggcugcuucgaguucuaccacaagugcgacaacaccugcauggaguccgucaagaacggcaccuacgacuaccccaaguacuccgaggaggccaagcucaaccgcgaggagaucgacggcgucaagcucgaguccacccgcaucuaccagauccucgccaucuacuccaccgucgccuccucccucguccucgucgucucccucggcgccaucuccuucuggaugugcuccaacggcucccuccagugccgcaucugcaucuga

SEQ ID NO: 106465 - RNA, 1701 nt, Artificial Sequence
  derived and/or modified CDS sequence (opt2) from hemagglutinin__InfluenzaA__AGU01881
augaaggccauccucgucguccuccucuacaccuucgccaccgccaacgccgacacccucugcaucggcuaccacgccaacaacuccaccgacaccgucgacaccguccucgagaagaacgucaccgucacccacuccgucaaccuccucgaggacaagcacaacggcaagcucugcaagcuccgcggcgucaccccccuccaccucggcaagugcaacaucgccggcuggauccucggcaaccccgagugcgagucccucuccaccgccuccuccugguccuacaucgucgagaccuccuccuccgacaacggcaccugcuaccccggcgacuucaucaacuacgaggagcuccgcgagcagcucuccuccgucuccuccuucgagcgcuucgagauguuccccaagaccuccuccuggcccaaccacgacuccaacaagggcgucaccgccgccugcccccaggccggcgccaaguccuucuacaagaaccucaucuggcucgucaagaagggcaacuccuaccccaagcucuccaaguccuacaucaacgacaagggcaaggagguccucguccucuggggcauccaccaccccuccaccaccgccgaccagcagucccucuaccagaacgccgacgccuacgucuucgucggcaccucccgcuacuccaagaaguucaagcccgagaucgccauccgccccaagguccgcgaccaggagggccgcaugaacuacuacuggacccucaucgagcccggcgacaagaucaccuucgaggccaccggcaaccucgucgucccccgcuacgccuucgccauggagcgcaacgccggcuccggcaucaucaucuccgacacccccguccacgacugcaacaccaccugccagacccccgagggcgccaucaacaccucccuccccuuccagaacauccaccccaucaccaucggcaagugccccaaguacgucaaguccaccaagcuccgccucgccaccggccuccgcaacguccccuccauccagucccgcggccucuucggcgccaucgccggcuucaucgagggcggcuggaccggcauggucgacggcugguacggcuaccaccaccagaacgagcagggcuccggcuacgccgccgaccucaaguccacccagaacgccaucgacaagaucaccaacaaggucaacuccgucaucgagaagaugaacacccaguucaccgccgucggcaaggaguucaaccaccucgagaagcgcaucgagaaccucaacaagaaggucgacgacggcuuccucgacaucuggaccuacaacgccgagcuccucguccuccucgagaacgagcgcacccucgacuaccacgacuccaacgucaagaaccucuacgagaagguccgcaaccagcucaagaacaacgccaaggagaucggcaacggcugcuucgaguucuaccacaagugcgacaacaccugcauggaguccgucaagaacggcaccuacgacuaccccaaguacuccgaggaggccaagcucaaccgcgagaagaucgacggcgucaagcucgaguccacccgcaucuaccagauccucgccaucuacuccaccgucgccuccucccucguccucgucgucucccucggcgccaucuccuucuggaugugcuccaacggcucccuccagugccgcaucugcaucuga

SEQ ID NO: 106466 - RNA, 1701 nt, Artificial Sequence
  derived and/or modified CDS sequence (opt2) from hemagglutinin__InfluenzaA__AGU01883
augaaggccauccucgucgucaugcucuacaccuucgccaccgccaacgccgacacccucugcaucggcuaccacgccaacaacuccaccgacaccgucgacaccguccucgagaagaacgucaccgucacccacuccgucaaccuccucgaggacaagcacaacggcaagcucugcaagcuccgcggcgucgccccccuccaccucggcaagugcaacaucgccggcuggauccucggcaaccccgagugcgagucccucuccaccgccuccuccugguccuacaucgucgagaccuccggcuccgacaacggcaccugcuaccccggcgacuucaucgacuacgaggagcuccgcgagcagcucuccuccgucuccuccuucgagcgcuucgagaucuuccccaagaccuccuccuggcccaaccacgacuccaacaagggcgucaccgccgccugcccccacgccggcgccaagggcuucuacaagaaccucaucuggcucgucaagaagggcaacuccuaccccaagcucuccaucuccuacaucaacaacaaggagaaggagguccucguccucuggggcauccaccaccccuccaccaccgccgaccagcagucccucuaccagaacgccgacaccuacgucuucgucggcaccucccgcuacuccaagaaguucaagcccgagaucgccauccgccccaagguccgcgaccaggagggccgcaugaacuacuacuggacccucgucgagcccggcgacaagaucaccuucgaggccaccggcaaccucgucgucccccgcuacgccuucgccauggagcgcaacgccggcuccggcaucaucaucuccgacacccccguccacgacugcaacaccaccugccagacccccaagggcgccaucaacaccucccuccccuuccagaacauccaccccaucaccaucggcaagugccccaaguacgucaaguccaccaagcuccgccucgccaccggccuccgcaacguccccuccauccagucccgcggccucuucggcgccaucgccggcuucaucgagggcggcuggaccggcauggucgacggcugguacggcuaccaccaccagaacgagcagggcuccggcuacgccgccgaccucaaguccacccagaacgccaucgacaagaucaccaacaaggucaacuccgucaucgagaagaugaacacccaguucaccgccgucggcaaggaguucaaccaccucgagaagcgcaucgagaaccucaacaagaaggucgacgacggcuuccucgacaucuggaccuacaacgccgagcuccucguccuccucgagaacgagcgcacccucgacuaccacgacuccaacgucaagaaccucuacgagaagguccgcaaccagcucaagaacaacgccaaggagaucggcaacggcugcuucgaguucuaccacaagugcgacaacaccugcauggaguccgucaagaacggcaccuacgacuaccccaaguacuccgaggaggccaagcucaaccgcgaggagaucgacggcgucaagcucgaguccacccgcaucuaccagauccucgccaucuacuccaccgccgccuccucccucguccucgucgucucccucggcgccaucuccuucuggaugugcuccaacggcucccuccagugccgcaucugcaucuga

SEQ ID NO: 106467 - RNA, 1701 nt, Artificial Sequence; identical to SEQ ID NO: 106096
  derived and/or modified CDS sequence (opt2) from hemagglutinin__InfluenzaA__AGU01884

SEQ ID NO: 106468 - RNA, 1701 nt, Artificial Sequence
  derived and/or modified CDS sequence (opt2) from hemagglutinin__InfluenzaA__AGU01885
augaaggccauccucgucgucaugcucuacaccuucgccaccgccaacgccgacacccucugcaucggcuaccacgccaacaacuccaccgacaccgucgacaccguccucgagaagaacgucaccgucacccacuccgucaaccuccucgaggacaagcacaacgagaagcucugcaagcuccgcggcgucgccccccuccaccucggcaagugcaacaucgccggcuggauccucggcaaccccgagugcgagucccucuccaccgccuccuccugguccuacaucgucgagaccuccggcuccgacaacggcaccugcuaccccggcgacuucaucgacuacgaggagcuccgcgagcagcucuccuccgucuccuccuucgagcgcuucgagaucuuccccaagaccuccuccuggcccaaccacgacuccaacaagggcgucaccgccgccugcccccaggccggcgccaagggcuucuacaagaaccucaucuggcucgucaagaagggcaacuccuaccccaagcucuccaaguccuacaucaacgacaagggcaaggagguccucguccucuggggcauccaccaccccuccaccaccgccgaccagcagucccucuaccagaacgccgacaccuacgucuucgucggcaccucccgcuacuccaagaaguucaagcccgagaucgccauccgccccaagguccgcgaccaggagggccgcaugaacuacuacuggacccucgucgagcccggcgacaagaucaccuucgaggccaccggcaaccucgucgucccccgcuacgccuucgccauggagcgcaacgccggcuccggcaucaucaucuccgacacccccguccacgacugcaacaccaccugccagacccccaagggcgccaucaacaccucccuccccuuccagaacguccaccccaucaccaucggcaagugccccaaguacgucaaguccaccaagcuccgccucgccaccggccuccgcaacguccccuccauccagucccgcggccucuucggcgccaucgccggcuucaucgagggcggcuggaccggcauggucgacggcugguacggcuaccaccaccagaacgagcagggcuccggcuacgccgccgaccucaaguccacccagaacgccaucgacaagaucaccaacaaggucaacuccgucaucgagaagaugaacacccaguucaccgccgucggcaaggaguucaaccaccucgagaagcgcaucgagaaccucaacaagaaggucgacgacggcuuccucgacaucuggaccuacaacgccgagcuccucguccuccucgagaacgagcgcacccucgacuaccacgacuccaacgucaagaaccucuacgagaagguccgcaaccagcucaagaacaacgccaaggagaucggcaacggcugcuucgaguucuaccacaagugcgacaacaccugcauggaguccgucaagaacggcaccuacgacuaccccaaguacuccgaggaggccaagcucaaccgcgaggagaucgacggcgucaagcucgaguccacccgcaucuaccagauccucgccaucuacuccaccgucgccuccucccucguccucgucgucucccucggcgccaucuccuucuggaugugcuccaacggcucccuccagugccgcaucugcaucuga

SEQ ID NO: 106469 - RNA, 1701 nt, Artificial Sequence
  derived and/or modified CDS sequence (opt2) from hemagglutinin__InfluenzaA__AGU01887
augaaggccauccucgucguccuccucuacaccuucgccaccgccaacgccgacacccucugcaucggcuaccacgccaacaacuccaccgacaccgucgacaccguccucgagaagaacgucaccgucacccacuccgucaaccuccucgaggacaagcacaacggcaagcucugcaagcuccgcggcgucgccccccuccaccucggcaagugcaacaucgccggcuggauccucggcaaccccgagugcgagucccucuccaccgccuccuccugguccuacaucgucgagaccuccuccuccgacaacggcaccugcuaccccggcgacuucaucaacuacgaggagcuccgcgagcagcucuccuccgucuccuccuucgagcgcuucgagaucuuccccaagaccuccuccuggcccaaccacgacuccaacaagggcgucaccgccgccugcccccacgccggcgccaaguccuucuacaagaaccucaucuggcucgucaagaagggcaacuccuaccccaagcucuccaaguccuacaucaacgacaagggcaaggagguccucguccucuggggcauccaccaccccuccaccaccgccgaccagcagucccucuaccagaacgccgacgccuacgucuucgucggcaccucccgcuacuccaagaaguucaagcccgagaucgccauccgccccaagguccgcgaccaggagggccgcaugaacuacuacuggacccucaucgagcccggcgacaagaucaccuucgaggccaccggcaaccucgucgucccccgcuacgccuucgccgucgagcgcaacgccggcuccggcaucaucaucuccgacacccccguccacaacugcaacaccaccugccagacccccgagggcgccaucaacaccucccuccccuuccagaacauccaccccaucaccaucggcaagugccccaaguacgucaaguccaccaagcuccgccucgccaccggccuccgcaacguccccuccauccagucccgcggccucuucggcgccaucgccggcuucaucgagggcggcuggaccggcauggucgacggcugguacggcuaccaccaccagaacgagcagggcuccggcuacgccgccgaccucaaguccacccagaacgccaucgacaagaucaccaacaaggucaacuccgucaucgagaagaugaacacccaguucaccgccgucggcaaggaguucaaccaccucgagaagcgcaucgagaaccucaacaagaaggucgacgacggcuuccucgacaucuggaccuacaacgccgagcuccucguccuccucgagaacgagcgcacccucgacuaccacgacuccaacgucaagaaccucuacgagaagguccgcaaccagcucaagaacaacgccaaggagaucggcaacggcugcuucgaguucuaccacaagugcgacaacaccugcauggaguccgucaagaacggcaccuacgacuaccccaaguacuccgaggaggccaagcucaaccgcgagaagaucgacggcgucaagcucgaguccacccgcaucuaccagauccucgccaucuacuccaccgucgccuccucccucguccucgucgucucccucggcgccaucuccuucuggaugugcuccaacggcucccuccagugccgcaucugcaucuga

SEQ ID NO: 106470 - RNA, 1701 nt, Artificial Sequence
  derived and/or modified CDS sequence (opt2) from hemagglutinin__InfluenzaA__AGU01888
augaaggccauccucgucgucaugcucuacaccuucgccaccgccaacgccgacacccucugcaucggcuaccacgccaacaacuccaccgacaccgucgacaccguccucgagaagaacgucaccgucacccacuccgucaaccuccucgaggacaagcacaacggcaagcucugcaagcuccgcggcgucgccccccuccaccucggcaagugcaacaucgccggcuggauccucggcaaccccgagugcgagucccucuccaccgccuccuccugguccuacaucgucgagaccuccggcuccgacaacggcaccugcuaccccggcgacuucaucgacuacgaggagcuccgcgagcagcucuccuccgucuccuccuucgagcgcuucgagaucuuccccaagaccuccuccuggcccaaccacgacuccaacaagggcgucaccgccgccugcccccaggccggcgccaagggcuucuacaagaaccucaucuggcucgucaagaagggcaacuccuaccccaagcucuccaaguccuacaucaacgacaagggcaaggagguccucguccucuggggcauccaccaccccuccaccaccgccgaccagcagucccucuaccagaacgccgacaccuacgucuucgucggcaccucccgcuacuccaagaaguucaagcccgagaucgccauccgccccaagguccgcgaccaggagggccgcaugaacuacuacuggacccucgucgagcccggcgacaagaucaccuucgaggccaccggcaaccucgucgucccccgcuacgccuucgccauggagcgcaacgccggcuccggcaucaucaucuccgacacccccguccacgacugcaacaccaccugccagacccccaagggcgccaucaacaccucccuccccuuccagaacauccaccccaucaccaucggcaagugccccaaguacgucaaguccaccaagcuccgccucgccaccggccuccgcaacguccccuccauccagucccgcggccucuucggcgccaucgccggcuucaucgagggcggcuggaccggcauggucgacggcugguacggcuaccaccaccagaacgagcagggcuccggcuacgccgccgaccucaaguccacccagaacgccaucgacaagaucaccaacaaggucaacuccgucaucgagaagaugaacacccgcuucaccgccgucggcaaggaguucaaccaccucgagaagcgcaucgagaaccucaacaagaaggucgacgacggcuuccucgacaucuggaccuacaacgccgagcuccucguccuccucgagaacgagcgcacccucgacuaccacgacuccaacgucaagaaccucuacgagaagguccgcaaccagcucaagaacaacgccaaggagaucggcaacggcugcuucgaguucuaccacaagugcgacaacaccugcauggaguccgucaagaacggcaccuacgacuaccccaaguacuccgaggaggccaagcucaaccgcgaggagaucgacggcgucaagcucgaguccacccgcaucuaccagauccucgccaucuacuccaccgucgccuccucccucguccucgucgucucccucggcgccaucuccuucuggaugugcuccaacggcucccuccagugccgcaucugcaucuga

SEQ ID NO: 106471 - RNA, 1701 nt, Artificial Sequence; identical to SEQ ID NO: 106462
  derived and/or modified CDS sequence (opt2) from hemagglutinin__InfluenzaA__AGU01889

SEQ ID NO: 106472 - RNA, 1701 nt, Artificial Sequence
  derived and/or modified CDS sequence (opt2) from hemagglutinin__InfluenzaA__AGU01890
augaaggccauccucgucgucaugcucuacaccuucgccaccgccaacgccgacacccucugcaucggcuaccacgccaacaacuccaccgacaccgucgacaccguccucgagaagaacgucaccgucacccacuccgucaaccuccucgaggacaagcacaacggcaagcucugcaagcuccgcggcgucgccccccuccaccucggcaagugcaacaucgccggcuggauccucggcaaccccgagugcgagucccucuccaccgccuccuccugguccuacaucgucgagaccuccggcuccgacaacggcaccugcuaccccggcgacuucaucgacuacgaggagcuccgcgagcagcucuccuccgucuccuccuucgagcgcuucgagaucuuccccaagaccuccuccuggcccaaccacgacuccaacaagggcgucaccgccgccugcccccaggccggcgccaagggcuucuacaagaaccucaucuggcucgucaagaagggcaacuccuaccccaagcucuccaaguccuacaucaacgacaagggcaaggagguccucguccucuggggcauccaccaccccuccaccaccgccgaccagcagucccucuaccagaacgccgacaccuacgucuucgucggcaccucccgcuacuccaagaaguucaagcccgagaucgccauccgccccaagguccgcgaccaggagggccgcaugaacuacuacuggacccucgucgagcccggcgacaagaucaccuucgaggccaccggcaaccucgucgucccccgcuacgccuucgccauggagcgcaacgccggcuccggcaucaucaucuccgacacccccguccacgacugcaacaccaccugccagacccccaagggcgccaucaacaccucccuccccuuccagaacauccaccccaucaccaucggcaagugccccaaguacgucaaguccaccaagcuccgccucgccaccggccuccgcaacguccccuccauccagucccgcggccucuucggcgccaucgccggcuucaucgagggcggcuggaccggcauggucgacggcugguacggcuaccaccaccagaacgagcagggcuccggcuacgccgccgaccucaaguccacccagaacgccaucgacaagaucaccaacaaggucaacuccgucaucgagaagaugaacacccaguucaccgccgucggcaaggaguucaaccaccucgagaagcgcaucgagaaccucaacaagaaggucgacgacggcuuccucgacaucuggaccuacaacgccgagcuccucguccuccucgagaacgagcgcacccucgacuaccacgacuccaacgucaagaaccucuacgagaagguccgcaaccagcucaagaacaacgccaaggagaucggcaacggcugcuucgaguucuaccacaagugcgacaacaccugcauggaguccgucaagaacggcaccuacgacuaccccaaguacuccgaggaggccaagcucaaccgcgaggagaucgacggcgucaagcucgaguccacccgcaucuaccagauccucgccaucuacuccaccgucgccuccucccucguccucgucgucucccucggcgccaucuccuucuggaugugcuccaacggcucccuccagugccgcaucugcaucuga

SEQ ID NO: 106473 - RNA, 1701 nt, Artificial Sequence
  derived and/or modified CDS sequence (opt2) from hemagglutinin__InfluenzaA__AGU92645
augaaggccauccucgucguccuccucuacaccuucgccaccgccaacgccgacacccucugcaucggcuaccacgccaacaacuccaccgacaccgucgacaccguccucgagaagaacgucaccgucacccacuccgucaaccuccucgaggacaagcacaacggcaagcucugcaagcuccgcggcgucgccccccuccaccucggcaagugcaacaucgccggcuggauccucggcaaccccgagugcgagacccucuccaccgccuccuccugguccuacaucgucgagaccuccuccuccgacaacggcaccugcuaccccggcgacuucaucgacuacgaggagcuccgcgagcagcucuccuccgucuccuccuucgagcgcuucgagaucuuccccaagaccuccuccuggcccaaccacgacuccaacaagggcgucaccgccgccugcccccacgccggcgccaagggcuucuacaagaaccucaucuggcucgucaagaagggcaacuccuaccccaagcucuccaaguccuacaucaacgacaagggcaaggagguccucguccucuggggcauccaccaccccuccaccaccgccgaccagcagucccucuaccagaacgccgacaccuacgucuucgucggcaccucccgcuacuccaagaaguucaagcccgagaucgagacccgccccaagguccgcgaccaggagggccgcaugaacuacuacuggacccucgucgagcccggcgacaagaucaccuucgaggccaccggcaaccucgucgucccccgcuacgccuucgccauggagcgcgacgccggcuccggcaucaucaucuccgacacccccguccacgacugcaacaccaccugccagacccccaagggcgccaucaacaccucccuccccuuccagaacauccaccccaucaccaucggcaagugccccaaguacgucaaguccaccaagcuccgccucgccaccggccuccgcaacguccccuccauccagucccgcggccucuucggcgccaucgccggcuucaucgagggcggcuggaccggcauggucgacggcugguacggcuaccaccaccagaacgagcagggcuccggcuacgccgccgaccucaaguccacccagaacgccaucgacaagaucaccaacaaggucaacuccgucaucgagaagaugaacacccaguucaccgccgucggcaaggaguucaaccaccucgagaagcgcaucgagaaccucaacaagaaggucgacgacggcuuccucgacaucuggaccuacaacgccgagcuccucguccuccucgagaacgagcgcacccucgacuaccacgacuccaacgucaagaaccucuacgagaagguccgcaaccagcucaagaacaacgccaaggagaucggcaacggcugcuucgaguucuaccacaagugcgacaacaccugcauggaguccgucaagaacggcaccuacgacuaccccaaguacuccgaggaggccaagcucaaccgcgaggagaucgacggcgucaagcucgaguccacccgcaucuaccagauccucgccaucuacuccaccgccgccuccucccucguccucgucgucucccucggcgccaucuccuucuggaugugcuccaacggcucccuccagugccgcaucugcaucuga

SEQ ID NO: 106474 - RNA, 1701 nt, Artificial Sequence
  derived and/or modified CDS sequence (opt2) from hemagglutinin__InfluenzaA__AGU92667
augaaggccauccucgucguccuccucuacaccuucgccaccgccaacgccgacacccucugcaucggcuaccacgccaacaacuccaccgacaccgucgacaccguccucgagaagaacgucaccgucacccacuccgucaaccuccucgaggacaagcacaacggcaagcucugcaagcuccgcggcgucgccccccuccaccucggcaagugcaacaucgccggcuggauccucggcaaccccgagugcgagacccucuccaccgccuccuccugguccuacaucgucgagaccuccuccuccgacaacggcaccugcuaccccggcgacuucaucgacuacgaggagcuccgcgagcagcucuccuccgucuccuccuucgagcgcuucgagaucuuccccaagaccuccuccuggcccaaccacgacuccaacaagggcgucaccgccgccugcccccacgccggcgccaagggcuucuacaagaaccucaucuggcucgucaagaagggcaacuccuaccccaagcucuccaaguccuacaucaacgacaagggcaaggagguccucguccucuggggcauccaccaccccuccaccaccgccgaccagcagucccucuaccagaacgccgacaccuacgucuucgucggcaccucccgcuacuccaagaaguucaagcccgagaucgccacccgccccaagguccgcgaccaggagggccgcaugaacuacuacuggacccucgucgagcccggcgacaagaucaccuucgaggccaccggcaaccucgucgucccccgcuacgccuucgccauggagcgcgacgccggcuccggcaucaucaucuccgacacccccguccacgacugcaacaccaccugccagacccccaagggcgccaucaacaccucccuccccuuccagaacauccaccccaucaccaucggcaagugccccaaguacgucaaguccaccaagcuccgccucgccaccggccuccgcaacguccccuccauccagucccgcggccucuucggcgccaucgccggcuucaucgagggcggcuggaccggcauggucgacggcugguacggcuaccaccaccagaacgagcagggcuccggcuacgccgccgaccucaaguccacccagaacgccaucgacaagaucaccaacaaggucaacuccgucaucgagaagaugaacacccaguucaccgccgucggcaaggaguucaaccaccucgagaagcgcaucgagaaccucaacaagaaggucgacgacggcuuccucgacaucuggaccuacaacgccgagcuccucguccuccucgagaacgagcgcgcccucgacuaccacgacuccaacgucaagaaccucuacgagaagguccgcaaccagcucaagaacaacgccaaggagaucggcaacggcugcuucgaguucuaccacaagugcgacaacaccugcauggaguccgucaagaacggcaccuacgacuaccccaaguacuccgaggaggccaagcucaaccgcgaggagaucgacggcgucaagcucgaguccacccgcaucuaccagauccucgccaucuacuccaccgccgccuccucccucguccucgucgucucccucggcgccaucuccuucuggaugugcuccaacggcucccuccagugccgcaucugcaucuga

SEQ ID NO: 106475 - RNA, 1701 nt, Artificial Sequence
  derived and/or modified CDS sequence (opt2) from hemagglutinin__InfluenzaA__AGU92678
augaaggccauccucgucguccuccucuacaccuucgccaccgccaacgccgacacccucugcaucggccaccacgccaacaacuccaccgacaccgucgacaccguccucgagaagaacgucaccgucacccacuccgucaaccuccucgaggacaagcacaacggcaagcucugcaagcuccgcggcgucgccccccuccaccucggcaagugcaacaucgccggcuggauccucggcaaccccgagugcgagacccucuccaccgccuccuccugguccuacaucgucgagaccuccuccuccgacaacggcaccugcuaccccggcgacuucaucgacuacgaggagcuccgcgagcagcucuccuccgucuccuccuucgagcgcuucgagaucuuccccaagaccuccuccuggcccaaccacgacuccaacaagggcgucaccgccgccugcccccacgccggcgccaagggcuucuacaagaaccucaucuggcucgucaagaagggcaacuccuaccccaagcucuccaaguccuacaucaacgacaagggcaaggagguccucguccucuggggcauccaccaccccuccaccaccgccgaccagcagucccucuaccagaacgccgacaccuacgucuucgucggcaccucccgcuacuccaagaaguucaagcccgagaucgccacccgccccaagguccgcgaccaggagggccgcaugaacuacuacuggacccucgucgagcccggcgacaagaucaccuucgaggccaccggcaaccucgucgucccccgcuacgccuucgccauggagcgcgacgccggcuccggcaucaucaucuccgacacccccguccacgacugcaacaccaccugccagacccccaagggcgccaucaacaccucccuccccuuccagaacauccaccccaucaccaucggcaagugccccaaguacgucaaguccaccaagcuccgccucgccaccggccuccgcaacguccccuccauccagucccgcggccucuucggcgccaucgccggcuucaucgagggcggcuggaccggcauggucgacggcugguacggcuaccaccaccagaacgagcagggcuccggcuacgccgccgaccucaaguccacccagaacgccaucgacaagaucaccaacaaggucaacuccgucaucgagaagaugaacacccaguucaccgccgucggcaaggaguucaaccaccucgagaagcgcaucgagaaccucaacaagaaggucgacgacggcuuccucgacaucuggaccuacaacgccgagcuccucguccuccucgagaacgagcgcacccucgacuaccacgacuccaacgucaagaaccucuacgagaagguccgcaaccagcucaagaacaacgccaaggagaucggcaacggcugcuucgaguucuaccacaagugcgacaacaccugcauggaguccgucaagaacggcaccuacgacuaccccaaguacuccgaggaggccaagcucaaccgcgaggagaucgacggcgucaagcucgaguccacccgcaucuaccagauccucgccaucuacuccaccgccgccuccucccucguccucgucgucucccucggcgccaucuccuucuggaugugcuccaacggcucccuccagugccgcaucugcaucuga

SEQ ID NO: 106476 - RNA, 1701 nt, Artificial Sequence
  derived and/or modified CDS sequence (opt2) from hemagglutinin__InfluenzaA__AGU92711
augaaggccauccucgucguccuccucuacaccuucgccaccgccaacgccgacacccucugcaucggcuaccacgccaacaacuccaccgacaccgucgacaccguccucgagaagaacgucaccgucacccacuccgucaaccuccucgaggacaagcacaacggcaagcucugcaagcuccgcggcgucgccccccuccaccucggcaagugcaacaucgccggcuggauccucggcaaccccgagugcgagucccucuccaccgccuccuccugguccuacaucgucgagaccuccuccuccgacaacggcaccugcuaccccggcgacuucaucgacuacgaggagcuccgcgagcagcucuccuccgucuccuccuucgagcgcuucgagaucuuccccaagaccuccuccuggcccaaccacgacuccaacaagggcgucaccgccgccugcccccacgccggcgccaaguccuucuacaagaaccucaucuggcucgucaagcagggcaacuccuaccccaagcucuccaaguccuacaucaacgacaagggcaaggagguccucguccucuggggcauccaccaccccuccaccuccgccgaccagcagucccucuaccagaacgccgacgccuacgucuucgucggcuccucccgcuacuccaagaaguucaagcccgagaucgccauccgccccaagguccgcgaccaggagggccgcaugaacuacuacuggacccucgucgagcccggcgacaagaucaccuucgaggccaccggcaaccucgucgucccccgcuacgccuucgccauggagcgcaacgccggcuccggcaucaucaucuccgacacccccguccacgacugcaacaccaccugccagacccccaagggcgccaucaacaccucccuccccuuccagaacauccaccccaucaccaucggcaagugccccaaguacgucaaguccaccaagcuccgccucgccaccggccuccgcaacguccccuccauccagucccgcggccucuucggcgccaucgccggcuucaucgagggcggcuggaccggcauggucgacggcugguacggcuaccaccaccagaacgagcagggcuccggcuacgccgccgaccucaaguccacccagaacgccaucgacgagaucaccaacaaggucaacuccgucaucgagaagaugaacacccaguucaccgccgucggcaaggaguucaaccaccucgagaagcgcaucgagaaccucaacaagaaggucgacgacggcuuccucgacaucuggaccuacaacgccgagcuccucguccuccucgagaacgagcgcacccucgacuaccacgacuccaacgucaagaaccucuacgagaagguccgcucccagcucaagaacaacgccaaggagaucggcaacggcugcuucgaguucuaccacaagugcgacaacaccugcauggaguccgucaagaacggcaccuacgacuaccccaaguacuccgaggaggccaagcucaaccgcgaggagaucgacggcgucaagcucgaguccacccgcaucuaccagauccucgccaucuacuccaccgucgccuccucccucguccucgucgucucccucggcgccaucuccuucuggaugugcuccaacggcucccuccagugccgcaucugcaucuga

SEQ ID NO: 106477 - RNA, 1701 nt, Artificial Sequence
  derived and/or modified CDS sequence (opt2) from hemagglutinin__InfluenzaA__AGU92722
augaaggccauccucgucguccuccucuacaccuucgccaccgccaacgccgacacccucugcaucggcuaccacgccaacaacuccaccgacaccgucgacaccguccucgagaagaacgucaccgucacccacuccgucaaccuccucgaggacaagcacaacggcaagcucugcaagcuccgcggcgucgccccccuccaccucggcaagugcaacaucgccggcuggauccucggcaaccccgagugcgagucccucuccaccgccuccuccugguccuacaucgucgagaccuccuccuccgacaacggcaccugcuaccccggcgacuucaucgacuacgaggagcuccgcgagcagcucuccuccgucuccuccuucgagcgcuucgagaucuuccccaagaccuccuccuggcccaaccacgacuccgacaagggcgucaccgccgccugcccccacgccggcgccaaguccuucuacaagaaccucaucuggcucgucaagaagggcaacuccuaccccaagcucuccaaguccuacaucaacgacaagggcaaggagguccucguccucuggggcauccaccaccccuccaccuccgccgaccagcagucccucuaccagaacgccgacgccuacgucuucgucggcuccucccgcuacuccaagaaguucaagcccgagaucgccauccgccccaagguccgcgaccaggagggccgcaugaacuacuacuggacccucgucgagcccggcgacaagaucaccuucgaggccaccggcaaccucgucgucccccgcuacgccuucgccauggagcgcaacgccggcuccggcaucaucaucuccgacacccccguccacgacugcaacaccaccugccagacccccaagggcgccaucaacaccucccuccccuuccagaacauccaccccaucaccaucggcaagugccccaaguacgucaaguccaccaagcuccgccucgccaccggccuccgcaacguccccuccauccagucccgcggccucuucggcgccaucgccggcuucaucgagggcggcuggaccggcauggucgacggcugguacggcuaccaccaccagaacgagcagggcuccggcuacgccgccgaccucaaguccacccagaacgccaucgacgagaucaccaacaaggucaacuccgucaucgagaagaugaacacccaguucaccgccgucggcaaggaguucaaccaccucgagaagcgcaucgagaaccucaacaagaaggucgacgacggcuuccucgacaucuggaccuacaacgccgagcuccucguccuccucgagaacgagcgcacccucgacuaccacgacuccaacgucaagaaccucuacgagaagguccgcucccagcucaagaacaacgccaaggagaucggcaacggcugcuucgaguucuaccacaagugcgacaacaccugcauggaguccgucaagaacggcaccuacgacuaccccaaguacuccgaggaggccaagcucaaccgcgaggagaucgacggcgucaagcucgaguccacccgcaucuaccagauccucgccaucuacuccaccgucgccuccucccucguccucgucgucucccucggcgccaucuccuucuggaugugcuccaacggcucccuccagugccgcaucugcaucuga

SEQ ID NO: 106478 - RNA, 1701 nt, Artificial Sequence; identical to SEQ ID NO: 106477
  derived and/or modified CDS sequence (opt2) from hemagglutinin__InfluenzaA__AGU92733

SEQ ID NO: 106479 - RNA, 1701 nt, Artificial Sequence
  derived and/or modified CDS sequence (opt2) from hemagglutinin__InfluenzaA__AGU92744
augaaggccauccucgucguccuccucuacaccuucgccaccgccaacgccgacacccucugcaucggcuaccacgccaacaacuccaccgacaccgucgacaccguccucgagaagaacgucaccgucacccacuccgucaaccuccucgaggacaagcacaacggcaagcucugcaagcuccgcggcgucgccccccuccaccucggcaagugcaacaucgccggcuggauccucggcaaccccgagugcgagucccucuccaccgccuccuccugguccuacaucgucgagaccuccuccuccgacaacggcaccugcuaccccggcgacuucaucgacuacgaggagcuccgcgagcagcucuccuccgucuccuccuucgagcgcuucgagaucuuccccaagaccuccuccuggcccaaccacgacuccgacaagggcgucaccgccgccugcccccacgccggcgccaaguccuucuacaagaaccucaucuggcucgucaagaagggcaacuccuaccccaagcucuccaaguccuacaucaacgacaagggcaaggagguccucguccucuggggcauccaccaccccuccaccuccgccgaccagcagucccucuaccagaacgccgacgccuacgucuucgucggcuccucccgcuacuccaagaaguucaagcccgagaucgccauccgccccaagguccgcgaccaggagggccgcaugaacuacuacuggacccucgucgagcccggcgacaagaucaccuucgaggccaccggcaaccucgucgucccccgcuacgccuucgccauggagcgcaacgccggcuccggcaucaucaucuccgacacccccguccacgacugcaacaccaccugccagacccccaagggcgccaucaacaccucccuccccuuccagaacauccaccccaucaccaucggcaagugccccaaguacgucaaguccaccaagcuccgccucgccaccggccuccgcaacguccccuccauccagucccgcggccucuucggcgccaucgccggcuucaucgagggcggcuggaccggcauggucgacggcugguacggcuaccaccaccagaacgagcagggcuccggcuacgccgccgaccucaaguccacccagaacgccaucgacgagaucaccaacaaggucaacuccgucaucgagaagaugaacacccaguucaccgccgucggcaaggaguucaaccaccucgagaagcgcaucgagaaccucaacaagaaggucgacgacggcuuccucgacaucuggaccuacaacgccgagcuccucguccuccucgagaacgagcgcacccucgacuaccacgacuccaacgucaagaaccucuacgagaagguccgcucccagcucaagaacaacgccaaggagaucggcaacggcugcuucgaguucuaccacaagugcgacaacaccugcauggaguccgucaagaacggcgccuacgacuaccccaaguacuccgaggaggccaagcucaaccgcgaggagaucgacggcgucaagcucgaguccacccgcaucuaccagauccucgccaucuacuccaccgucgccuccucccucguccucgucgucucccucggcgccaucuccuucuggaugugcuccaacggcucccuccagugccgcaucugcaucuga

SEQ ID NO: 106480 - RNA, 1701 nt, Artificial Sequence
  derived and/or modified CDS sequence (opt2) from hemagglutinin__InfluenzaA__AGU92755
augaaggccauccucgucguccuccucuacaccuucgccaccgccaacgccgacacccucugcaucggcuaccacgccaacaacuccaccgacaccgucgacaccguccucgagaagaacgucaccgucacccacuccgucaaccuccucgaggacaagcacaacggcaagcucugcaagcuccgcggcgucgccccccuccaccucggcaagugcaacaucgccggcuggauccucggcaaccccgagugcgagucccucuccaccgccuccuccugguccuacaucgucgagaccuccuccuccgacaacggcaccugcuaccccggcgacuucaucgacuacgaggagcuccgcgagcagcucuccuccgucuccuccuucgagcgcuucgagaucuuccccaagaccuccuccuggcccaaccacgacuccaacaagggcgucaccgccgccugcccccacgccggcgccaaguccuucuacaagaaccucaucuggcucgucaagaagggcaacuccuaccccaagcucuccaaguccuacaucaacgacaagggcaaggagguccucguccucuggggcauccaccaccccuccaccuccgccgaccagcagucccucuaccagaacgccgacgccuacgucuucgucggcuccucccgcuacuccaaggaguucaagcccgagaucgccauccgccccaagguccgcgaccaggagggccgcaugaacuacuacuggacccucgucgagcccggcgacaagaucaccuucgaggccaccggcaaccucgucgucccccgcuacgccuucgccauggagcgcaacgccggcuccggcaucaucaucuccgacacccccguccacgacugcaacaccaccugccagacccccaagggcgccaucaacaccucccuccccuuccagaacauccaccccaucaccaucggcaagugccccaaguacgucaaguccaccaagcuccgccucgccaccggccuccgcaacguccccuccauccagucccgcggccucuucggcgccaucgccggcuucaucgagggcggcuggaccggcauggucgacggcugguacggcuaccaccaccagaacgagcagggcuccggcuacgccgccgaccucaaguccacccagaacgccaucgacgagaucaccaacaaggucaacuccgucaucgagaagaugaacacccaguucaccgccgucggcaaggaguucaaccaccucgagaagcgcaucgagaaccucaacaagaaggucgacgacggcuuccucgacaucuggaccuacaacgccgagcuccucguccuccucgagaacgagcgcacccucgacuaccacgacuccaacgucaagaaccucuacgagaagguccgcucccagcucaagaacaacgccaaggagaucggcaacggcugcuucgaguucuaccacaagugcgacaacaccugcauggaguccgucaagaacggcaccuacgacuaccccaaguacuccgaggaggccaagcucaaccgcgaggagaucgacggcgucaagcucgaguccacccgcaucuaccagauccucgccaucuacuccaccgucgccuccucccucguccucgucgucucccucggcgccaucuccuucuggaugugcuccaacggcucccuccagugccgcaucugcaucuga

SEQ ID NO: 106481 - RNA, 1701 nt, Artificial Sequence
  derived and/or modified CDS sequence (opt2) from hemagglutinin__InfluenzaA__AGU92766
augaaggccauccucgucguccuccucuacaccuucgccaccgccaacgccgacacccucugcaucggcuaccacgccaacaacuccaccgacaccgucgacaccguccucgagaagaacgucaccgucacccacuccgucaaccuccucgaggacaagcacaacggcaagcucugcaagcuccgcggcgucgccccccuccaccucggcaagugcaacaucgccggcuggauccucggcaaccccgagugcgagacccucuccaccgccuccuccugguccuacaucgucgagaccuccuccuccgacaacggcaccugcuaccccggcgacuucaucgacuacgaggagcuccgcgagcagcucuccuccgucuccuccuucgagcgcuucgagaucuuccccaagaccuccuccuggcccaaccacgaguccaacaagggcgucaccgccgccugcccccacgccggcgccaagggcuucuacaagaaccucaucuggcucgucaagaagggcaacuccuaccccaagcucuccaaguccuacaucaacgacaagggcaaggagguccucguccucuggggcauccaccaccccuccaccaccgccgaccagcagucccucuaccagaacgccgacgccuacgucuucgucggcaccucccgcuacuccaagaaguucaagcccgagaucgccacccgccccaagguccgcgaccaggagggccgcaugaacuacuacuggacccucgucgagcccggcgacaagaucaccuucgaggccaccggcaaccucgucgucccccgcuacgccuucgccauggagcgcgacgccggcuccggcaucaucaucuccgacacccccguccacgacugcaacaccaccugccagacccccaagggcgccaucaacaccucccuccccuuccagaacauccaccccaucaccaucggcaagugccccaaguacgucaaguccaccaagcuccgccucgccaccggccuccgcaacguccccuccauccagucccgcggccucuucggcgccaucgccggcuucaucgagggcggcuggaccggcauggucgacggcugguacggcuaccaccaccagaacgagcagggcuccggcuacgccgccgaccucaaguccacccagaacgccaucgacaagaucaccaacaaggucaacuccgucaucgagaagaugaacacccaguucaccgccgucggcaaggaguucaaccaccucgagaagcgcaucgagaaccucaacaagaaggucgacgacggcuuccucgacaucuggaccuacaacgccgagcuccucguccuccucgagaacgagcgcacccucgacuaccacgacuccaacgucaagaaccucuacgagaagguccgcaaccagcucaagaacaacgccaaggagaucggcaacggcugcuucgaguucuaccacaagugcgacaacaccugcauggaguccgucaagaacggcaccuacgacuaccccaaguacuccgaggaggccaagcucaaccgcgaggagaucgacggcgucaagcucgaguccacccgcaucuaccagauccucgccaucuacuccaccgccgccuccucccucguccucgucgucucccucggcgccaucuccuucuggaugugcuccaacggcucccuccagugccgcaucugcaucuga

SEQ ID NO: 106482 - RNA, 1701 nt, Artificial Sequence
  derived and/or modified CDS sequence (opt2) from hemagglutinin__InfluenzaA__AGU92777
augaaggccauccucgucguccuccucuacaccuucgccaccgccaacgccgacacccucugcaucggcuaccacgccaacaacuccaccgacaccgucgacaccguccucgagaagaacgucaccgucacccacuccgucaaccuccucgaggacaagcacaacggcaagcucugcaagcuccgcggcgucgccccccuccaccucggcaagugcaacaucgccggcuggauccucggcaaccccgagugcgagacccucuccaccgccuccuccugguccuacaucgucgagaccuccuccuccgacaacggcaccugcuaccccggcgacuucaucgacuacgaggagcuccgcgagcagcucuccuccgucuccuccuucgagcgcuucgagaucuuccccaagaccuccuccuggcccaaccacgaguccaacaagggcgucaccgccgccugcccccacgccggcgccaagggcuucuacaagaaccucaucuggcucgucaagaagggcaacuccuaccccaagcucuccaaguccuacaucaacgacaagggcaaggagguccucguccucuggggcauccaccaccccuccaccaccgccgaccagcaguccaucuaccagaacgccgacaccuacgucuucgucggcaccucccgcuacuccaagaaguucaagcccgagaucgccacccgccccaagguccgcgaccaggagggccgcaugaacuacuacuggacccucgucgagcccggcgacaagaucaccuucgaggccaccggcaaccucgucgucccccgcuacgccuucgccauggagcgcgacgccggcuccggcaucaucaucuccgacacccccguccacgacugcaacaccaccugccagacccccaagggcgccaucaacaccucccuccccuuccagaacauccaccccaucaccaucggcaagugccccaaguacgucaaguccaccaagcuccgccucgccaccggccuccgcaacguccccuccauccagucccgcggccucuucggcgccaucgccggcuucaucgagggcggcuggaccggcauggucgacggcugguacggcuaccaccaccagaacgagcagggcuccggcuacgccgccgaccucaaguccacccagaacgccaucgacaagaucaccaacaaggucaacuccgucaucgagaagaugaacacccaguucaccgccgucggcaaggaguucaaccaccucgagaagcgcaucgagaaccucaacaagaaggucgacgacggcuuccucgacaucuggaccuacaacgccgagcuccucguccuccucgagaacgagcgcacccucgacuaccacgacuccaacgucaagaaccucuacgagaagguccgcaaccagcucaagaacaacgccaaggagaucggcaacggcugcuucgaguucuaccacaagugcgacaacaccugcauggaguccgucaagaacggcaccuacgacuaccccaaguacuccgaggaggccaagcucaaccgcgaggagaucgacggcgucaagcucgaguccacccgcaucuaccagauccucgccaucuacuccaccgccgccuccucccucguccucgucgucucccucggcgccaucuccuucuggaugugcuccaacggcucccuccagugccgcaucugcaucuga

SEQ ID NO: 106483 - RNA, 1701 nt, Artificial Sequence
  derived and/or modified CDS sequence (opt2) from hemagglutinin__InfluenzaA__AGU92788
augaaggccauccucgucguccuccucuacaccuucgccaccgccaacgccgacacccucugcaucggcuaccacgccaacaacuccaccgacaccgucgacaccguccucgagaagaacgucaccgucacccacuccgucaaccuccucgaggacaagcacaacggcaagcucugcaagcuccgcggcgucgccccccuccaccucggcaagugcaacaucgccggcuggauccucggcaaccccgagugcgagacccucuccaccgccuccuccugguccuacaucgucgagaccuccuccuccgacaacggcaccugcuaccccggcgacuucaucgacuacgaggagcuccgcgagcagcucuccuccgucuccuccuucgagcgcuucgagaucuuccccaagaccuccuccuggcccaaccacgacuccgacaagggcgucaccgccgccugcccccacgccggcgccaagggcuucuacaagaaccucaucuggcucgucaagaagggcaacuccuaccccaagcucuccaaguccuacaucaacgacaagggcaaggagguccucguccucuggggcauccaccaccccuccaccaccgccgaccagcagucccucuaccagaacgccgacgccuacgucuucgucggcaccucccgcuacuccaagaaguucaagcccgagaucgccacccgccccaagguccgcgaccgcgagggccgcaugaacuacuacuggacccucgucgagcccggcgacaagaucaccuucgaggccaccggcaaccucgucgucccccgcuacgccuucgccauggagcgcgacgccggcuccggcaucaucaucuccgacacccccguccacgacugcaacaccaccugccagacccccaagggcgccaucaacaccucccuccccuuccagaacauccaccccaucaccaucggcaagugccccaaguacgucaaguccaccaagcuccgccucgccaccggccuccgcaacguccccuccauccagucccgcggccucuucggcgccaucgccggcuucaucgagggcggcuggaccggcaugcucgacggcugguacggcuaccaccaccagaacgagcagggcuccggcuacgccgccgaccucaaguccacccagaacgccaucgacaagaucaccaacaaggucaacuccgucaucgagaagaugaacacccaguucaccgccgucggcaaggaguucaaccaccucgagaagcgcaucgagaaccucaacaagaaggucgacgacggcuuccucgacaucuggaccuacaacgccgagcuccucguccuccucgagaacgagcgcacccucgacuaccacgacuccaacgucaagaaccucuacgagaagguccgcaaccagcucaagaacaacgccaaggagaucggcaacggcugcuucgaguucuaccacaagugcgacaacaccugcauggaguccgucaagaacggcaccuacgacuaccccaaguacuccgaggaggccaagcucaaccgcgaggagaucgacggcgucaagcucgaguccacccgcaucuaccagauccucgccaucuacuccaccgccgccuccucccucguccucgucgucucccucggcgccaucuccuucuggaugugcuccaacggcucccuccagugccgcaucugcaucuga

SEQ ID NO: 106484 - RNA, 1701 nt, Artificial Sequence
  derived and/or modified CDS sequence (opt2) from hemagglutinin__InfluenzaA__AGU92799
augaaggccauccucgucguccuccucuacaccuucgccaccgccaacgccgacacccucugcaucggcuaccacgccaacaacuccaccgacaccgucgacaccguccucgagaagaacgucaccgucacccacuccgucaaccuccucgaggacaagcacaacggcaagcucugcaagcuccgcggcgucgccccccuccaccucggcaagugcaacaucgccggcuggauccucggcaaccccgagugcgagacccucuccaccgccuccuccugguccuacaucgucgagaccuccuccuccgacaacggcaccugcuaccccggcgacuucaucgacuacgaggagcuccgcgagcagcucuccuccgucuccuccuucgagcgcuucgagaucuuccccaagaccuccuccuggcccgaccacgacuccaacaagggcgucaccgccgccugcccccacgccggcgccaagggcuucuacaagaaccucaucuggcucgucaagaagggcaacuccuaccccaagcucuccaaguccuacaucaacgacaagggcaaggagguccucguccucuggggcauccaccaccccuccaccaccgccgaccagcagucccucuaccagaacgccgacgccuacgucuucgucggcaccucccgcuacuccaagaaguucaagcccgagaucgccacccgccccaagguccgcgaccgcgagggccgcaugaacuacuacuggacccucgucgagcccggcgacaagaucaccuucgaggccaccggcaaccucgucgucccccgcuacgccuucgccauggagcgcgacgccggcuccggcaucaucaucuccgacacccccguccacgacugcaacaccaccugccagacccccaagggcgccaucaacaccucccuccccuuccagaacauccaccccaucaccaucggcaagugccccaaguacgucaaguccaccaagcuccgccucgccaccggccuccgcaacguccccuccauccagucccgcggccucuucggcgccaucgccggcuucaucgagggcggcuggaccggcauggucgacggcugguacggcuaccaccaccagaacgagcagggcuccggcuacgccgccgaccucaaguccacccagaacgccaucgacaagaucaccaacaaggucaacuccgucaucgagaagaugaacacccaguucaccgccgucggcaaggaguucaaccaccucgagaagcgcaucgagaaccucaacaagaaggucgacgacggcuuccucgacaucuggaccuacaacgccgagcuccucguccuccucgagaacgagcgcacccucgacuaccacgacuccaacgucaagaaccucuacgagaagguccgcaaccagcucaagaacaacgccaaggagaucggcaacggcugcuucgaguucuaccacaagugcgacaacaccugcauggaguccgucaagaacggcaccuacgacuaccccaaguacuccgaggaggccaagcucaaccgcgaggagaucgacggcgucaagcucgaguccacccgcaucuaccagauccucgccaucuacuccaccgccgccuccucccucguccucgucgucucccucggcgccaucuccuucuggaugugcuccaacggcucccuccagugccgcaucugcaucuga

SEQ ID NO: 106485 - RNA, 1701 nt, Artificial Sequence
  derived and/or modified CDS sequence (opt2) from hemagglutinin__InfluenzaA__AGU92821
augaaggccauccucgucguccuccucuacaccuucgccaccgccaacgccgacacccucugcaucggcuaccacgccaacaacuccaccgacaccgucgacaccguccucgagaagaacgucaccgucacccacuccgucaaccuccucgaggacaagcacaacggcaagcucugcaagcuccgcggcgucgccccccuccaccucggcaagugcaacaucgccggcuggauccucggcaaccccgagugcgagacccucuccaccgccuccuccugguccuacaucgucgagaccuccuccuccgacaacggcaccugcuaccccggcgacuucaucgacuacgaggagcuccgcgagcagcucuccuccgucuccuccuucgagcgcuucgagaucuuccccaagaccuccuccuggcccaaccacgacuccaacaagggcgucaccgccgccugcccccacgccggcgccaagggcuucuacaagaaccucaucuggcucgucaagaagggcaacuccuaccccaagcucuccaaguccuacaucaacgacaagggcaaggagguccucguccucuggggcauccaccaccccuccaccaccgccgaccagcagucccucuaccagaacgccgacaccuacgucuucgucggcaccucccgcuacuccaagauguucaagcccgagaucgccacccgccccaagguccgcgaccgcgagggccgcaugaacuacuacuggacccucgucgagcccggcgacaagaucaccuucgaggccaccggcaaccucgucgucccccgcuacgccuucgccauggagcgcgacgccggcuccggcaucaucaucuccgacacccccguccacgacugcaacaccaccugccagacccccaagggcgccaucaacaccucccuccccuuccagaacauccaccccaucaccaucggcaagugccccaaguacgucaaguccaccaagcuccgccucgccaccggccuccgcaacguccccuccauccagucccgcggccucuucggcgccaucgccggcuucaucgagggcggcuggaccggcauggucgacggcugguacggcuaccaccaccagaacgagcagggcuccggcuacgccgccgaccucaaguccacccagaacgccaucgacaagaucaccaacaaggucaacuccgucaucgagaagaugaacacccaguucaccgccgucggcaaggaguucaaccaccucgagaagcgcaucgagaaccucaacaagaaggucgacgacggcuuccucgacaucuggaccuacaacgccgagcuccucguccuccucgagaacgagcgcacccucgacuaccacgacuccaacgucaagaaccucuacgagaagguccgcaaccagcucaagaacaacgccaaggagaucggcaacggcugcuucgaguucuaccacaagugcgacaacaccugcauggaguccgucaagaacggcaccuacgacuaccccaaguacuccgaggaggccaagcucaaccgcgaggagaucgacggcgucaagcucgaguccacccgcaucuaccagauccucgccaucuacuccaccgccgccuccucccucguccucgucgucucccucggcgccaucuccuucuggaugugcuccaacggcucccuccagugccgcaucugcaucuga

SEQ ID NO: 106486 - RNA, 1701 nt, Artificial Sequence
  derived and/or modified CDS sequence (opt2) from hemagglutinin__InfluenzaA__AGU92843
augaaggccauccucgucguccuccucuacaccuucgccaccgccaacgccgacacccucugcaucggcuaccacgccaacaacuccaccgacaccgucgacaccguccucgagaagaacgucaccgucacccacuccgucaaccuccucgaggacaagcacaacggcaagcucugcaagcuccgcggcgucgccccccuccaccucggcaagugcaacaucgccggcuggauccucggcaaccccgagugcgagucccucuccaccgccuccuccugguccuacaucgucgagaccuccuccuccgacaacggcaccugcuaccccggcgacuucaucgacuacgaggagcuccgcgagcagcucuccuccgucuccuccuucgagcgcuucgagaucuuccccaagaccuccuccuggcccaaccacgacuccaacaagggcgucaccgccgccugcccccacgccggcgccaaguccuucuacaagaaccucaucuggcucgucaagaagggcgacuccuaccccaagcucuccaaguccuacaucaacgacaagggcaaggagguccucguccucuggggcauccaccaccccuccaccuccgccgaccagcagucccucuaccagaacgccgacgccuacgucuucgucggcuccucccgcuacuccaagaaguucaagcccgagaucgccauccgccccaagguccgcgaccgcgagggccgcaugaacuacuacuggacccucgucgagcccggcgacaagaucaccuucgaggccaccggcaaccucgucgucccccgcuacgccuucgccauggagcgcaacgccggcuccggcaucaucaucuccgacacccccguccacgacugcaacaccaccugccagacccccaagggcgccaucaacaccucccuccccuuccagaacauccaccccaucaccaucggcaagugccccaaguacgucaaguccaccaagcuccgccucgccaccggccuccgcaacguccccuccauccagucccgcggccucuucggcgccaucgccggcuucaucgagggcggcuggaccggcauggucgacggcugguacggcuaccaccaccagaacgagcagggcuccggcuacgccgccgaccucaaguccacccagaacgccaucgacgagaucaccaacaaggucaacuccgucaucgagaagaugaacacccaguucaccgccgucggcaaggaguucaaccaccucgagaagcgcaucgagaaccucaacaagaaggucgacgacggcuuccucgacaucuggaccuacaacgccgagcuccucguccuccucgagaacgagcgcacccucgacuaccacgacuccaacgucaagaaccucuacgagaagguccgcucccagcucaagaacaacgccaaggagaucggcaacggcugcuucgaguucuaccacaagugcgacaacaccugcauggaguccgucaagaacggcaccuacgacuaccccaaguacuccgaggaggccaagcucaaccgcgaggagaucgacggcgucaagcucgaguccacccgcaucuaccagauccucgccaucuacuccaccgucgccuccucccucguccucgucgucucccucggcgccaucuccuucuggaugugcuccaacggcucccuccagugccgcaucugcaucuga

SEQ ID NO: 106487 - RNA, 1710 nt, Artificial Sequence
  derived and/or modified CDS sequence (opt2) from hemagglutinin__InfluenzaA__AGU92854
augaaggccauccucgucguccuccucuacaccuucgccaccgccaacgccgacacccucugcaucggcuaccacgccaacaacuccaccgacaccgucgacaccguccucgagaagaacgucaccgucacccacuccgucaaccuccucgaggacaagcacaacggcaagcucugcaagcuccgcggcgucgccccccuccaccucggcaagugcaacaucgccggcuggauccucggcaaccccgagugcgagucccucuccaccgccuccuccugguccuacaucgucgagaccuccuccuccgacaacggcaccugcuaccccggcgacuucaucgacuacgaggagcuccgcgagcagcucuccuccgucuccuccuucgagcgcuucgagaucuuccccaagaccuccuccuggcccaaccacgacuccgacaagggcgucaccgccgccugcccccacgccggcgccaaguccuucuacaagaaccucaucuggcucgucaagaagggcaacuccuaccccaagcucuccaaguccuacaucaacgacaagggcaaggagguccucguccucuggggcauccaccaccccuccaccuccgccgaccagcagucccucuaccagaacgccgacgccuacgucuucgucggcuccucccgcuacuccaagaaguucaagcccgagaucgccauccgccccaagguccgcgaccgcgagggccgcaugaacuacuacuggacccucgucgagcccggcgacaagaucaccuucgaggccaccggcaaccucgucgucccccgcuacgccuucgccauggagcgcaacgccggcuccggcaucaucaucuccgacacccccguccacgacugcaacaccaccugccagacccccaagggcgccaucaacaccucccucaccucccuccccuuccagaacauccaccccaucaccaucggcaagugccccaaguacgucaaguccaccaagcuccgccucgccaccggccuccgcaacguccccuccauccagucccgcggccucuucggcgccaucgccggcuucaucgagggcggcuggaccggcauggucgacggcugguacggcuaccaccaccagaacgagcagggcuccggcuacgccgccgaccucaaguccacccagaacgccaucgacgagaucaccaacaaggucaacuccgucaucgagaagaugaacacccaguucaccgccgucggcaaggaguucaaccaccucgagaagcgcaucgagaaccucaacaagaaggucgacgacggcuuccucgacaucuggaccuacaacgccgagcuccucguccuccucgagaacgagcgcacccucgacuaccacgacuccaacgucaagaaccucuacgagaagguccgcucccagcucaagaacaacgccaaggagaucggcaacggcugcuucgaguucuaccacaagugcgacaacaccugcauggaguccgucaagaacggcaccuacgacuaccccaaguacuccgaggaggccaagcucaaccgcgaggagaucgacggcgucaagcucgaguccacccgcaucuaccagauccucgccaucuacuccaccgucgccuccucccucguccucgucgucucccucggcgccaucuccuucuggaugugcuccaacggcucccuccagugccgcaucugcaucuga

SEQ ID NO: 106488 - RNA, 1701 nt, Artificial Sequence
  derived and/or modified CDS sequence (opt2) from hemagglutinin__InfluenzaA__AGU92887
augaaggccauccucgucguccuccucuacaccuucgccaccgccaacgccgacacccucugcaucggcuaccacgccaacaacuccaccgacaccgucgacaccguccucgagaagaacgucaccgucacccacuccgucaaccuccucgaggacaagcacaacggcaagcucugcaagcuccgcggcgucgccccccuccaccucggcaagugcaacaucgccggcuggauccucggcaaccccgagugcgagucccucuccaccgccuccuccugguccuacaucgucgagaccuccuccuccgacaacggcaccugcuaccccggcgacuucaucgacuacgaggagcuccgcgagcagcucuccuccgucuccuccuucgagcgcuucgagaucuuccccaagaccuccuccuggcccaaccacgacuccaacaagggcgucaccgccgccugcccccacgccggcgccaaguccuucuacaagaaccucaucuggcucgucaagaagggcaacuccuaccccaagcucuccaaguccuacaucaacgacaagggcaaggagguccucguccucuggggcauccaccaccccuccaccuccgacgaccagcagucccucuaccagaacgccgacgccuacgucuucgucggcuccucccgcuacuccaagaaguucaagcccgagaucgccauccgccccaagguccgcgaccgcgagggccgcaugaacuacuacuggacccucgucgagcccggcgacaagaucaccuucgaggccaccggcaaccucgucgucccccgcuacgccuucgccauggagcgcaacgccggcuccggcaucaucaucuccgacacccccguccacgacugcaacaccaccugccagacccccaagggcgccaucaacaccucccuccccuuccagaacauccaccccaucaccaucggcaagugccccaaguacgucaaguccaccaagcuccgccucgccaccggccuccgcaacguccccuccauccagucccgcggccucuucggcgccaucgccggcuucaucgagggcggcuggaccggcauggucgacggcugguacggcuaccaccaccagaacgagcagggcuccggcuacgccgccgaccucaaguccacccagaacgccaucgacgagaucaccaacaaggucaacuccgucaucgagaagaugaacacccaguucaccgccgucggcaaggaguucaaccaccucgagaagcgcaucgagaaccucaacaagaaggucgacgacggcuuccucgacaucuggaccuacaacgccgagcuccucguccuccucgagaacgagcgcacccucgacuaccacgacuccaacgucaagaaccucuacgagaagguccgcucccagcucaagaacaacgccaaggagaucggcaacggcugcuucgaguucuaccacaagugcgacaacaccugcauggaguccgucaagaacggcaccuacgacuaccccaaguacuccgaggaggccaagcucaaccgcgaggagaucgacggcgucaagcucgaguccacccgcaucuaccagauccucgccaucuacuccaccgucgccuccucccucguccucgucgucucccucggcgccaucuccuucuggaugugcuccaacggcucccuccagugccgcaucugcaucuga

SEQ ID NO: 106489 - RNA, 1701 nt, Artificial Sequence; identical to SEQ ID NO: 106473
  derived and/or modified CDS sequence (opt2) from hemagglutinin__InfluenzaA__AGU92898

SEQ ID NO: 106490 - RNA, 1701 nt, Artificial Sequence; identical to SEQ ID NO: 106474
  derived and/or modified CDS sequence (opt2) from hemagglutinin__InfluenzaA__AGU92909

SEQ ID NO: 106491 - RNA, 1701 nt, Artificial Sequence; identical to SEQ ID NO: 106476
  derived and/or modified CDS sequence (opt2) from hemagglutinin__InfluenzaA__AGU92931

SEQ ID NO: 106492 - RNA, 1701 nt, Artificial Sequence; identical to SEQ ID NO: 106477
  derived and/or modified CDS sequence (opt2) from hemagglutinin__InfluenzaA__AGU92942

SEQ ID NO: 106493 - RNA, 1701 nt, Artificial Sequence; identical to SEQ ID NO: 106477
  derived and/or modified CDS sequence (opt2) from hemagglutinin__InfluenzaA__AGU92953

SEQ ID NO: 106494 - RNA, 1701 nt, Artificial Sequence
  derived and/or modified CDS sequence (opt2) from hemagglutinin__InfluenzaA__AGU92964
augaaggccauccucgucguccuccucuacaccuucgccaccgccaacgccgacacccucugcaucggcuaccacgccaacaacuccaccgacaccgucgacaccguccucgagaagaacgucaccgucacccacuccgucaaccuccucgaggacaagcacaacggcaagcucugcaagcuccgcggcgucgccccccuccaccucggcaagugcaacaucgccggcuggauccucggcaaccccgagugcgagacccucuccaccgccuccuccugguccuacaucgucgagaccuccuccuccgacaacggcaccugcuaccccggcgacuucaucgacuacgaggagcuccgcgagcagcucuccuccgucuccuccuucgagcgcuucgagaucuuccccaagaccuccuccuggcccaaccacgacuccaacaagggcgucaccgccgccugcccccacgccggcgccaagggcuucuacaagaaccucaucuggcucgucaagaagggcaacuccuaccccaagcucuccaaguccuacaucaacgacaagggcaaggagguccucguccucuggggcauccaccaccccuccaccaccgccgaccagcagucccucuaccagaacgccgacgccuacgucuucgucggcaccucccgcuacuccaagaaguucaagcccgagaucgccacccgccccaagguccgcgaccgcgagggccgcaugaacuacuacuggacccucgucgagcccggcgacaagaucaccuucgaggccaccggcaaccucgucgucccccgcuacgccuucgccauggagcgcgacgccggcuccggcaucaucaucuccgacacccccguccacgacugcaacaccaccugccagacccccaagggcgccaucaacaccucccuccccuuccagaacauccaccccaucaccaucggcaagugccccaaguacgucaaguccaccaagcuccgccucgccaccggccuccgcaacguccccuccauccagucccgcggccucuucggcgccaucgccggcuucaucgagggcggcuggaccggcaugcucgacggcugguacggcuaccaccaccagaacgagcagggcuccggcuacgccgccgaccucaaguccacccagaacgccaucgacaagaucaccaacaaggucaacuccgucaucgagaagaugaacacccaguucaccgccgucggcaaggaguucaaccaccucgagaagcgcaucgagaaccucaacaagaaggucgacgacggcuuccucgacaucuggaccuacaacgccgagcuccucguccuccucgagaacgagcgcacccucgacuaccacgacuccaacgucaagaaccucuacgagaagguccgcaaccagcucaagaacaacgccaaggagaucggcaacggcugcuucgaguucuaccacaagugcgacaacaccugcauggaguccgucaagaacggcaccuacgacuaccccaaguacuccgaggaggccaagcucaaccgcgaggagaucgacggcgucaagcucgaguccacccgcaucuaccagauccucgccaucuacuccaccgccgccuccucccucguccucgucgucucccucggcgccaucuccuucuggaugugcuccaacggcucccuccagugccgcaucugcaucuga

SEQ ID NO: 106495 - RNA, 1701 nt, Artificial Sequence
  derived and/or modified CDS sequence (opt2) from hemagglutinin__InfluenzaA__AGU92975
augaaggccauccucgucguccuccucuacaccuucgccaccgccaacgccgacacccucugcaucggcuaccacgccaacaacuccaccgacaccgucgacaccguccucgagaagaacgucaccgucacccacuccgucaaccuccucgaggacaagcacaacggcaagcucugcaagcuccgcggcgucgccccccuccaccucggcaagugcaacaucgccggcuggauccucggcaaccccgagugcgagacccucuccaccgccuccuccugguccuacaucgucgagaccuccuccuccgacaacggcaccugcuaccccggcgacuucaucgacuacgaggagcuccgcgagcagcucuccuccgucuccuccuucgagcgcuucgagaucuuccccaagaccuccuccuggcccaaccacgacuccaacaagggcgucaccgccgccugcccccacgccggcgccaagggcuucuacaagaaccucaucuggcucgucaagaaggagaacuccuaccccaagcucuccaaguccuacaucaacgacaagggcaaggagguccucguccucuggggcauccaccaccccuccaccaccgccgaccagcagucccucuaccagaacgccgacaccuacgucuucgucggcaccucccgcuacuccaagaaguucaagcccgagaucgccacccgccccaagguccgcgaccgcgagggccgcaugaacuacuacuggacccucgucgagcccggcgacaagaucaccuucgaggccaccggcaaccucgucgucccccgcuacgccuucgccauggagcgcgacgccggcuccggcaucaucaucuccgacacccccguccacgacugcaacaccaccugccagacccccaagggcgccaucaacaccucccuccccuuccagaacauccaccccaucaccaucggcaagugccccaaguacgucaaguccaccaagcuccgccucgccaccggccuccgcaacguccccuccauccagucccgcggccucuucggcgccaucgccggcuucaucgagggcggcuggaccggcauggucgacggcugguacggcuaccaccaccagaacgagcagggcuccggcuacgccgccgaccucaaguccacccagaacgccaucgacaagaucaccaacaaggucaacuccgucaucgagaagaugaacacccaguucaccgccgucggcaaggaguucaaccaccucgagaagcgcaucgagaaccucaacaagaaggucgacgacggcuuccucgacaucuggaccuacaacgccgagcuccucguccuccucgagaacgagcgcacccucgacuaccacgacuccaacgucaagaaccucuacgagaagguccgcaaccagcucaagaacaacgccaaggagaucggcaacggcugcuucgaguucuaccacaagugcgacaacaccugcauggaguccgucaagaacggcaccuacgacuaccccaaguacuccgaggaggccaagcucaaccgcgaggagaucgacggcgucaagcucgaguccacccgcaucuaccagauccucgccaucuacuccaccgccgccuccucccucguccucgucgucucccucggcgccaucuccuucuggaugugcuccaacggcucccuccagugccgcaucugcaucuga

SEQ ID NO: 106496 - RNA, 1701 nt, Artificial Sequence; identical to SEQ ID NO: 106486
  derived and/or modified CDS sequence (opt2) from hemagglutinin__InfluenzaA__AGU92986

SEQ ID NO: 106497 - RNA, 1701 nt, Artificial Sequence
  derived and/or modified CDS sequence (opt2) from hemagglutinin__InfluenzaA__AGU92997
augaaggccauccucgucguccuccucuacaccuucgccaccgccaacgccgacacccucugcaucggcuaccacgccaacaacuccaccgacaccgucgacaccguccucgagaagaacgucaccgucacccacuccgucaaccuccucgaggacaagcacaacggcaagcucugcaagcuccgcggcgucgccccccuccaccucggcaagugcaacaucgccggcuggauccucggcaaccccgagugcgagucccucuccaccgccuccuccugguccuacaucgucgagaccuccuccuccgacaacggcaccugcuaccccggcgacuucaucgacuacgaggagcuccgcgagcagcucuccuccgucuccuccuucgagcgcuucgagaucuuccccaagaccuccuccuggcccaaccacgacuccaacaagggcgucaccgccgccugcccccacgccggcgccaaguccuucuacaagaaccucaucuggcucgucaagaagggcaacuccuaccccaagcucuccaaguccuacaucaacgacaagggcaaggagguccucguccucuggggcauccaccaccccuccaccuccgccgaccagcagucccucuaccagaacgccgacgccuacgucuucgucggcuccucccgcuacuccaagauguucaagcccgagaucgccauccgccccaagguccgcgaccgcgagggccgcaugaacuacuacuggacccucgucgagcccggcgacaagaucaccuucgaggccaccggcaaccucgucgucccccgcuacgccuucgccauggagcgcaacgccggcuccggcaucaucaucuccgacacccccguccacgacugcaacaccaccugccagacccccaagggcgccaucaacaccucccuccccuuccagaacauccaccccaucaccaucggcaagugccccaaguacgucaaguccaccaagcuccgccucgccaccggccuccgcaacguccccuccauccagucccgcggccucuucggcgccaucgccggcuucaucgagggcggcuggaccggcauggucgacggcugguacggcuaccaccaccagaacgagcagggcuccggcuacgccgccgaccucaaguccacccagaacgccaucgacgagaucaccaacaaggucaacuccgucaucgagaagaugaacacccaguucaccgccgucggcaaggaguucaaccaccucgagaagcgcaucgagaaccucaacaagaaggucgacgacggcuuccucgacaucuggaccuacaacgccgagcuccucguccuccucgagaacgagcgcacccucgacuaccacgacuccaacgucaagaaccucuacgagaagguccgcucccagcucaagaacaacgccaaggagaucggcaacggcugcuucgaguucuaccacaagugcgacaacaccugcauggaguccgucaagaacggcaccuacgacuaccccaaguacuccgaggaggccaagcucaaccgcgaggagaucgacggcgucaagcucgaguccacccgcaucuaccagauccucgccaucuacuccaccgucgccuccucccucguccucgucgucucccucggcgccaucuccuucuggaugugcuccaacggcucccuccagugccgcaucugcaucuga

SEQ ID NO: 106498 - RNA, 1701 nt, Artificial Sequence; identical to SEQ ID NO: 106488
  derived and/or modified CDS sequence (opt2) from hemagglutinin__InfluenzaA__AGU93008

SEQ ID NO: 106499 - RNA, 1698 nt, Artificial Sequence; identical to SEQ ID NO: 102590
  derived and/or modified CDS sequence (opt2) from hemagglutinin__InfluenzaA__AGU93019

SEQ ID NO: 106500 - RNA, 1701 nt, Artificial Sequence; identical to SEQ ID NO: 103086
  derived and/or modified CDS sequence (opt2) from hemagglutinin__InfluenzaA__AGU93031

SEQ ID NO: 106501 - RNA, 1701 nt, Artificial Sequence
  derived and/or modified CDS sequence (opt2) from hemagglutinin__InfluenzaA__AGU93042
augaaggccauccucgucguccuccucuacaccuucgccaccgccaacgccgacacccucugcaucggcuaccacgccaacaacuccaccgacaccgucgacaccguccucgagaagaacgucaccgucacccacuccgucaaccuccucgaggacaagcacaacggcaagcucugcaagcuccgcggcgucgccccccuccaccucggcaagugcaacaucgccggcuggauccucggcaaccccgagugcgagacccucuccaccgccaacuccugguccuacaucgucgagaccuccuccuccgacaacggcaccugcuaccccggcgacuucaucgacuacgaggagcuccgcgagcagcucuccuccgucuccuccuucgagcgcuucgagaucuuccccaagaccuccuccuggcccaaccacgacuccaacaagggcgucaccgccgccugcccccacgccggcgccaagggcuucuacaagaaccucaucuggcucgucaagaagggcaacuccuaccccaagcucuccaaguccuacaucaacgacaagggcaaggagguccucguccucuggggcauccaccaccccuccaccaccgccgaccagcagucccucuaccagaacgccgacaccuacgucuucgucggcaccucccgcuacuccaagaaguucaagcccgagaucgccauccgccccaagguccgcgaccaggagggccgcaugaacuacuacuggacccucgucgagcccggcgacaagaucaccuucgaggccaccggcaaccucgucgucccccgcuacgccuucgccauggagcgcgacgccggcuccggcaucaucaucuccgacacccccguccacgacugcaacaccaccugccagacccccaagggcgccaucaacaccucccuccccuuccagaacauccaccccaucaccaucggcaagugccccaaguacgucaaguccaccaagcuccgccucgccaccggccuccgcaacguccccuccauccagucccgcggccucuucggcgccaucgccggcuucaucgagggcggcuggaccggcauggucgacggcugguacggcuaccaccaccagaacgagcagggcuccggcuacgccgccgaccucaaguccacccagaacgccaucgacaagaucaccaacaaggucaacuccgucaucgagaagaugaacauccaguucaccgccgucggcaaggaguucaaccaccucgagaagcgcaucgagaaccucaacaagaaggucgacgacggcuuccucgacaucuggaccuacaacgccgagcuccucguccuccucgagaacgagcgcacccucgacuaccacgacuccaacgucaagaaccucuacgagaagguccgcaaccagcucaagaacaacgccaaggagaucggcaacggcugcuucgaguucuaccacaagugcgacaacaccugcauggaguccgucaagaacggcaccuacgacuaccccaaguacuccgaggaggccaagcucaaccgcgaggagaucgacggcgucaagcucgaguccacccgcaucuaccagauccucgccaucuacuccaccgccgccuccucccucguccucgucgucucccucggcgccaucuccuucuggaugugcuccaacggcucccuccagugccgcaucugcaucuga

SEQ ID NO: 106502 - RNA, 1701 nt, Artificial Sequence
  derived and/or modified CDS sequence (opt2) from hemagglutinin__InfluenzaA__AGU93053
augaaggccauccucgucguccuccucuacaccuucgccaccgccaacgccgacacccucugcaucggcuaccacgccaacaacuccaccgacaccgucgacaccguccucgagaagaacgucaccgucacccacuccgucaaccuccucgaggacaagcacaacggcaagcucugcaagcuccgcggcgucgccccccuccaccucggcaagugcaacaucgccggcuggauccucggcaaccccgagugcgagacccucuccaccgccuccuccugguccuacaucgucgagaccuccuccuccgacaacggcaccugcuaccccggcgacuucaucgacuacgaggagcuccgcgagcagcucuccuccgucuccuccuucgagcgcuucgagaucuuccccaagaccuccuccuggcccaaccacgacuccaacaagggcgucaccgccgccugcccccacgccggcgccaagggcuucuacaagaaccucaucuggcucgucaagaagggcaacuccuaccccaagcucuccaaguccuacaucaacgacaagggcaaggagguccucguccucuggggcauccaccaccccuccaccaccgccgaccagcagucccucuaccagaacgccgacaccuacgucuucgucggcaccucccgcuacuccaagaaguucaagcccgagaucgccacccgccccaagguccgcgaccaggagggccgcaugaacuacuacuggacccucgucgagcccggcgacaagaucaccuucgaggccaccggcaaccucgucgucccccgcuacgccuucgccauggagcgcgacgccggcuccggcaucaucaucuccgacacccccguccacgacugcaacaccaccugccagacccccaagggcgccaucaacaccucccuccccuuccagaacauccaccccaucaccaucggcaagugccccaaguacgucaaguccaccaagcuccgccucgccaccggccuccgcaacguccccuccauccagucccgcggccucuucggcgccaucgccggcuucaucgagggcggcuggaccggcauggucgacggcugguacggcuaccaccaccagaacgagcagggcuccggcuacgccgccgaccucaaguccacccagaacgccaucgacaagaucaccaacaaggucaacuccgucaucgagaagaugaacacccaguucaccgccgucggcaaggaguucaaccaccucgagaagcgcaucgagaaccucaacaagaaggucgacgacggcuuccucgacaucuggaccuacaacgccgagcuccucguccuccucgagaacgagcgcacccucgacuaccacgacuccaacgucaagaaccucuacgagaagguccgcaaccagcucaagaacaacgccaaggagaucggcaacggcugcuucgaguucuaccacaagugcgacaacaccugcauggaguccgucaagaacggcaccuacgacuaccccaaguacuccgaggaggccaagcucaaccgcgaggagaucgacggcgucaagcucgaguccacccgcaucuaccagauccucgccaucuacuccaccgccgccuccucccucguccucgucgucucccucggcgccaucuccuucuggaugugcuccaacggcucccuccagugccgcaucugcaucuga

SEQ ID NO: 106503 - RNA, 1701 nt, Artificial Sequence
  derived and/or modified CDS sequence (opt2) from hemagglutinin__InfluenzaA__AGV99014
augaagaccaucaucgcccucuccuacauccucugccucgucuucgcccagaagcuccccggcaacgacaacuccaccgccacccucugccucggccaccacgccguccccaacggcaccaucgucaagaccaucaccaacgaccgcaucgaggucaccaacgccaccgagcucguccagaacuccuccaucggcgagaucugcgacuccccccaccagauccucgacggcgagaacugcacccucaucgacgcccuccucggcgacccccagugcgacggcuuccagaacaagaagugggaccucuucgucgagcgcuccaaggccuacuccaacugcuaccccuacgacguccccgacuacgccucccuccgcucccucgucgccuccuccggcacccucgaguucaacaacgaguccuucaacuggaccggcgucacccagaacggcaccuccuccgccugcauccgccgcuccaacaacuccuucuucucccgccucaacuggcucacccacuccaacuucaaguaccccgcccucaacgucaccaugcccaacaacgagcaguucgacaagcucuacaucuggggcguccaccaccccggcaccgacaaggaccagaucuuccucuacgcccaguccuccggccgcaucaccgucuccaccaagcgcucccagcaggccgucauccccaacaucggcucccgcccccgcauccgcaacauccccucccgcaucuccaucuacuggaccaucgucaagcccggcgacauccuccucaucaacuccaccggcaaccucaucgccccccgcggcuacuucaagauccgcuccggcaaguccuccaucaugcgcuccgacgcccccaucggcaagugcaaguccgagugcaucacccccaacggcuccauccccaacgacaagcccuuccagaacgucaaccgcaucaccuacggcgccugcccccgcuacgucaagcaguccacccucaagcucgccaccggcaugcgcaacguccccgagaagcagacccgcggcaucuucggcgccaucgccggcuucaucgagaacggcugggagggcaugauggacggcugguacggcuuccgccaccagaacuccgagggccgcggccaggccgccgaccucaaguccacccaggccgccaucgaccagaucaacggcaagcucaaccgccucaucggcaagaccaacgagaaguuccaccagaucgagaaggaguucuccgaggucgagggccgcauccaggaccucgagaaguacgucgaggacaccaagaucgaccucugguccuacaacgccgagcuccucgucgcccucgagaaccagcacaccaucgaccucaccgacuccgagaugaacaagcucuucgagaagaccaagaagcagcuccgcgagaacgccgaggacaugggcaacggcugcuucaagaucuaccacaagugcgacaacgccugcaucggcuccauccgcaacggcaccuacgaccacgacgucuaccgcgacgaggcccucaacaaccgcuuccagaucaagggcgucgagcucaaguccggcuacaaggacuggauccucuggaucuccuucgccaucuccugcuuccuccucugcgucgcccuccucggcuucaucaugugggccugccagaagggcaacauccgcugcaacaucugcaucuga

SEQ ID NO: 106504 - RNA, 1701 nt, Artificial Sequence; identical to SEQ ID NO: 106030
  derived and/or modified CDS sequence (opt2) from hemagglutinin__InfluenzaA__AGV99037

SEQ ID NO: 106505 - RNA, 1701 nt, Artificial Sequence
  derived and/or modified CDS sequence (opt2) from hemagglutinin__InfluenzaA__AGV99049
augaagaccaucaucgcccucuccuacauccucugccucgucuucgcccagaagcuccccggcaacgacaacuccaccgccacccucugccucggccaccacgccguccccaacggcaccgucgucaagaccaucaccaacgaccgcaucgaggucaccaacgccaccgagcucguccagaacuccuccaucggcgagaucugcgacuccccccaccagauccucgacggcgagaacugcacccucaucgacgcccuccucggcgacccccagugcgacggcuuccagaacaagaagugggaccucuucgucgagcgcuccaaggccuacuccaacugcuaccccuacgacguccccgacuacgccucccuccgcucccucgucgccuccuccggcacccucgaguucaacaacgaguccuucaacuggaccggcgucacccagaacggcaccuccuccgccugcauccgccgcuccaacaacuccuucuucucccgccucaacuggcucacccaccucaacuucaaguaccccgcccucaacgucaccaugcccaacaacgagcaguucgacaagcucuacaucuggggcguccaccaccccggcaccgacaaggaccagaucuuccucuacgcccaguccuccggccgcaucaccgucuccaccaagcgcucccagcaggccgucauccccaacaucggcucccgcccccgcauccgcaacauccccucccgcaucuccaucuacuggaccaucgucaagcccggcgacauccuccucaucaacuccaccggcaaccucaucgccccccgcggcuacuucaagauccgcuccggcaaguccuccaucaugcgcuccgacgcccccaucggcaagugcaaguccgagugcaucacccccaacggcuccauccccaacgacaagcccuuccagaacgucaaccgcaucaccuacggcgccugcccccgcuacgucaagcaguccacccucaagcucgccaccggcaugcgcaacguccccgagaagcagacccgcggcaucuucggcgccaucgccggcuucaucgagaacggcugggagggcauggucgacggcugguacggcuuccgccaccagaacuccgagggccgcggccaggccgccgaccucaaguccacccaggccgccaucgaccagaucaacggcaagcucaaccgccucaucggcaagaccaacggcaaguuccaccagaucgagaaggaguucuccgaggucgagggccgcauccaggaccucgagaaguacgucgaggacaccaagaucgaccucugguccuacaacgccgagcuccucgucgcccucgagaaccagcacaccaucgaccucaccgacuccgagaugaacaagcucuucgagaagaccaagaagcagcuccgcgagaacgccgaggacaugggcaacggcugcuucaagaucuaccacaagugcgacaacgccugcaucggcuccauccgcaacggcaccuacgaccacgacgucuaccgcgacgaggcccucaacaaccgcuuccagaucaagggcgucgagcucaaguccggcuacaaggacuggauccucuggaucuccuucgccaucuccugcuuccuccucugcgucguccuccucggcuucaucaugugggccugccagaagggcaacauccgcugcaacaucugcaucuga

SEQ ID NO: 106506 - RNA, 1701 nt, Artificial Sequence
  derived and/or modified CDS sequence (opt2) from hemagglutinin__InfluenzaA__AGV99073
augaagaccaucaucgcccucuccuacauccucugccucgucuucgcccagaagauccccggcaacgacaacuccaccgccacccucugccucggccaccacgccguccccaacggcaccaucgucaagaccaucaccaacgaccgcaucgaggucaccaacgccaccgagcucguccagaacuccuccaucggcgagaucugcgacuccccccaccagauccucgacggcgagaacugcacccucaucgacgcccuccucggcgacccccagugcgacggcuuccagaacaagaagugggaccucuucgucgagcgcuccaaggccuacuccaacugcuaccccuacgacguccccgacuacgccucccuccgcucccucgucgccuccuccggcacccucgaguucaacaacgaguccuucaacuggaccggcgucacccagaacggcaccuccuccgccugcauccgcggcuccaacuccuccuucuucucccgccucaacuggcucacccaccucaacuucaaguaccccgcccucaacgucaccaugcccaacaacgagcaguucgacaagcucuacaucuggggcguccaccaccccggcaccgacaaggaccagaucuuccucuacgcccaguccuccggccgcaucaccgucuccaccaagcgcucccagcaggccgucauccccaacaucggcucccgcccccgcauccgcaacauccccucccgcaucuccaucuacuggaccaucgucaagcccggcgacauccuccucaucaacuccaccggcaaccucaucgccccccgcggcuacuucaagauccgcuccggcaaguccuccaucaugcgcuccgacgcccccaucggcaagugcaaguccgagugcaucacccccaacggcuccauccccaacgacaagcccuuccagaacgucaaccgcaucaccuacggcgccugcccccgcuacgucaagcaguccacccucaagcucgccaccggcaugcgcaacguccccgagaagcagacccgcggcaucuucggcgccaucgccggcuucaucgagaacggcugggagggcauggucgacggcugguacggcuuccgccaccagaacuccgagggccgcggccaggccgccgaccucaaguccacccaggccgccaucgaccagaucaacggcaagcucaaccgccucaucggcaagaccaacgagaaguuccaccagaucgagaaggaguucuccgaggucgagggccgcauccaggaccucgagaaguacgucgaggacaccaagaucgaccucugguccuacaacgccgagcuccucgucgcccucgagaaccagcacaccaucgaccucaccgacuccgagaugaacaagcucuucgagaagaccaagaagcagcuccgcgagaacgccgaggacaugggcaacggcugcuucaagaucuaccacaagugcgacaacgccugcaucggcuccauccgcaacggcaccuacgaccacgacgucuaccgcgacgaggcccucaacaaccgcuuccagaucaagggcgucgagcucaagcccggcuacaaggacuggauccucuggaucuccuucgccaucuccugcuuccuccucugcgucgcccuccucggcuucaucaugugggccugccagaagggcaacauccgcugcaacaucugcaucuga

SEQ ID NO: 106507 - RNA, 1701 nt, Artificial Sequence; identical to SEQ ID NO: 105894
  derived and/or modified CDS sequence (opt2) from hemagglutinin__InfluenzaA__AGV99085

SEQ ID NO: 106508 - RNA, 1701 nt, Artificial Sequence
  derived and/or modified CDS sequence (opt2) from hemagglutinin__InfluenzaA__AGV99097
augaagaccaucaucgcccucuccuacauccucugccucgucuucgcccagaagcuccccggcaacgacaacuccaccgccacccucugccucggccaccacgccguccccaacggcaccaucgucaagaccaucaccaacgaccgcaucgaggucaccaacgccaccgagcucguccagaacuccuccaucggcgagaucugcgacuccccccaccagauccucgacggcgagaacugcacccucaucgacgcccuccucggcgacccccagugcgacggcuuccagaacaagaagugggaccucuucgucgagcgcuccaaggccuacuccaacugcuaccccuacgacguccccgacuacgccucccuccgcucccucgucgccuccuccggcacccucgaguucaacaacgaguccuucaacuggaccggcgucacccagaacggcaccuccuccgccugcauccgccgcuccaacuccuccuucuucucccgccucaacuggcucacccaccucaacuucaaguaccccgcccucaacgucaccaugcccaacaacgagcaguucgacaagcucuacaucuggggcguccaccaccccggcaccgacaaggaccagaucuuccucuacgcccaguccuccggccgcaucaccgucuccaccaagcgcucccagcaggccgucauccccaacaucggcucccgcccccgcauccgcaacauccccucccgcaucuccaucuacuggaccaucgucaagcccggcgacauccuccucaucaacuccaccggcaaccucaucgccccccgcggcuacuucaagauccgcuccggcaaguccuccaucaugcgcuccgacgcccccaucggcaagugcaaguccgagugcaucacccccaacggcuccauccccaacgacaagcccuuccagaacgucaaccgcaucaccuacggcgccugcccccgcuacgucaagcaguccacccucaagcucgccaccggcaugcgcaacguccccgagaagcagacccgcggcaucuucggcgccaucgccggcuucaucgagaacggcugggagggcauggucgacggcugguacggcuuccgccaccagaacuccgagggccgcggccaggccgccgaccucaaguccacccaggccgccaucgaccagaucaacggcaagcucaaccgccucaucggcaagaccaacgagaaguuccaccagaucgagaaggaguucuccgaggucgagggccgcauccaggaccucgagaaguacgucgaggacaccaagaucgaccucugguccuacaacgccgagauccucgucgcccucgagaaccagcacaccaucgaccucaccgacuccgagaugaacaagcucuucgagaagaccaagaagcagcuccgcgagaacgccgaggacaugggcaacggcugcuucaagaucuaccacaagugcgacaacgccugcaucggcuccauccgcaacggcaccuacgaccacgacgucuaccgcgacgaggcccucaacaaccgcuuccagaucaagggcgucgagcucaaguccggcuacaaggacuggauccucuggaucuccuucgccaucuccugcuuccuccucugcgucgcccuccucggcuucaucaugugggccugccagaagggcaacauccgcugcaacaucugcaucuga

SEQ ID NO: 106509 - RNA, 1701 nt, Artificial Sequence
  derived and/or modified CDS sequence (opt2) from hemagglutinin__InfluenzaA__AGV99121
augaagaccaucaucgcccucuccuacauccucugccucgucuucgcccagaagcuccccggcaacgacaacuccaccgccacccucugccucggccaccacgccguccccaacggcaccaucgucaagaccaucaccaacgaccgcaucgaggucaccaacgccaccgagcucguccagaacuccuccaucggcgagaucugcgacuccccccaccagauccucgacggcgagaacugcacccucaucgacgcccuccucggcgacccccagugcgacgacuuccagaacaagaagugggaccucuucgucgagcgcuccaaggccuacuccaacugcuaccccuacgacguccccgacuacgccucccuccgcucccucgucgccuccuccggcacccucgaguucaacaacgaguccuucaacugggccggcgucacccagaacggcaccuccuccgccugcauccgcggcuccaacuccuccuucuucucccgccucaacuggcucacccaccucaacuucaaguaccccgcccucaacgucaccaugcccaacaacgagcaguucgacaagcucuacaucuggggcguccaccaccccggcaccgacaaggaccagaucuuccucuacgcccaguccuccggccgcaucaccgucuccaccaagcgcucccagcaggccgucauccccaacaucggcucccgcccccgcauccgcaacauccccucccgcaucuccaucuacuggaccaucgucaagcccggcgacauccuccucaucaacuccaccggcaaccucaucgccccccgcggcuacuucaagauccgcuccggcaaguccuccaucaugcgcuccgacgcccccaucggcaagugcaaguccgagugcaucacccccaacggcuccauccccaacgacaagcccuuccagaacgucaaccgcaucaccuacggcgccugcccccgcuacgucaagcaguccacccucaagcucgccaccggcaugcgcaacguccccgagaagcagacccgcggcaucuucggcgccaucgccggcuucaucgagaacggcugggagggcauggucgacggcugguacggcuuccgccaccagaacuccgagggccgcggccaggccgccgaccucaaguccacccaggccgccaucgaccagaucaacggcaagcucaaccgccucaucggcaagaccaacgagaaguuccaccagaucgagaaggaguucuccgaggucgagggccgcauccaggaccucgagaaguacgucgaggacaccaagaucgaccucugguccuacaacgccgagcuccucgucgcccucgagaaccagcacaccaucgaccucaccgacuccgagaugaacaagcucuucgagaagaccaagaagcagcuccgcgagaacgccgaggacaugggcaacggcugcuucaagaucuaccacaagugcgacaacgccugcaucggcuccauccgcaacggcaccuacgaccacgacgucuaccgcgacgaggcccucaacaaccgcuuccagaucaagggcgucgagcucaaguccggcuacaaggacuggauccucuggaucuccuucgccaucuccugcuuccuccucugcgucgcccuccucggcuucaucaugugggccugccagaagggcaacauccgcugcaacaucugcaucuga

SEQ ID NO: 106510 - RNA, 1701 nt, Artificial Sequence; identical to SEQ ID NO: 106509
  derived and/or modified CDS sequence (opt2) from hemagglutinin__InfluenzaA__AGV99133

SEQ ID NO: 106511 - RNA, 1701 nt, Artificial Sequence; identical to SEQ ID NO: 106503
  derived and/or modified CDS sequence (opt2) from hemagglutinin__InfluenzaA__AGV99145

SEQ ID NO: 106512 - RNA, 1701 nt, Artificial Sequence
  derived and/or modified CDS sequence (opt2) from hemagglutinin__InfluenzaA__AGV99157
augaagaccaucaucgcccucuccuacauccucugccucgucuucgcccagaagcuccccggcaacgacaacuccaccgccacccucugccucggccaccacgccguccccaacggcaccaucgucaagaccaucaccaacgaccgcaucgaggucaccaacgccaccgagcucguccagaacuccuccaucggcgagaucugcgacuccccccaccagauccucgacggcgagaacugcacccucaucgacgcccuccucggcgacccccagugcgacggcuuccagaacaagaagugggaccucuucaucgagcgcuccaaggccuacuccaacugcuaccccuacgacguccccgacuacgccucccuccgcucccucgucgccuccuccggcacccucgaguucaacaacgaguccuucaacuggaccggcgucacccagaacggcaccuccuccgccugcauccgccgcuccaacaacuccuucuucucccgccucaacuggcucacccacuccaacuucaaguaccccgcccucaacgucaccaugcccaacaacgagcaguucgacaagcucuacaucuggggcguccaccaccccggcaccgacaaggaccagaucuuccucuacgcccaguccuccggccgcaucaccgucuccaccaagcgcucccagcaggccgucauccccaacaucggcucccgcccccgcauccgcaacauccccucccgcaucuccaucuacuggaccaucgucaagcccggcgacauccuccucaucaacuccaccggcaaccucaucgccccccgcggcuacuucaagauccgcuccggcaaguccuccaucaugcgcuccgacacccccaucggcaagugcaaguccgagugcaucacccccaacggcuccauccccaacgacaagcccuuccagaacgucaaccgcaucaccuacggcgccugcccccgcuacgucaagcaguccacccucaagcucgccaccggcaugcgcaacguccccgagaagcagacccgcggcaucuucggcgccaucgccggcuucaucgagaacggcugggagggcaugauggacggcugguacggcuuccgccaccagaacuccgagggccgcggccaggccgccgaccucaaguccacccaggccgccaucgaccagaucaacggcaagcucaaccgccucaucggcaagaccaacgagaaguuccaccagaucgagaaggaguucuccgaggucgagggccgcauccaggaccucgagaaguacgucgaggacaccaagaucgaccucugguccuacaacgccgagcuccucgucgcccucgagaaccagcacaccaucgaccucaccgacuccgagaugaacaagcucuucgagaagaccaagaagcagcuccgcgagaacgccgaggacaugggcaacggcugcuucaagaucuaccacaagugcgacaacgccugcaucggcuccauccgcaacggcaccuacgaccacgacgucuaccgcgacgaggcccucaacaaccgcuuccagaucaagggcgucgagcucaaguccggcuacaaggacuggauccucuggaucuccuucgccaucuccugcuuccuccucugcgucgcccuccucggcuucaucaugugggccugccagaagggcaacauccgcugcaacaucugcaucuga

SEQ ID NO: 106513 - RNA, 1701 nt, Artificial Sequence; identical to SEQ ID NO: 106030
  derived and/or modified CDS sequence (opt2) from hemagglutinin__InfluenzaA__AGV99169

SEQ ID NO: 106514 - RNA, 1701 nt, Artificial Sequence; identical to SEQ ID NO: 106503
  derived and/or modified CDS sequence (opt2) from hemagglutinin__InfluenzaA__AGV99181

SEQ ID NO: 106515 - RNA, 1701 nt, Artificial Sequence
  derived and/or modified CDS sequence (opt2) from hemagglutinin__InfluenzaA__AGV99193
augaagaccaucaucgcccucuccuacauccucugccucgucuucgcccagaagcuccccggcaacgacaacuccaccgccacccucugccucggccaccacgccguccccaacggcaccaucgucaagaccaucaccaacgaccgcaucgaggucaccaacgccaccgagcucguccagaacuccuccaucggcgagaucugcgacuccccccaccagauccucgacggcgagaacugcacccucaucgacgcccuccucggcgacccccagugcgacggcuuccagaacaagaagugggaccucuucgucgagcgcuccaaggccuacuccaacugcuaccccuacgacguccccgacuacgccucccuccgcucccucgucgccuccuccggcacccucgaguucaacaacgaguccuucaacuggaccggcgucacccagaacggcaccuccuccgccugcauccgccgcuccaacaacuccuucuucucccgccucaacuggcucacccacuccaacuucaaguaccccgcccucaacgucaccaugcccaacaacgagcaguucgacaagcucuacaucuggggcguccaccaccccggcaccgacaaggaccagaucuuccucuacgcccaguccuccggccgcaucaccgucuccaccaagcgcucccagcaggccgucauccccaacaucggcucccgcccccgcauccgcaacauccccucccgcaucuccaucuacuggaccaucgucaagcccggcgacauccuccucaucaacuccaccggcaaccucaucgccccccgcggcuacuucaagauccgcuccggcaaguccuccaucaugcgcuccgacacccccaucggcaagugcaaguccgagugcaucacccccaacggcuccauccccaacgacaagcccuuccagaacgucaaccgcaucaccuacggcgccugcccccgcuacgucaagcaguccacccucaagcucgccaccggcaugcgcaacguccccgagaagcagacccgcggcaucuucggcgccaucgccggcuucaucgagaacggcugggagggcaugauggacggcugguacggcuuccgccaccagaacuccgagggccgcggccaggccgccgaccucaaguccacccaggccgccaucgaccagaucaacggcaagcucaaccgccucaucggcaagaccaacgagaaguuccaccagaucgagaaggaguucuccgaggucgagggccgcauccaggaccucgagaaguacgucgaggacaccaagaucgaccucugguccuacaacgccgagcuccucgucgcccucgagaaccagcacaccaucgaccucaccgacuccgagaugaacaagcucuucgagaagaccaagaagcagcuccgcgagaacgccgaggacaugggcaacggcugcuucaagaucuaccacaagugcgacaacgccugcaucggcuccauccgcaacggcaccuacgaccacgacgucuaccgcgacgaggcccucaacaaccgcuuccagaucaagggcgucgagcucaaguccggcuacaaggacuggauccucuggaucuccuucgccaucuccugcuuccuccucugcgucgcccuccucggcuucaucaugugggccugccagaagggcaacauccgcugcaacaucugcaucuga

SEQ ID NO: 106516 - RNA, 1701 nt, Artificial Sequence; identical to SEQ ID NO: 105904
  derived and/or modified CDS sequence (opt2) from hemagglutinin__InfluenzaA__AGV99956

SEQ ID NO: 106517 - RNA, 1701 nt, Artificial Sequence
  derived and/or modified CDS sequence (opt2) from hemagglutinin__InfluenzaA__AGV99986
augaagaccaucaucgcccucuccuacauccucugccucgucuucgcccagaagcuccccggcaacgacaacuccaccgccacccucugccucggccaccacgccguccccaacggcaccaucgucaagaccaucaccaacgaccgcaucgaggucaccaacgccaccgagcucguccagaacuccuccaucggcgagaucugcgacuccccccaccagauccucgacggcgagaacugcacccucaucgacgcccuccucggcgacccccagugcgacggcuuccagaacaagaagugggaccucuucgucgagcgcuccaaggccuacuccaacugcuaccccuacgacguccccgacuacgccucccuccgcucccucaucgccuccuccggcacccucgaguucaacaacgaguccuucaacuggaccggcgucacccagaacggcaccuccuccgccugcauccgccgcuccaacaacuccuucuucucccgccucaacuggcucacccacuccaacuucaaguaccccgcccucaacgucaccaugcccaacaacgagcaguucgacaagcucuacaucuggggcguccaccaccccggcaccgacaaggaccagaucuuccucuacgcccaguccuccggccgcaucaccgucuccaccaagcgcucccagcaggccgucauccccaacaucggcucccgcccccgcauccgcaacauccccucccgcaucuccaucuacuggaccaucgucaagcccggcgacauccuccucaucaacuccaccggcaaccucaucgccccccgcggcuacuucaagauccgcuccggcaaguccuccaucaugcgcuccgacgcccccaucggcaagugcaaguccgagugcaucacccccaacggcuccauccccaacgacaagcccuuccagaacgucaaccgcaucaccuacggcgccugcccccgcuacgucaagcaguccacccucaagcucgccaccggcaugcgcaacguccccgagaagcagacccgcggcaucuucggcgccaucgccggcuucaucgagaacggcugggagggcaugauggacggcugguacggcuuccgccaccagaacuccgagggccgcggccaggccgccgaccucaaguccacccaggccgccaucgaccagaucaacggcaagcucaaccgccucaucggcaagaccaacgagaaguuccaccagaucgagaaggaguucuccgaggucgagggccgcauccaggaccucgagaaguacgucgaggacaccaagaucgaccucugguccuacaacgccgagcuccucgucgcccucgagaaccagcacaccaucgaccucaccgacuccgagaugaacaagcucuucgagaagaccaagaagcagcuccgcgagaacgccgaggacaugggcaacggcugcuucaagaucuaccacaagugcgacaacgccugcaucggcuccauccgcaacggcaccuacgaccacgacgucuaccgcgacgaggcccucaacaaccgcuuccagaucaagggcgucgagcucaaguccggcuacaaggacuggauccucuggaucuccuucgccaucuccugcuuccuccucugcgucgcccuccucggcuucaucaugugggccugccagaagggcaacauccgcugcaacaucugcaucuga

SEQ ID NO: 106518 - RNA, 1701 nt, Artificial Sequence
  derived and/or modified CDS sequence (opt2) from hemagglutinin__InfluenzaA__AGW00065
augaagaccaucaucgcccucuccuacauccucugccucgucuucgcccagaagcuccccggcaacgacaacuccaccgccacccucugccucggccaccacgccguccccaacggcaccaucgucaagaccaucaccaacgaccgcaucgaggucaccaacgccaccgagcucguccagaacuccuccaucggcgagaucugcgacuccccccaccagauccucgacggcgagaacugcacccucaucgacgcccuccucggcgacccccagugcgacggcuuccagaacaagaagugggaccucuucgucgagcgcuccaaggccuacuccaacugcuaccccuacgacguccccgacuacaccucccuccgcucccucgucgccuccuccggcacccucgaguucaacaacgaguccuucaacuggaccggcgucacccagaacggcaccuccuccgccugcauccgccgcuccaacuccuccuucuucucccgccucaacuggcucacccaccucaacuucaaguaccccgcccucaacgucaccaugcccaacaacgagcaguucgacaagcucuacaucuggggcguccaccaccccggcaccgacaaggaccagaucuuccucuacgcccaguccuccggccgcaucaccgucuccaccaagcgcucccagcaggccgucauccccaacaucggcucccgcccccgcauccgcaacauccccucccgcaucuccaucuacuggaccaucgucaagcccggcgacauccuccucaucaacuccaccggcaaccucaucgccccccgcggcuacuucaagauccgcuccggcaaguccuccaucaugcgcuccgacgcccccaucggcaagugcaaguccgagugcaucacccccaacggcuccauccccaacgacaagcccuuccagaacgucaaccgcaucaccuacggcgccugcccccgcuacgucaagcaguccacccucaagcucgccaccggcaugcgcaacguccccgagaagcagacccgcggcaucuucggcgccaucgccggcuucaucgagaacggcugggagggcauggucgacggcugguacggcuuccgccaccagaacuccgagggccgcggccaggccgccgaccucaaguccacccaggccgccaucgaccagaucaacggcaagcucaaccgccucaucggcaagaccaacgagaaguuccaccagaucgagaaggaguucuccgaggucgagggccgcauccaggaccucgagaaguacgucgaggacaccaagaucgaccucugguccuacaacgccgagcuccucgucgcccucgagaaccagcacaccaucgaccucaccgacuccgagaugaacaagcucuucgagaagaccaagaagcagcuccgcgagaacgccgaggacaugggcaacggcugcuucaagaucuaccacaagugcgacaacgccugcaucggcuccauccgcaacggcaccuacgaccacgacgucuaccgcgacgaggcccucaacaaccgcuuccagaucaagggcgucgagcucaaguccggcuacaaggacuggauccucuggaucuccuucgccaucuccugcuuccuccucugcgucgcccuccucggcuucaucaugugggccugccagaagggcaacauccgcugcaacaucugcaucuga

SEQ ID NO: 106519 - RNA, 1701 nt, Artificial Sequence; identical to SEQ ID NO: 106030
  derived and/or modified CDS sequence (opt2) from hemagglutinin__InfluenzaA__AGW00077

SEQ ID NO: 106520 - RNA, 1701 nt, Artificial Sequence; identical to SEQ ID NO: 105894
  derived and/or modified CDS sequence (opt2) from hemagglutinin__InfluenzaA__AGW00089

SEQ ID NO: 106521 - RNA, 1701 nt, Artificial Sequence; identical to SEQ ID NO: 106030
  derived and/or modified CDS sequence (opt2) from hemagglutinin__InfluenzaA__AGW00101

SEQ ID NO: 106522 - RNA, 1701 nt, Artificial Sequence
  derived and/or modified CDS sequence (opt2) from hemagglutinin__InfluenzaA__AGW00113
augaagaccaucaucgcccucuccuacauccucugccucgucuucgcccagaagcuccccggcaacgacaacuccaccgccacccucugccucggccaccacgccguccccaacggcaccaucgucaagaccaucaccaacgaccgcaucgaggucaccaacgccaccgagcucguccagaacuccuccaucggcgagaucugcgacuccccccaccagauccucgacggcgagaacugcacccucaucgacgcccuccucggcgacccccagugcgacggcuuccagaacaagaagugggaccucuucgucgagcgcuccaaggccuacuccaacugcuaccccuacgacguccccgacuacgccucccuccgcucccucgucgccuccuccggcacccucgaguucaacaacgaguccuucaacugggccggcgucacccagaacggcaccuccuccgccugcauccgcggcuccaacuccuccuucuucucccgccucaacuggcucacccaccucaacuucaaguaccccgcccucaacgucaccaugcccaacaacgagcaguucgacaagcucuacaucuggggcguccaccaccccggcaccgacaaggaccagaccuuccucuacgcccaguccuccggccgcaucaccgucuccaccaagcgcucccagcaggccgucauccccaacaucggcucccgcccccgcauccgcaacauccccucccgcaucuccaucuacuggaccaucgucaagcccggcgacauccuccucaucaacuccaccggcaaccucaucgccccccgcggcuacuucaagauccgcuccggcaaguccuccaucaugcgcuccgacgcccccaucggcaagugcaaguccgagugcaucacccccaacggcuccauccccaacgacaagcccuuccagaacgucaaccgcaucaccuacggcgccugcccccgcuacgucaagcaguccacccucaagcucgccaccggcaugcgcaacguccccgagaagcagacccgcggcaucuucggcgccaucgccggcuucaucgagaacggcugggagggcauggucgacggcugguacggcuuccgccaccagaacuccgagggccgcggccaggccgccgaccucaaguccacccaggccgccaucgaccagaucaacggcaagcucaaccgccucaucggcaagaccaacgagaaguuccaccagaucgagaaggaguucuccgaggucgagggccgcauccaggaccucgagaaguacgucgaggacaccaagaucgaccucugguccuacaacgccgagcuccucgucgcccucgagaaccagcacaccaucgaccucaccgacuccgagaugaacaagcucuucgagaagaccaagaagcagcuccgcgagaacgccgaggacaugggcaacggcugcuucaagaucuaccacaagugcgacaacgccugcaucggcuccauccgcaacggcaccuacgaccacgacgucuaccgcgacgaggcccucaacaaccgcuuccagaucaagggcgucgagcucaaguccggcuacaaggacuggauccucuggaucuccuucgccaucuccugcuuccuccucugcgucgcccuccucggcuucaucaugugggccugccagaagggcaacauccgcugcaacaucugcaucuga

SEQ ID NO: 106523 - RNA, 1701 nt, Artificial Sequence; identical to SEQ ID NO: 106030
  derived and/or modified CDS sequence (opt2) from hemagglutinin__InfluenzaA__AGW00125

SEQ ID NO: 106524 - RNA, 1701 nt, Artificial Sequence; identical to SEQ ID NO: 106030
  derived and/or modified CDS sequence (opt2) from hemagglutinin__InfluenzaA__AGW00137

SEQ ID NO: 106525 - RNA, 1701 nt, Artificial Sequence; identical to SEQ ID NO: 106030
  derived and/or modified CDS sequence (opt2) from hemagglutinin__InfluenzaA__AGW00149

SEQ ID NO: 106526 - RNA, 1701 nt, Artificial Sequence; identical to SEQ ID NO: 106030
  derived and/or modified CDS sequence (opt2) from hemagglutinin__InfluenzaA__AGW00161

SEQ ID NO: 106527 - RNA, 1701 nt, Artificial Sequence; identical to SEQ ID NO: 106030
  derived and/or modified CDS sequence (opt2) from hemagglutinin__InfluenzaA__AGW00173

SEQ ID NO: 106528 - RNA, 1701 nt, Artificial Sequence
  derived and/or modified CDS sequence (opt2) from hemagglutinin__InfluenzaA__AGW00185
augaagaccaucaucgcccucuccuacauccucugccucgucuucgcccagaagcuccccggcaacgacaacuccaccgccacccucugccucggccaccacgccguccccaacggcaccaucgucaagaccaucaccaacgaccgcaucgaggucaccaacgccaccgagcucguccagaacuccuccaucggcgagaucugcgacuccccccaccagauccucgacggcgagaacugcacccucaucgacgcccuccucggcgacccccagugcgacggcuuccagaacaagaagugggaccucuucaucgagcgcuccaaggccuacuccaacugcuaccccuacgacguccccgacuacgccucccuccgcucccucgucgccuccuccggcacccucgaguucaacaacgaguccuucaacuggaccggcgucacccagaacggcaccuccuccgccugcauccgccgcuccaacaacuccuucuucucccgccucaacuggcucacccacuccaacuucaaguaccccgcccucaacgucaccaugcccaacaacgagcaguucgacaagcucuacaucuggggcguccaccaccccggcaccgacaaggaccagaucuuccucuacgcccaguccuccggccgcaucaccgucuccaccaagcgcucccagcaggccgucauccccaacaucggcucccgcccccgcauccgcaacauccccucccgcaucuccaucuacuggaccaucgucaagcccggcgacauccuccucaucaacuccaccggcaaccucaucgccccccgcggcuacuucaagauccgcuccggcaaguccuccaucaugcgcuccgacgcccccaucggcaagugcaaguccgagugcaucacccccaacggcuccauccccaacgacaagcccuuccagaacgucaaccgcaucaccuacggcgccugcccccgcuacgucaagcaguccacccucaagcucgccaccggcaugcgcaacguccccgagaagcagacccgcggcaucuucggcgccaucgccggcuucaucgagaacggcugggagggcaugauggacggcugguacggcuuccgccaccagaacuccgagggccgcggccaggccgccgaccucaaguccacccaggccgccaucgaccagaucaacggcaagcucaaccgccucaucggcaagaccaacgagaaguuccaccagaucgagaaggaguucuccgaggucgagggccgcauccaggaccucgagaaguacgucgaggacaccaagaucgaccucugguccuacaacgccgagcuccucgucgcccucgagaaccagcacaccaucgaccucaccgacuccgagaugaacaagcucuucgagaagaccaagaagcagcuccgcgagaacgccgaggacaugggcaacggcugcuucaagaucuaccacaagugcgacaacgccugcaucggcuccauccgcaacggcaccuacgaccacgacgucuaccgcgacgaggcccucaacaaccgcuuccagaucaagggcgucgagcucaaguccggcuacaaggacuggauccucuggaucuccuucgccaucuccugcuuccuccucugcgucgcccuccucggcuucaucaugugggccugccagaagggcaacauccgcugcaacaucugcaucuga

SEQ ID NO: 106529 - RNA, 1701 nt, Artificial Sequence; identical to SEQ ID NO: 106030
  derived and/or modified CDS sequence (opt2) from hemagglutinin__InfluenzaA__AGW00709

SEQ ID NO: 106530 - RNA, 1701 nt, Artificial Sequence; identical to SEQ ID NO: 106030
  derived and/or modified CDS sequence (opt2) from hemagglutinin__InfluenzaA__AGW00721

SEQ ID NO: 106531 - RNA, 1701 nt, Artificial Sequence; identical to SEQ ID NO: 106030
  derived and/or modified CDS sequence (opt2) from hemagglutinin__InfluenzaA__AGW00733

SEQ ID NO: 106532 - RNA, 1701 nt, Artificial Sequence; identical to SEQ ID NO: 106030
  derived and/or modified CDS sequence (opt2) from hemagglutinin__InfluenzaA__AGW00745

SEQ ID NO: 106533 - RNA, 1701 nt, Artificial Sequence
  derived and/or modified CDS sequence (opt2) from hemagglutinin__InfluenzaA__AGW00757
augaagaccaucaucgcccucuccuacauccucugccucgucuucgcccagaagcuccccggcaacgacaacuccaccgccacccucugccucggccaccacgccguccccaacggcaccaucgucaagaccaucaccaacgaccgcaucgaggucaccaacgccaccgagcucguccagaacuccuccaucggcgagaucugcgacuccccccaccagauccucgacggcgagaacugcacccucaucgacgcccuccucggcgacccccagugcgacggcuuccagaacaagaagugggaccucuucgucgagcgcuccaaggccuacuccaacugcuaccccuacgacguccccgacuacgccucccuccgcucccucgucgccuccuccggcacccucgaguucaacaacgaguccuucaacugggccggcgucacccagaacggcaccuccuccgccugcauccgcggcuccaacuccuccuucuucucccgccucaacuggcucacccaccucaacuucaaguaccccgcccucaacgucaccaugcccaacaacgagcaguucgacaagcucuacaucuggggcguccaccaccccggcaccgacaaggaccagaucuuccucuacgcccaguccuccggccgcaucaccgucuccaccaagcgcucccagcaggccgucauccccaacaucggcucccgcccccgcauccgcaacauccccucccgcaucuccaucuacuggaccaucgucaagcccggcgacauccuccucaucaacuccaccggcaaccucaucgccccccgcggcuacuucaagauccgcuccggcaaguccuccaucaugcgcuccgacgcccccaucggcaagugcaaguccgagugcaucacccccaacggcuccauccccaacgacaagcccuuccagaaccucaaccgcaucaccuacggcgccugcccccgcuacgucaagcaguccacccucaagcucgccaccggcaugcgcaacguccccgagaagcagacccgcggcaucuucggcgccaucgccggcuucaucgagaacggcugggagggcauggucgacggcugguacggcuuccgccaccagaacuccgagggccgcggccaggccgccgaccucaaguccacccaggccgccaucgaccagaucaacggcaagcucaaccgccucaucggcaagaccaacgagaaguuccaccagaucgagaaggaguucuccgaggucgagggccgcauccaggaccucgagaaguacgucgaggacaccaagaucgaccucugguccuacaacgccgagcuccucgucgcccucgagaaccagcacaccaucgaccucaccgacuccgagaugaacaagcucuucgagaagaccaagaagcagcuccgcgagaacgccgaggacaugggcaacggcugcuucaagaucuaccacaagugcgacaacgccugcaucggcuccauccgcaacggcaccuacgaccacgacgucuaccgcgacgaggcccucaacaaccgcuuccagaucaagggcgucgagcucaaguccggcuacaaggacuggauccucuggaucuccuucgccaucuccugcuuccuccucugcgucgcccuccucggcuucaucaugugggccugccagaagggcaacauccgcugcaacaucugcaucuga

SEQ ID NO: 106534 - RNA, 1701 nt, Artificial Sequence; identical to SEQ ID NO: 106033
  derived and/or modified CDS sequence (opt2) from hemagglutinin__InfluenzaA__AGW00769

SEQ ID NO: 106535 - RNA, 1701 nt, Artificial Sequence; identical to SEQ ID NO: 105919
  derived and/or modified CDS sequence (opt2) from hemagglutinin__InfluenzaA__AGW00781

SEQ ID NO: 106536 - RNA, 1701 nt, Artificial Sequence; identical to SEQ ID NO: 106518
  derived and/or modified CDS sequence (opt2) from hemagglutinin__InfluenzaA__AGW00793

SEQ ID NO: 106537 - RNA, 1701 nt, Artificial Sequence; identical to SEQ ID NO: 106030
  derived and/or modified CDS sequence (opt2) from hemagglutinin__InfluenzaA__AGW00805

SEQ ID NO: 106538 - RNA, 1701 nt, Artificial Sequence; identical to SEQ ID NO: 105871
  derived and/or modified CDS sequence (opt2) from hemagglutinin__InfluenzaA__AGW00817

SEQ ID NO: 106539 - RNA, 1701 nt, Artificial Sequence; identical to SEQ ID NO: 106517
  derived and/or modified CDS sequence (opt2) from hemagglutinin__InfluenzaA__AGW00829

SEQ ID NO: 106540 - RNA, 1701 nt, Artificial Sequence
  derived and/or modified CDS sequence (opt2) from hemagglutinin__InfluenzaA__AGW00841
augaagaccaucaucgcccucuccuacauccucugccucgucuucgcccagaagcuccccggcaacgacaacuccaccgccacccucugccucggccaccacgccguccccaacggcaccaucgucaagaccaucaccaacggccgcaucgaggucaccaacgccaccgagcucguccagaacuccuccaucggcgagaucugcgacuccccccaccagauccucgacggcgagaacugcacccucaucgacgcccuccucggcgacccccagugcgacggcuuccagaacaagaagugggaccucuucgucgagcgcuccaaggccuacuccaacugcuaccccuacgacguccccgacuacgccucccuccgcucccucgucgccuccuccggcacccucgaguucaacaacgaguccuucaacugggccggcgucacccagaacggcaccuccuccgccugcauccgcggcuccaacuccuccuucuucucccgccucaacuggcucacccaccucaacuucaaguaccccgcccucaacgucaccaugcccaacaacgagcaguucgacaagcucuacaucuggggcguccaccaccccggcaccgacaaggaccagaucuuccucuacgcccaguccuccggccgcaucaccgucuccaccaagcgcucccagcaggccgucauccccaacaucggcucccgcccccgcauccgcaacauccccucccgcaucuccaucuacuggaccaucgucaagcccggcgacauccuccucaucaacuccaccggcaaccucaucgccccccgcggcuacuucaagauccgcuccggcaaguccuccaucaugcgcuccgacgcccccaucggcaagugcaaguccgagugcaucacccccaacggcuccauccccaacgacaagcccuuccagaacgucaaccgcaucaccuacggcgccugcccccgcuacgucaagcaguccacccucaagcucgccaccggcaugcgcaacguccccgagaagcagacccgcggcaucuucggcgccaucgccggcuucaucgagaacggcugggagggcauggucgacggcugguacggcuuccgccaccagaacuccgagggccgcggccaggccgccgaccucaaguccacccaggccgccaucgaccagaucaacggcaagcucaaccgccucaucggcaagaccaacgagaaguuccaccagaucgagaaggaguucuccgaggucgagggccgcauccaggaccucgagaaguacgucgaggacaccaagaucgaccucugguccuacaacgccgagcuccucgucgcccucgagaaccagcacaccaucgaccucaccgacuccgagaugaacaagcucuucgagaagaccaagaagcagcuccgcgagaacgccgaggacaugggcaacggcugcuucaagaucuaccacaagugcgacaacgccugcaucggcuccauccgcaacggcaccuacgaccacgacgucuaccgcgacgaggcccucaacaaccgcuuccagaucaagggcgucgagcucaaguccggcuacaaggacuggauccucuggaucuccuucgccaucuccugcuuccuccucugcgucgcccuccucggcuucaucaugugggccugccagaagggcaacauccgcugcaacaucugcaucuga

SEQ ID NO: 106541 - RNA, 1701 nt, Artificial Sequence
  derived and/or modified CDS sequence (opt2) from hemagglutinin__InfluenzaA__AGW00853
augaagaccaucaucgcccucuccuacauccucugccucgucuucgcccagaagcuccccggcaacgacaacuccaccgccacccucugccucggccaccacgccguccccaacggcaccaucgucaagaccaucaccaacgaccgcaucgaggucaccaacgccaccgagcucguccagaacuccuccaucggcgagaucugcgacuccccccaccagauccucgacggcgagaacugcacccucaucgacgcccuccucggcgacccccagugcgacggcuuccagaacaagaagugggaccucuucgucgagcgcuccaaggccuacuccaacugcuaccccuacgacguccccgacuacgccucccuccgcucccucgucgccuccuccggcacccucgaguucaacaacgaguccuucaacuggaccggcgucacccagaacggcaccuccuccgccugcauccgccgcuccaacuccuccuucuucucccgccucaacuggcucacccaccucaacuucaaguaccccgcccucaacgucaccaugcccaacaacgagcaguucgacaagcucuacaucuggggcguccaccaccccggcaccgacaaggaccagaucuuccucuacgcccagcccuccggccgcaucaccgucuccaccaagcgcucccagcaggccgucauccccaacaucggcucccgcccccgcauccgcaacauccccucccgcaucuccaucuacuggaccaucgucaagcccggcgacauccuccucaucaacuccaccggcaaccucaucgccccccgcggcuacuucaagauccgcuccggcaaguccuccaucaugcgcuccgacgcccccaucggcaagugcaaguccgagugcaucacccccaacggcuccauccccaacgacaagcccuuccagaacgucaaccgcaucaccuacggcgccugcccccgcuacgucaagcaguccacccucaagcucgccaccggcaugcgcaacguccccgagaagcagacccgcggcaucuucggcgccaucgccggcuucaucgagaacggcugggagggcauggucgacggcugguacggcuuccgccaccagaacuccgagggccgcggccaggccgccgaccucaaguccacccaggccgccaucgaccagaucaacggcaagcucaaccgccucaucggcaagaccaacgagaaguuccaccagaucgagaaggaguucuccgaggucgagggccgcauccaggaccucgagaaguacgucgaggacaccaagaucgaccucugguccuacaacgccgagcuccucgucgcccucgagaaccagcacaccaucgaccucaccgacuccgagaugaacaagcucuucgagaagaccaagaagcagcuccgcgagaacgccgaggacaugggcaacggcugcuucaagaucuaccacaagugcgacaacgccugcaucggcuccauccgcaacggcaccuacgaccacaacgucuaccgcgacgaggcccucaacaaccgcuuccagaucaagggcgucgagcucaaguccggcuacaaggacuggauccucuggaucuccuucgccaucuccugcuuccuccucugcgucgcccuccucggcuucaucaugugggccugccagaagggcaacauccgcugcaacaucugcaucuga

SEQ ID NO: 106542 - RNA, 1701 nt, Artificial Sequence; identical to SEQ ID NO: 105894
  derived and/or modified CDS sequence (opt2) from hemagglutinin__InfluenzaA__AGW00865

SEQ ID NO: 106543 - RNA, 1701 nt, Artificial Sequence
  derived and/or modified CDS sequence (opt2) from hemagglutinin__InfluenzaA__AGW00877
augaagaccaucaucgcccucuccuacauccucugccucgucuucgcccaggagcuccccggcaacgacgacuccaccgccacccucugccucggccaccacgccguccccaacggcaccaucgucaagaccaucaccaacgaccagaucgaggucaccaacgccaccgagcucguccaguccuccuccaccggcgagaucugcaacuccccccaccagauccucgacggcgagaacugcacccucaucgacgcccuccucggcgacccccagugcgacggcuuccagaacaagaagugggaccucuucgucgagcgcuccaaggcccacuccaacugcuaccccuacgacguccccgacuacgccucccuccgcucccucgucgccuccuccggcacccucgaguucaacaacgaguccuucaacuggaccggcgucacccagaacggcaccuccuccgccugcauccgccgcuccaacaacuccuucuucucccgccucaacuggcucacccaccucaacuucaaguaccccgcccucaacgucaccaugcccaacaacgagcaguucgacaagcucuacaucuggggcguccaccaccccggcaccgacaaggaccagaucuuccucuacgcccaggccuccggccgcaucaccgucuccaccaagcgcucccagcaggccgucauccccaacaucggcuuccgcccccgcguccgcaacauccccucccgcgucuccaucuacuggaccaucgucaagcccggcgacauccuccucaucaacuccaccggcaaccucaucgccccccgcggcuacuucaagauccgcuccggcaaguccuccaucaugcgcuccgacgcccccaucggcaagugcaacuccgccugcaucacccccaacggcuccauccccaacgacaagcccuuccagaacgucaaccgcaucaccuacggcgccugcccccgcuacgucaagcagaacacccucaagcucgccaccggcaugcgcaacguccccgagaagcagacccgcggcaucuucggcgccaucgccggcuucaucgagaacggcugggagggcauggucgacggcugguacggcuuccgccaccagaacuccgagggccgcggccaggccgccgaccucaaguccacccaggccgccaucgaccagaucaacggcaagcucaaccgccucaucggcaagaccaacgagaaguuccaccagaucgagaaggaguucuccgaggucgagggccgcauccaggaccucgagaaguacgucgaggacaccaagaucgaccucugguccuacaacgccgagcuccucgucgcccucgagaaccagcacaccaucgaccucaccgacuccgagaugaacaagcucuucgagaagaccaagaagcagcuccgcgagaacgccgaggacaugggcaacggcugcuucaagaucuaccacaagugcgacaacgccugcaucggcuccauccgcaacggcaccuacgaccacgacgucuaccgcgacgaggcccucaacaaccgcuuccagaucaagggcgucgagcucaaguccggcuacaaggacuggauccucuggaucuccuucgccaucuccugcuuccuccucugcgucgcccuccucggcuucaucaugugggccugccagaagggcaacauccgcugcaacaucugcaucuga

SEQ ID NO: 106544 - RNA, 1701 nt, Artificial Sequence
  derived and/or modified CDS sequence (opt2) from hemagglutinin__InfluenzaA__AGW00889
augaagaccaucaucgcccucuccuacauccucugccucgucuucgcccagaagcuccccggcaacgacaacuccaccgccacccucugccucggccaccacgccguccccaacggcaccaucgucaagaccaucaccaacgaccgcaucgaggucaccaacgccaccgagcucguccagaacuccuccaucggcgagaucugcgacuccccccaccagauccucgacggcgagaacugcacccucaucgacgcccuccucggcgacccccagugcgacggcuuccagaacaagaagugggaccucuucgucgagcgcuccaaggccuacuccaacugcuaccccuacgacguccccgacuacgccucccuccgcucccucgucgccuccuccggcacccucgaguucaacaacgaguccuucaacuggaccggcgucacccagaacggcaccuccuccgccugcauccgccgcuccaacuccuccuucuucucccgccucaacuggcucacccaccucaacuucaaguaccccgcccucaacgucaccaugcccaacaacgagcaguucgacaagcucuacaucuggggcguccaccaccccggcaccgacaaggaccagaucuuccucuacgcccaguccuccggccgcaucaccgucuccaccaagcgcucccagcaggccgucauccccaacaucggcucccgcccccgcauccgcaacauccccucccgcaucuccaucuacuggaccaucgucaagcccggcgacauccuccucaucaacuccaccggcaaccucaucgccccccgcggcuacuucaagauccgcuccggcaaguccuccaucaugcgcuccgacgcccccaucggcaagugcaaguccgagugcaucacccccaacggcuccauccccaacgacaagcccuuccagaacgucaaccgcaucaccuacggcgccugcccccgcuacgucaagcaguccacccucaagcucgccaccggcaugcgcaacguccccgagaagcagacccgcggcaucuucggcgccaucgccggcuucaucgagaacggcugggagggcauggucgacggcugguacggcuuccgccaccagaacuccgagggccgcggccaggccgccgaccucaaguccacccaggccgccaucgaccagaucaacggcaagcucaaccgccucaucggcaagaccaacgagaaguuccaccagaucgagaaggaguucuccgaggucgagggccgcauccaggaccucgagaaguacgucgaggacaccaagaucgaccucugguccuacaacgccgagcuccucgucgcccucgagaaccagcacaccaucgaccucaccgacuccgagaugaacaagcucuucgagaagaccaagaagcagcuccgcgagaacgccgaggacaugggcaacggcugcuucaagaucuaccacaagugcgacaacgccugcaucggcuccauccgcaacggcaccuacgaccacaacgucuaccgcgacgaggcccucaacaaccgcuuccagaucaagggcgucgagcucaaguccggcuacaaggacuggguccucuggaucuccuucgccaucuccugcuuccuccucugcgucgcccuccucggcuucaucaugugggccugccagaagggcaacauccgcugcaacaucugcaucuga

SEQ ID NO: 106545 - RNA, 1701 nt, Artificial Sequence; identical to SEQ ID NO: 105894
  derived and/or modified CDS sequence (opt2) from hemagglutinin__InfluenzaA__AGW00901

SEQ ID NO: 106546 - RNA, 1701 nt, Artificial Sequence; identical to SEQ ID NO: 105894
  derived and/or modified CDS sequence (opt2) from hemagglutinin__InfluenzaA__AGW00913

SEQ ID NO: 106547 - RNA, 1701 nt, Artificial Sequence; identical to SEQ ID NO: 106030
  derived and/or modified CDS sequence (opt2) from hemagglutinin__InfluenzaA__AGW00931

SEQ ID NO: 106548 - RNA, 1701 nt, Artificial Sequence; identical to SEQ ID NO: 106030
  derived and/or modified CDS sequence (opt2) from hemagglutinin__InfluenzaA__AGW01244

SEQ ID NO: 106549 - RNA, 1701 nt, Artificial Sequence; identical to SEQ ID NO: 105904
  derived and/or modified CDS sequence (opt2) from hemagglutinin__InfluenzaA__AGW01256

SEQ ID NO: 106550 - RNA, 1701 nt, Artificial Sequence
  derived and/or modified CDS sequence (opt2) from hemagglutinin__InfluenzaA__AGW01295
augaagaccaucaucgcccucuccuacauccucugccucgucuucgcccagaagcuccccggcaacgacaacuccaccgccacccucugccucggccaccacgccguccccaacggcaccaucgucaagaccaucaccaacgaccgcaucgaggucaccaacgccaccgagcucguccagaacuccuccaucggcgagaucugcgacuccccccaccagauccucgacggcgagaacugcacccucaucgacgcccuccucggcgacccccagugcgacggcuuccagaacaagaagugggaccucuucgucgagcgcuccaaggccuacuccaacugcuaccccuacgacguccccgacuacgccucccuccgcucccucgucgccuccuccggcacccucgaguucaacaacgaguccuucaacuggaccggcgucacccagaacggcaccuccuccgccugcauccgccgcuccaacuccuccuucuucucccgccucaacuggcucacccaccucaacuucaaguaccccgcccucaacgucaccaugcccaacaacgagcaguucgacaagcucuacaucuggggcguccaccaccccggcaccgacaaggaccagaucuuccucuacgcccaguccuccggccgcaucaccgucuccaccaagcgcucccagcaggccgucauccccaacaucggcucccgcccccgcauccgcaacauccccucccgcaucuccaucuacuggaccaucgucaagcccggcgacauccuccucaucaacuccaccggcaaccucaucgccccccgcggcuacuucaagauccgcuccggcaaguccuccaucaugcgcuccgacgcccccaucggcaagugcaaguccgagugcaucacccccaacggcuccauccccaacgacaagcccuuccagaacgucaaccgcaucaccuacggcgccugcccccgcuacgucaagcaguccacccucaagcucgccaccggcaugcgcaacguccccgagaagcagacccgcggcaucuucggcgccaucgccggcuucaucgagaacggcugggagggcauggucgacggcugguacggcuuccgccaccagaacuccgagggccgcggccaggccgccgaccucaaguccacccaggccgccaucgaccagaucaacggcaagcucaaccgccucaucggcaagaccaacgagaaguuccaccagaucgagaaggaguucuccgaggucgagggccgcauccaggaccucgagaaguacgucgaggacaccaagaucgaccucugguccuacaacgccgagauccucgucgcccucgagaaccagcacaccaucgaccucaccgacuccgagaugaacaagcucuucgagaagaccaagaagcagcuccgcgagaacgccgaggacaugggcaacggcugcuucaagaucuaccacaagugcgacaacgccugcaucggcuccauccgcaacggcaccuacgaccacaacgucuaccgcgacgaggcccucaacaaccgcuuccagaucaagggcgucgagcucaaguccggcuacaaggacuggauccucuggaucuccuucgccaucuccugcuuccuccucugcgucgcccuccucggcuucaucaugugggccugccagaagggcaacauccgcugcaacaucugcaucuga

SEQ ID NO: 106551 - RNA, 1701 nt, Artificial Sequence; identical to SEQ ID NO: 105894
  derived and/or modified CDS sequence (opt2) from hemagglutinin__InfluenzaA__AGW01307

SEQ ID NO: 106552 - RNA, 1701 nt, Artificial Sequence
  derived and/or modified CDS sequence (opt2) from hemagglutinin__InfluenzaA__AGW01319
augaagaccaucaucgcccucuccuacauccucugccucgucuucgcccaggagcuccccggcaacgacgacuccaccgccacccucugccucggccaccacgccguccccaacggcaccaucgucaagaccaucaccaacgaccagaucgaggucaccaacgccaccgagcucguccaguccuccuccaccggcgagaucugcaacuccccccaccagauccucgacggcgagaacugcacccucaucgacgcccuccucggcgacccccagugcgacggcuuccagaacaagaagugggaccucuucgucgagcgcuccaaggcccacuccaacugcuaccccuacgacguccccgacuacgccucccuccgcucccucgucgccuccuccggcacccucgaguucaacaacgaguccuucaacuggaccggcgucacccaggacggcaccuccuccgccugcauccgccgcuccaacaacuccuucuucucccgccucaacuggcucacccaccucaacuucaaguaccccgcccucaacgucaccaugcccaacaacgagcaguucgacaagcucuacaucuggggcguccaccaccccggcaccgacaaggaccagaucuuccucuacgcccaggccuccggccgcaucaccgucuccaccaagcgcucccagcaggccgucauccccaacaucggcucccgcccccgcguccgcaacauccccucccgcgucuccaucuacuggaccaucgucaagcccggcgacauccuccucaucaacuccaccggcaaccucaucgccccccgcggcuacuucaagauccgcuccggcaaguccuccaucaugcgcuccgacgcccccaucggcaagugcaacuccgccugcaucacccccaacggcuccauccccaacgacaagcccuuccagaacgucaaccgcaucaccuacggcgccugcccccgcuacgucaagcagaacacccucaagcucgccaccggcaugcgcaacguccccgagaagcagacccgcggcaucuucggcgccaucgccggcuucaucgagaacggcugggagggcauggucgacggcugguacggcuuccgccaccagaacuccgagggccgcggccaggccgccgaccucaaguccacccaggccgccaucgaccagaucaacggcaagcucaacaagcucaucggcaagaccaacgagaaguuccaccagaucgagaaggaguucuccgaggucgagggccgcauccaggaccucgagaaguacgucgaggacaccaagaucgaccucugguccuacaacgccgagcuccucgucgcccucgagaaccagcacaccaucgaccucaccgacuccgagaugaacaagcucuucgagaagaccaagaagcagcuccgcgagaacgccgaggacaugggcaacggcugcuucaagaucuaccacaagugcgacaacgccugcaucggcuccauccgcaacggcaccuacgaccacgacgucuaccgcgacgaggcccucaacaaccgcuuccagaucaagggcgucgagcucaaguccggcuacaaggacuggauccucuggaucuccuucgccaucuccugcuuccuccucugcgucgcccuccucggcuucaucaugugggccugccagaagggcaacauccgcugcaacaucugcaucuga

SEQ ID NO: 106553 - RNA, 1701 nt, Artificial Sequence
  derived and/or modified CDS sequence (opt2) from hemagglutinin__InfluenzaA__AGW01331
augaagaccaucaucgcccucuccuacauccucugccucgucuucgcccagaagcuccccggcaacgacaacuccaccgccacccucugccucggccaccacgccguccccaacggcaccaucgucaagaccaucaccaacgaccgcaucgaggucaccaacgccaccgagcucguccagaacuccuccaucggcgagaucugcgacuccccccaccagauccucgacggcgagaacugcacccucaucgacgcccuccucggcgacccccagugcgacggcuuccagaacaagaagugggaccucuucgucgagcgcuccaaggccuacuccaacugcuaccccuacgacguccccgacuacgccucccuccgcucccucgucgccuccuccggcacccucgaguucaacaacgaguccuucaacugggccggcgucacccagaacggcaccuccuccgccugcauccgcggcuccaacuccuccuucuucucccgccucaacuggcucacccaccucaacuucaaguaccccgcccucaacgucaccaugcccaacaacgagcaguucgacaagcucuacaucuggggcguccaccaccccggcaccgacaaggaccagaucuuccucuacgcccaguccuccggccgcaucaccgucuccaccaagcgcucccagcaggccgucauccccaacaucggcucccgcccccgcauccgcaacauccccucccgcaucuccaucuacuggaccaucgucaagcccggcgacauccuccucaucaacuccaccggcaaccucaucgccccccgcggcuacuucaagauccgcuccggcaaguccuccaucaugcgcuccgacgcccccaucggcaagugcaaguccgagugcaucacccccaacggcuccauccccaacgacaagcccuuccagaacgucaaccgcaucaccuacggcgccugcccccgcuacgucaagcaguccacccucaagcucgccaccggcaugcgcaacguccccgagaagcagacccgcggcaucuucggcgccaucgccggcuucaucgagaacggcugggagggcauggucgacggcugguacggcuuccgccaccagaacuccgagggccgcggccaggccgccgaccucaaguccacccaggccgccaucgaccagaucaacggcaagcucaaccgccucaucggcaagaccaacgagaaguuccaccagaucgagaaggaguucuccgaggucgagggccgcauccaggaccucgagaaguacgucgaggacaccaagaucgaccucugguccuacaacgccgagcuccucgucgcccucgagaaccagcacaccaucgaccucaccgacuccgagaugaacaagcucuucgagaagaccaagaagcagcuccgcgagaacgccgaggacaugggcaacggcugcuucaagaucuaccacaagugcgacaacgccugcaucggcuccauccgcaacggcaccuacgagcacgacgucuaccgcgacgaggcccucaacaaccgcuuccagaucaagggcgucgagcucaaguccggcuacaaggacuggauccucuggaucuccuucgccaucuccugcuuccuccucugcgucgcccuccucggcuucaucaugugggccugccagaagggcaacauccgcugcaacaucugcaucuga

SEQ ID NO: 106554 - RNA, 1701 nt, Artificial Sequence; identical to SEQ ID NO: 106030
  derived and/or modified CDS sequence (opt2) from hemagglutinin__InfluenzaA__AGW01343

SEQ ID NO: 106555 - RNA, 1701 nt, Artificial Sequence; identical to SEQ ID NO: 106033
  derived and/or modified CDS sequence (opt2) from hemagglutinin__InfluenzaA__AGW01355

SEQ ID NO: 106556 - RNA, 1701 nt, Artificial Sequence; identical to SEQ ID NO: 105904
  derived and/or modified CDS sequence (opt2) from hemagglutinin__InfluenzaA__AGW01367

SEQ ID NO: 106557 - RNA, 1701 nt, Artificial Sequence; identical to SEQ ID NO: 106030
  derived and/or modified CDS sequence (opt2) from hemagglutinin__InfluenzaA__AGW01391

SEQ ID NO: 106558 - RNA, 1701 nt, Artificial Sequence
  derived and/or modified CDS sequence (opt2) from hemagglutinin__InfluenzaA__AGW01403
augaagaccaucaucgcccucuccuacauccucugccucaucuucgcccagaagcuccccggcaacgacaacuccaccgccacccucugccucggccaccacgccguccccaacggcaccaucgucaagaccaucaccaacgaccagaucgaggucaccaacgccaccgagcucguccaguccuccuccaccggcgagaucugcaacuccccccaccagauccucgacggcgagaacugcacccucaucgacgcccuccucggcgacccccagugcgacggcuuccagaacaagaagugggaccucuucgucgagcgcuccaaggcccacuccaacugcuaccccuacgacguccccgacuacgccucccuccgcucccucgucgccuccuccggcacccucgaguucaacaacgaguccuucaacuggaccggcgucacccagaacggcaccuccuccgccugcauccgccgcuccaacaacuccuucuucucccgccucaacuggcucacccaccucaacuucaaguaccccgcccucaacgucaccaugcccaacaacgagcaguucgacaagcucuacaucuggggcguccaccaccccggcaccgacaaggaccagaucuuccucuacgcccaggccgccggccgcaucaccgucuccaccaagcgcucccagcaggccgucauccccaacaucggcucccgcccccgcguccgcaacauccccucccgcgucuccaucuacuggaccaucgucaagcccggcgacauccuccucaucaacuccaccggcaaccucaucgccccccgcggcuacuucaagauccgcuccggcaaguccuccaucaugcgcuccgacgcccccaucggcaagugcaacuccgccugcaucacccccaacggcuccauccccaacgacaagcccuuccagaacgucaaccgcaucaccuacggcgccugcccccgcuacgucaagcagaacacccucaagcucgccaccggcaugcgcaacguccccgagaagcagacccgcggcaucuucggcgccaucgccggcuucaucgagaacggcugggagggcauggucgacggcugguacggcuuccgccaccagaacuccgagggccgcggccaggccgccgaccucaaguccacccaggccgccaucgaccagaucaacggcaagcucaaccgccucaucggcaagaccaacgagaaguuccaccagaucgagaaggaguucuccgaggucgagggccgcauccaggaccucgagaaguacgucgaggacaccaagaucgaccucugguccuacaacgccgagcuccucgucgcccucgagaaccagcacaccaucgaccucaccgacuccgagaugaacaagcucuucgagaagaccaagaagcagcuccgcgagaacgccgaggacaugggcaacggcugcuucaagaucuaccacaagugcgacaacgccugcaucggcuccauccgcaacggcaccuacgaccacuacgucuaccgcgacgaggcccucaacaaccgcuuccagaucaagggcgucgagcucaaguccggcuacaaggacuggauccucuggaucuccuucgccaccuccugcuuccuccucugcgucgcccuccucggcuucaucaugugggccugccagaagggcaacauccgcugcaacaucugcaucuga

SEQ ID NO: 106559 - RNA, 1701 nt, Artificial Sequence; identical to SEQ ID NO: 105894
  derived and/or modified CDS sequence (opt2) from hemagglutinin__InfluenzaA__AGW01415

SEQ ID NO: 106560 - RNA, 1701 nt, Artificial Sequence; identical to SEQ ID NO: 105894
  derived and/or modified CDS sequence (opt2) from hemagglutinin__InfluenzaA__AGW01427

SEQ ID NO: 106561 - RNA, 1701 nt, Artificial Sequence; identical to SEQ ID NO: 105894
  derived and/or modified CDS sequence (opt2) from hemagglutinin__InfluenzaA__AGW01439

SEQ ID NO: 106562 - RNA, 1701 nt, Artificial Sequence
  derived and/or modified CDS sequence (opt2) from hemagglutinin__InfluenzaA__AGW01451
augaagaccaucaucgcccucuccuacauccucugccucgucuucgcccagaagcuccccggcaacgacaacuccaccgccacccucugccucggccaccacgccguccccaacggcaccaucgucaagaccaucaccaacgaccgcaucgaggucaccaacgccaccgagcucguccagaacuccuccaucggcgagaucugcgacuccccccaccagauccucgacggcgagaacugcacccucaucgacgcccuccucggcgacccccagugcgacggcuuccagaacaagaagugggaccucuucgucgagcgcuccaaggccuacuccaacugcuaccccuacgacguccccgacuacgccucccuccgcucccucgucgccuccuccggcacccucgaguucaacaacgaguccuucaacugggccggcgucacccagaacggcaccuccuccgccugcauccgcggcuccaacuccuccuucuucucccgccucaacuggcucacccaccucaacuucaaguaccccgcccucaacgucaccaugcccaacaacgagcaguucgacaagcucuacaucuggggcguccaccaccccggcaccgacaaggaccagaucuuccucuacgcccaguccuccggccgcaucaccgucuccaccaagcgcucccagcaggccgucauccccaacaucggcucccgcccccgcauccgcaacauccccucccgcaucuccaucuacuggaccaucgucaagcccggcgacauccuccucaucaacuccaccggcaaccucaucgccccccgcggcuacuucaagauccgcuccggcaaguccuccaucaugcgcuccgacgcccccaucggcaagugcaaguccgagugcaucacccccaacggcuccauccccaacgacaagcccuuccagaacgucaaccgcaucaccuacggcgccugcccccgcuacgucaagcaguccacccucaagcucgccaccggcaugcgcaacguccccgagaagcagacccgcggcaucuucggcgccaucgccggcuucaucgagaacggcugggagggcaugauggacggcugguacggcuuccgccaccagaacuccgagggccgcggccaggccgccgaccucaaguccacccaggccgccaucgaccagaucaacggcaagcucaaccgccucaucggcaagaccaacgagaaguuccaccagaucgagaaggaguucuccgaggucgagggccgcauccaggaccucgagaaguacgucgucgacaccaagaucgaccucugguccuacaacgccgagcuccucgucgcccucgagaaccagcacaccaucgaccucaccgacuccgagaugaacaagcucuucgagaagaccaagaagcagcuccgcgagaacgccgaggacaugggcaacggcugcuucaagaucuaccacaagugcgacaacgccugcaucggcuccauccgcaacggcaccuacgaccacgacgucuaccgcgacgaggcccucaacaaccgcuuccagaucaagggcgucgagcucaaguccggcuacaaggacuggauccucuggaucuccuucgccaucuccugcuuccuccucugcgucgcccuccucggcuucaucaugugggccugccagaagggcaacauccgcugcaacaucugcaucuga

SEQ ID NO: 106563 - RNA, 1701 nt, Artificial Sequence; identical to SEQ ID NO: 106030
  derived and/or modified CDS sequence (opt2) from hemagglutinin__InfluenzaA__AGW01463

SEQ ID NO: 106564 - RNA, 1701 nt, Artificial Sequence; identical to SEQ ID NO: 106030
  derived and/or modified CDS sequence (opt2) from hemagglutinin__InfluenzaA__AGW01475

SEQ ID NO: 106565 - RNA, 1701 nt, Artificial Sequence
  derived and/or modified CDS sequence (opt2) from hemagglutinin__InfluenzaA__AGW01487
augaagaccaucaucgcccucuccuacauccucugccucgucuucgcccagaagcuccccggcaacgacaacuccaccgccacccucugccucggccaccacgccguccccaacggcaccaucgucaagaccaucaccaacgaccgcaucgaggucaccaacgccaccgagcucguccagaacuccuccaucggcgagaucugcgacuccccccaccagauccucgacggcgagaacugcacccucaucgacgcccuccucggcgacccccagugcgacggcuuccagaacaagaagugggaccucuucgucgagcgcuccaaggccuacuccaacugcuaccccuacgacguccccgacuacgccucccuccgcucccucgucgccuccuccggcacccucgaguucaacaacgaguccuucaacuggaccggcgucacccagaacggcaccuccuccgccugcauccgccgcuccaacaacuccuucuucucccgccucaacuggcucacccacuccaacuucaaguaccccgcccucaacgucaccaugcccaacaacgagcaguucgacaagcucuacaucuggggcguccaccaccccggcaccggcaaggaccagaucuuccucuacgcccaguccuccggccgcaucaccgucuccaccaagcgcucccagcaggccgucauccccaacaucggcucccgcccccgcauccgcaacauccccucccgcaucuccaucuacuggaccaucgucaagcccggcgacauccuccucaucaacuccaccggcaaccucaucgccccccgcggcuacuucaagauccgcuccggcaaguccuccaucaugcgcuccgacgcccccaucggcaagugcaaguccgagugcaucacccccaacggcuccauccccaacgacaagcccuuccagaacgucaaccgcaucaccuacggcgccugcccccgcuacgucaagcaguccacccucaagcucgccaccggcaugcgcaacguccccgagaagcagacccgcggcaucuucggcgccaucgccggcuucaucgagaacggcugggagggcaugauggacggcugguacggcuuccgccaccagaacuccgagggccgcggccaggccgccgaccucaaguccacccaggccgccaucgaccagaucaacggcaagcucaaccgccucaucggcaagaccaacgagaaguuccaccagaucgagaaggaguucuccgaggucgagggccgcauccaggaccucgagaaguacgucgaggacaccaagaucgaccucugguccuacaacgccgagcuccucgucgcccucgagaaccagcacaccaucgaccucaccgacuccgagaugaacaagcucuucgagaagaccaagaagcagcuccgcgagaacgccgaggacaugggcaacggcugcuucaagaucuaccacaagugcgacaacgccugcaucggcuccauccgcaacggcaccuacgaccacgacgucuaccgcgacgaggcccucaacaaccgcuuccagaucaagggcgucgagcucaaguccggcuacaaggacuggauccucuggaucuccuucgccaucuccugcuuccuccucugcgucgcccuccucggcuucaucaugugggccugccagaagggcaacauccgcugcaacaucugcaucuga

SEQ ID NO: 106566 - RNA, 1701 nt, Artificial Sequence; identical to SEQ ID NO: 105894
  derived and/or modified CDS sequence (opt2) from hemagglutinin__InfluenzaA__AGW01499

SEQ ID NO: 106567 - RNA, 1701 nt, Artificial Sequence
  derived and/or modified CDS sequence (opt2) from hemagglutinin__InfluenzaA__AGW01511
augaagaccaucaucgcccucuccuacauccucugccucgucuucgcccagaagcuccccggcaacgacaacuccaccgccacccucugccucggccaccacgccguccccaacggcaccaucgucaagaccaucaccaacgaccgcaucgaggucaccaacgccaccgagcucguccagaacuccuccaucggcgagaucugcgacuccccccaccagauccucgacggcgagaacugcacccucaucgacgcccuccucggcgacccccagugcgacggcuuccagaacaagaagugggaccucuucgucgagcgcuccaaggccuacuccaacugcuaccccuacgacguccccgacuacgccucccuccgcucccucgucgccuccuccggcacccucgaguucaacaacgaguccuucaacugggccggcgucacccagaacggcaccuccuccgccugcauccgcggcuccaacuccuccuucuucucccgccucaacuggcucacccaccucaacuucaaguaccccgcccucaacgucaccaugcccaacaacgagcaguucgacaagcucuacaucuggggcguccaccaccccggcaccgacaaggaccagaucuuccucuacgcccaguccuccggccgcaucaccgucuccaccaagcgcucccagcaggccgucauccccaacaucggcucccgcccccgcauccgcaacauccccucccgcaucuccaucuacuggaccaucgucaagcccggcgacauccuccucaucaacuccaccggcaaccucaucgccccccgcggcuacuucaagauccgcuccggcaaguccuccaucaugcgcuccgacgcccccaucggcaagugcaaguccgagugcaucacccccaacggcuccauccccaacgacaagcccuuccagaacgucaaccgcaucaccuacggcgccugcccccgcuacgucaagcaguccacccucaagcucgccaccggcaugcgcaacguccccgagaagcagacccgcggcaucuucggcgccaucgccggcuucaucgagaacggcugggagggcauggucgacggcugguacggcuuccgccaccagaacuccgagggccgcggccaggccgccgaccucaaguccacccaggccgccaucgaccagaucaacggcaagcucaaccgccucaucggcaagaccaacgagaaguuccaccagaucgagaaggaguucuccgaggucgagggccgcauccaggaccucgagaaguacgucgaggacaccaagaucgaccucugguccuacaacgccgagcuccucgucgcccucgagaaccagcacaccaucgaccucaccgacuccgagaugaacaagcucuucgagaagaccaagaagcagcuccgcgagaacgccgaggacaugggcaacggcugcuucaagaucuaccacaagugcgacaacgccugcaucggcuccauccgcaacggcaccuacgaccacgacgucuaccgcgacgaggcccucaacaaccgcuuccagaucaagggcgucgagcucaaguccggcuacaaggacuggauccucuggaucuccuucgccaucuccugcuuccuccucugcgccgcccuccucggcuucaucaugugggccugccagaagggcaacauccgcugcaacaucugcaucuga

SEQ ID NO: 106568 - RNA, 1701 nt, Artificial Sequence
  derived and/or modified CDS sequence (opt2) from hemagglutinin__InfluenzaA__AGW01535
augaagaccaucaucgcccucuccuacauccucugccucgucuucgcccagaagcuccccggcaacgacaacuccaccgccacccucugccucggccaccacgccguccccaacggcaccaucgucaagaccaucaccaacgaccgcaucgaggucaccaacgccaccgagcucguccagaacuccuccaucggcgagaucugcgacuccccccaccagauccucgacggcgagaacugcacccucaucgacgcccuccucggcgacccccagugcgacggcuuccagaacaagaagugggaccucuucgucgagcgcuccaaggccuacuccaacugcuaccccuacgacguccccgacuacgccucccuccgcucccucgucgccuccuccggcacccucgaguucaacaaggaguccuucaacugggccggcgucacccagaacggcaccuccuccgccugcauccgcggcuccaacuccuccuucuucucccgccucaacuggcucacccaccucaacuucaaguaccccgcccucaacgucaccaugcccaacaacgagcaguucgacaagcucuacaucuggggcguccaccaccccggcaccgacaaggaccagaucuuccucuacgcccaguccuccggccgcaucaccgucuccaccaagcgcucccagcaggccgucauccccaacaucggcucccgcccccgcauccgcaacauccccucccgcaucuccaucuacuggaccaucgucaagcccggcgacauccuccucaucaacuccaccggcaaccucaucgccccccgcggcuacuucaagauccgcuccggcaaguccuccaucaugcgcuccgacgcccccaucggcaagugcaaguccgagugcaucacccccaacggcuccauccccaacgacaagcccuuccagaacgucaaccgcaucaccuacggcgccugcccccgcuacgucaagcaguccacccucaagcucgccaccggcaugcgcaacguccccgagaagcagacccgcggcaucuucggcgccaucgccggcuucaucgagaacggcugggagggcauggucgacggcugguacggcuuccgccaccagaacuccgagggccgcggccaggccgccgaccucaaguccacccaggccgccaucgaccagaucaacggcaagcucaaccgccucaucggcaagaccaacgagaaguuccaccagaucgagaaggaguucuccgaggucgagggccgcauccaggaccucgagaaguacgucgaggacaccaagaucgaccucugguccuacaacgccgagcuccucgucgcccucgagaaccagcacaccaucgaccucaccgacuccgagaugaacaagcucuucgagaagaccaagaagcagcuccgcgagaacgccgaggacaugggcaacggcugcuucaagaucuaccacaagugcgacaacgccugcaucggcuccauccgcaacggcaccuacgaccacgacgucuaccgcgacgaggcccucaacaaccgcuuccagaucaagggcgucgagcucaaguccggcuacaaggacuggauccucuggaucuccuucgccaucuccugcuuccuccucugcgucgcccuccucggcuucaucaugugggccugccagaagggcaacauccgcugcaacaucugcaucuga

SEQ ID NO: 106569 - RNA, 1701 nt, Artificial Sequence; identical to SEQ ID NO: 105894
  derived and/or modified CDS sequence (opt2) from hemagglutinin__InfluenzaA__AGW01547

SEQ ID NO: 106570 - RNA, 1701 nt, Artificial Sequence; identical to SEQ ID NO: 106030
  derived and/or modified CDS sequence (opt2) from hemagglutinin__InfluenzaA__AGW01559

SEQ ID NO: 106571 - RNA, 1701 nt, Artificial Sequence; identical to SEQ ID NO: 106030
  derived and/or modified CDS sequence (opt2) from hemagglutinin__InfluenzaA__AGW01571

SEQ ID NO: 106572 - RNA, 1701 nt, Artificial Sequence; identical to SEQ ID NO: 106030
  derived and/or modified CDS sequence (opt2) from hemagglutinin__InfluenzaA__AGW01583

SEQ ID NO: 106573 - RNA, 1701 nt, Artificial Sequence; identical to SEQ ID NO: 106030
  derived and/or modified CDS sequence (opt2) from hemagglutinin__InfluenzaA__AGW01595

SEQ ID NO: 106574 - RNA, 1701 nt, Artificial Sequence
  derived and/or modified CDS sequence (opt2) from hemagglutinin__InfluenzaA__AGW01607
augaagaccaucaucgcccucuccuacauccucugccucguccucgcccagaagcuccccggcaacgacaacuccaccgccacccucugccucggccaccacgccguccccaacggcaccaucgucaagaccaucaccaacgaccgcaucgaggucaccaacgccaccgagcucguccagaacuccuccaucggcgagaucugcgacuccccccaccagauccucgacggcgagaacugcacccucaucgacgcccuccucggcgacccccagugcgacggcuuccagaacaagaagugggaccucuucgucgagcgcuccaaggccuacuccaacugcuaccccuacgacguccccgacuacgccucccuccgcucccucgucgccuccuccggcacccucgaguucaacaacgaguccuucaacugggccggcgucacccagaacggcaccuccuccgccugcauccgcggcuccaacuccuccuucuucucccgccucaacuggcucacccaccucaacuucaaguaccccgcccucaacgucaccaugcccaacaacgagcaguucgacaagcucuacaucuggggcguccaccaccccggcaccgacaaggaccagaucuuccucuacgcccaguccuccggccgcaucaccgucuccaccaagcgcucccagcaggccgucauccccaacaucggcucccgcccccgcauccgcaacauccccucccgcaucuccaucuacuggaccaucgucaagcccggcgacauccuccucaucaacuccaccggcaaccucaucgccccccgcggcuacuucaagauccgcuccggcaaguccuccaucaugcgcuccgacgcccccaucggcaagugcaaguccgagugcaucacccccaacggcuccauccccaacgacaagcccuuccagaacgucaaccgcaucaccuacggcgccugcccccgcuacgucaagcaguccacccucaagcucgccaccggcaugcgcaacguccccgagaagcagacccgcggcaucuucggcgccaucgccggcuucaucgagaacggcugggagggcauggucgacggcugguacggcuuccgccaccagaacuccgagggccgcggccaggccgccgaccucaaguccacccaggccgccaucgaccagaucaacggcaagcucaaccgccucaucggcaagaccaacgagaaguuccaccagaucgagaaggaguucuccgaggucgagggccgcauccaggaccucgagaaguacgucgaggacaccaagaucgaccucugguccuacaacgccgagcuccucgucgcccucgagaaccagcacaccaucgaccucaccgacuccgagaugaacaagcucuucgagaagaccaagaagcagcuccgcgagaacgccgaggacaugggcaacggcugcuucaagaucuaccacaagugcgacaacgccugcaucggcuccauccgcaacggcaccuacgaccacgacgucuaccgcgacgaggcccucaacaaccgcuuccagaucaagggcgucgagcucaaguccggcuacaaggacuggauccucuggaucuccuucgccaucuccugcuuccuccucugcgucgcccuccucggcuucaucaugugggccugccagaagggcaacauccgcugcaacaucugcaucuga

SEQ ID NO: 106575 - RNA, 1701 nt, Artificial Sequence; identical to SEQ ID NO: 106033
  derived and/or modified CDS sequence (opt2) from hemagglutinin__InfluenzaA__AGW01619

SEQ ID NO: 106576 - RNA, 1701 nt, Artificial Sequence; identical to SEQ ID NO: 106030
  derived and/or modified CDS sequence (opt2) from hemagglutinin__InfluenzaA__AGW01631

SEQ ID NO: 106577 - RNA, 1701 nt, Artificial Sequence
  derived and/or modified CDS sequence (opt2) from hemagglutinin__InfluenzaA__AGW01643
augaagaccaucaucgcccucuccuacauccucugccucgucuucgcccagaagcuccccggcaacgacaacuccaccgccacccucugccucggccaccacgccguccccaacggcaccaucgucaagaccaucaccaacgaccgcaucgaggucaccaacgccaccgagcucguccagaacuccuccaucggcgagaucugcgacuccccccaccagauccucgacggcgagaacugcacccucaucgacgcccuccucggcgacccccagugcgacggcuuccagaacaagaagugggaccucuucgucgagcgcuccaaggccuacuccaacugcuaccccuacgacguccccgacuacgccucccuccgcucccucgucgccuccuccggcacccucgaguucaacaacgaguccuucaacuggaccggcgucacccagaacggcaccuccuccgccugcauccgcggcuccaacuccuccuucuucucccgccucaacuggcucacccaccucaacuucaaguaccccgcccucaacgucaccaugcccaacaacgagcaguucgacaagcucuacaucuggggcguccaccaccccggcaccgacaaggaccagaucuuccucuacgcccaguccuccggccgcaucaccgucuccaccaagcgcucccagcaggccgucauccccaacaucggcucccgcccccgcauccgcaacauccccucccgcaucuccaucuacuggaccaucgucaagcccggcgacauccuccucaucaacuccaccggcaaccucaucgccccccgcggcuacuucaagauccgcuccggcaaguccuccaucaugcgcuccgacgcccccaucggcaagugcaaguccgagugcaucacccccaacggcuccauccccaacgacaagcccuuccagaacgucaaccgcaucaccuacggcgccugcccccgcuacgucaagcaguccacccucaagcucgccaccggcaugcgcaacguccccgagaagcagacccgcggcaucuucggcgccaucgccggcuucaucgagaacggcugggagggcaugauggacggcugguacggcuuccgccaccagaacuccgagggccgcggccaggccgccgaccucaaguccacccaggccgccaucgaccagaucaacggcaagcucaaccgccucaucggcaagaccaacgagaaguuccaccagaucgagaaggaguucuccgaggucgagggccgcauccaggaccucgagaaguacgucgaggacaccaagaucgaccucugguccuacaacgccgagcuccucgucgcccucgagaaccagcacaccaucgaccucaccgacuccgagaugaacaagcucuucgagaagaccaagaagcagcuccgcgagaacgccgaggacaugggcaacggcugcuucaagaucuaccacaagugcgacaacgccugcaucggcuccauccgcaacggcaccuacgaccacgacgucuaccgcgacgaggcccucaacaaccgcuuccagaucaagggcgucgagcucaaguccggcuacaaggacuggauccucuggaucuccuucgccaucuccugcuuccuccucugcgucgcccuccucggcuucaucaugugggccugccagaagggcaacauccgcugcaacaucugcaucuga

SEQ ID NO: 106578 - RNA, 1701 nt, Artificial Sequence; identical to SEQ ID NO: 106030
  derived and/or modified CDS sequence (opt2) from hemagglutinin__InfluenzaA__AGW01655

SEQ ID NO: 106579 - RNA, 1701 nt, Artificial Sequence
  derived and/or modified CDS sequence (opt2) from hemagglutinin__InfluenzaA__AGW01667
augaagaccaucaucgcccucuccuacauccucugccucgucuucgcccagaagcuccccggcaacgacaacuccaccgccacccucugccucggccaccacgccguccccaacggcaccaucgucaagaccaucaccaacgaccgcaucgaggucaccaacgccaccgagcucguccagaacuccuccaucggcgagaucugcgacuccccccaccagauccucgacggcgagaacugcacccucaucgacgcccuccucggcgacccccagugcgacggcuuccagaacaagaagugggaccucuucgucgagcgcuccaaggccuacuccaacugcuaccccuacgacguccccgacuacgccucccuccgcucccucgucgccuccuccggcacccucgaguucaacaacgaguccuucaacugggccggcgucacccagaacggcaccuccuccgccugcauccgcggcuccaacuccuccuucuucucccgccucaacuggcucacccaccucaacuucaaguaccccgcccucaacgucaccaugcccaacaacgagcaguucgacaagcucuacaucuggggcguccaccaccccggcaccgacaaggaccagaucuuccucuacgcccaguccuccggccgcaucaccgucuccaccaagcgcucccagcaggccgucauccccaacaucggcucccgcccccgcauccgcaacauccccucccgcaucuccaucuacuggaccaucgucaagcccggcgacauccuccucaucaacuccaccggcaaccucaucgccccccgcggcuacuucaagauccgcuccggcaaguccuccaucaugcgcuccgacgcccccaucggcaagugcaaguccgagugcaucacccccaacggcuccauccccaacgacaagcccuuccagaacgucaaccgcaucaccuacggcgccugcccccgcuacgucaagcaguccacccucaagcucgccaccggcaugcgcaacguccccgagaagcagacccgcggcaucuucggcgccaucgccggcuucaucgagaacggcugggagggcauggucgacggcugguacggcuuccgccaccagaacuccgagggccgcggccaggccgccgaccucaaguccacccaggccgccaucgaccagaucaacggcaagcucaaccgccucaucggcaagaccaacgagaaguuccaccagaucgagaaggaguucuccgaggucgagggccgcauccaggaccucgagaaguacgucgaggacaccaagaucgaccucugguccuacaacgccgagcuccucgucgcccucgagaaccagcacaccaucgaccucaccgacuccgagaugaacaagcucuucgagaagaccaagaagcagcuccgcgagaacgccgaggacaugggcaacggcugcuucaagaucuaccacaagugcgacaacgccugcaucggcuccauccgcaacgagaccuacgaccacgacgucuaccgcgacgaggcccucaacaaccgcuuccagaucaagggcgucgagcucaaguccggcuacaaggacuggauccucuggaucuccuucgccaucuccugcuuccuccucugcgucgcccuccucggcuucaucaugugggccugccagaagggcaacauccgcugcaacaucugcaucuga

SEQ ID NO: 106580 - RNA, 1701 nt, Artificial Sequence; identical to SEQ ID NO: 106030
  derived and/or modified CDS sequence (opt2) from hemagglutinin__InfluenzaA__AGW01679

SEQ ID NO: 106581 - RNA, 1701 nt, Artificial Sequence
  derived and/or modified CDS sequence (opt2) from hemagglutinin__InfluenzaA__AGW01691
augaagaccaucaucgcccucuccuacauccucugccucgucuucgcccagaagcuccccggcaacgacaacuccaccgccacccucugccucggccaccacgccguccccaacggcaccaucgucaagaccaucaccaacgaccgcaucgaggucaccaacgccaccgagcucguccagaacuccuccaucggcgagaucugcgacuccccccaccagauccucgacggcgagaacugcacccucaucgacgcccuccucggcgacccccagugcgacggcuuccagaacaagaagugggaccucuucgucgagcgcuccaaggccuacuccaacugcuaccccuacgacguccccgacuacgccucccuccgcucccucgucgccuccuccggcacccucgaguucaacaacgaguccuucaacuggaccggcgucacccagaacggcaccuccuccgccugcauccgccgcuccaacuccuccuucuucucccgccucaacuggcucacccaccucaacuucaaguaccccgcccucaacgucaccaugcccaacaacgagcaguucgacaagcucuacaucuggggcguccaccaccccggcaccgacaaggaccagaucuuccucuacgcccaguccuccggccgcaucaccgucuccaccaagcgcucccagcaggccgucauccccaacaucggcucccgcccccgcauccgcaacauccccucccgcaucuccaucuacuggaccaucgucaagcccggcgacauccuccucaucaacuccaccggcaaccucaucgccccccgcggcuacuucaagauccgcuccggcaaguccuccaucaugcgcuccgacgcccccaucggcaagugcaaguccgagugcaucacccccaacggcuccauccccaacgacaagcccuuccagaacgucaaccgcaucaccuacggcgccugcccccgcuacgucaagcaguccacccucaagcucgccaccggcaugcgcaacguccccgagaagcagacccgcggcaucuucggcgccaucgccggcuucaucgagaacggcugggagggcauggucgacggcugguacggcuuccgccaccagaacuccgagggccgcggccaggccgccgaccucaaguccacccaggccgccaucgaccagaucaacggcaagcucaaccgccucaucggcaagaccaacgagaaguuccaccagaucgagaaggaguucuccgaggucgagggccgcauccaggaccucgagaaguacgucgaggacaccaagaucgaccucugguccuacaacgccgagcuccucgucgcccucgagaaccagcacaccaucgaccucaccgacuccgagaugaacaagcucuucgagaagaccaagaagcagcuccgcgagaacgccgaggacaugggcaacggcugcuucaagaucuaccacaagugcgacaacgccugcaucggcuccauccgcaacggcaccuacgaccacgacgucuaccgcgacgaggcccucaacaaccgcuuccagaucaagggcgucgagcucaaguccggcuacaaggacuggauccucuggaucuccuucgccaucuccugcuuccuccucugcgucgcccuccucggcuucgucaugugggccugccagaagggcaacauccgcugcaacaucugcaucuga

SEQ ID NO: 106582 - RNA, 1701 nt, Artificial Sequence; identical to SEQ ID NO: 105894
  derived and/or modified CDS sequence (opt2) from hemagglutinin__InfluenzaA__AGW01701

SEQ ID NO: 106583 - RNA, 1701 nt, Artificial Sequence; identical to SEQ ID NO: 105894
  derived and/or modified CDS sequence (opt2) from hemagglutinin__InfluenzaA__AGW01713

SEQ ID NO: 106584 - RNA, 1701 nt, Artificial Sequence
  derived and/or modified CDS sequence (opt2) from hemagglutinin__InfluenzaA__AGW01725
augaagaccaucaucgcccucuccuacauccucugccucgucuucgcccagaagcuccccggcaacgacaacuccaccgccacccucugccucggccaccacgccguccccaacggcaccaucgucaagaccaucaccaacgaccgcaucgaggucaccaacgccaccgagcucguccagaacuccuccaucggcgagaucugcgacuccccccaccagauccucgacggcgagaacugcacccucaucgacgcccuccucggcgacccccagugcgacggcuuccagaacaagaagugggaccucuucgucgagcgcuccaaggccuacuccaacugcuaccccuacgacguccccgacuacgccucccuccgcucccucgucgccuccuccggcacccucgaguucaacaacgaguccuucaacuggaccggcgucacccagaacggcaccuccuccgccugcauccgccgcuccaacuccuccuucuucucccgccucaacuggcucacccaccucaacuucaaguaccccgcccucaacgucaccaugcccaacaacgagcaguucgacaagcucuacaucuggggcguccaccaccccggcaccgacaaggaccagaucuuccucuacgcccaguccuccggccgcaucaccgucuccaccaagcgcucccagcaggccgucauccccaacaucggcucccgcccccgcauccgcaacauccccucccgcaucuccaucuacuggaccaucgucaagcccggcgacauccuccucaucaacuccaccggcaaccucaucgccccccgcggcuacuucaagauccgcuccggcaaguccuccaucaugcgcuccgacgcccccaucggcaagugcaaguccgagugcaucacccccaacggcuccauccccaacgacaagcccuuccagaacgucaaccgcaucaccuacggcgccugcccccgcuacgucaagcaguccacccucaagcucgccaccggcaugcgcaacguccccgagaagcagacccgcggcaucuucggcgccaucgccggcuucaucgagaacggcugggagggcauggucgacggcugguacggcuuccgccaccagaacuccgagggccgcggccaggccgccgaccucaaguccacccaggccgccaucgaccagaucaacggcaagcucaaccgccucaucggcaagaccaacgagaaguuccaccagaucgagaaggaguucuccgaggucgagggccgcauccaggaccucgagaaguacgucgaggacaccaagaucgaccucugguccuacaacgccgagcuccucgucgcccucgagaaccagcacaccaucgaccucaccgacuccgagaugaacaagcucuucgagaagaccaagaagcagcuccgcgagaacgccgaggacaugggcaacggcugcuucaagaucuaccacaagugcgacaacgccugcaucggcuccauccgcaacggcaccuacgaccacaacgucuaccgcgacgaggcccucaacaaccgcuuccagaucaagggcgucgagcucaaguccggcuacaaggacuggauccucuggaucuccuucgccaucuccugcuuccucaucugcgucgcccuccucggcuucaucaugugggccugccagaagggcaacauccgcugcaacaucugcaucuga

SEQ ID NO: 106585 - RNA, 1701 nt, Artificial Sequence; identical to SEQ ID NO: 105894
  derived and/or modified CDS sequence (opt2) from hemagglutinin__InfluenzaA__AGW01737

SEQ ID NO: 106586 - RNA, 1701 nt, Artificial Sequence; identical to SEQ ID NO: 106030
  derived and/or modified CDS sequence (opt2) from hemagglutinin__InfluenzaA__AGW01749

SEQ ID NO: 106587 - RNA, 1701 nt, Artificial Sequence; identical to SEQ ID NO: 106030
  derived and/or modified CDS sequence (opt2) from hemagglutinin__InfluenzaA__AGW01761

SEQ ID NO: 106588 - RNA, 1701 nt, Artificial Sequence; identical to SEQ ID NO: 105894
  derived and/or modified CDS sequence (opt2) from hemagglutinin__InfluenzaA__AGW01773

SEQ ID NO: 106589 - RNA, 1701 nt, Artificial Sequence; identical to SEQ ID NO: 106030
  derived and/or modified CDS sequence (opt2) from hemagglutinin__InfluenzaA__AGW01785

SEQ ID NO: 106590 - RNA, 1701 nt, Artificial Sequence; identical to SEQ ID NO: 105894
  derived and/or modified CDS sequence (opt2) from hemagglutinin__InfluenzaA__AGW01797

SEQ ID NO: 106591 - RNA, 1701 nt, Artificial Sequence; identical to SEQ ID NO: 106030
  derived and/or modified CDS sequence (opt2) from hemagglutinin__InfluenzaA__AGW01809

SEQ ID NO: 106592 - RNA, 1701 nt, Artificial Sequence; identical to SEQ ID NO: 106030
  derived and/or modified CDS sequence (opt2) from hemagglutinin__InfluenzaA__AGW01821

SEQ ID NO: 106593 - RNA, 1701 nt, Artificial Sequence; identical to SEQ ID NO: 106029
  derived and/or modified CDS sequence (opt2) from hemagglutinin__InfluenzaA__AGW01833

SEQ ID NO: 106594 - RNA, 1701 nt, Artificial Sequence
  derived and/or modified CDS sequence (opt2) from hemagglutinin__InfluenzaA__AGW01845
augaagaccaucaucgcccucuccuacauccucugccucgucuucgcccagaagcuccccggcaacgacaacuccaccgccacccucugccucggccaccacgccguccccaacggcaccaucgucaagaccaucaccaacgaccgcaucgaggucaccaacgccaccgagcucguccagaacuccuccaucggcgagaucugcgacuccccccaccagauccucgacggcgagaacugcacccucaucgacgcccuccucggcgacccccagugcgacggcuuccagaacaagaagugggaccucuucgucgagcgcuccaaggccuacuccaacugcuaccccuacgacguccccgacuacgccucccuccgcucccucgucgccuccuccggcacccucgaguucaccaacgaguccuucaacuggaccggcgucacccagaacggcaccuccuccgccugcauccgccgcuccaacuccuccuucuucucccgccucaacuggcucacccaccucaacuucaaguaccccgcccucaacgucaccaugcccaacaacgagcaguucgacaagcucuacaucuggggcguccaccaccccggcaccgacaaggaccagaucuuccucuacgcccaguccuccggccgcaucaccgucuccaccaagcgcucccagcaggccgucauccccaacaucggcucccgcccccgcauccgcaacauccccucccgcaucuccaucuacuggaccaucgucaagcccggcgacauccuccucaucaacuccaccggcaaccucaucgccccccgcggcuacuucaagauccgcuccggcaaguccuccaucaugcgcuccgacgcccccaucggcaagugcaaguccgagugcaucacccccaacggcuccauccccaacgacaagcccuuccagaacgucaaccgcaucaccuacggcgccugcccccgcuacgucaagcaguccacccucaagcucgccaccggcaugcgcaacguccccgagaagcagacccgcggcaucuucggcgccaucgccggcuucaucgagaacggcugggagggcauggucgacggcugguacggcuuccgccaccagaacuccgagggccgcggccaggccgccgaccucaaguccacccaggccgccaucgaccagaucaacggcaagcucaaccgccucaucggcaagaccaacgagaaguuccaccagaucgagaaggaguucuccgaggucgagggccgcauccaggaccucgagaaguacgucgaggacaccaagaucgaccucugguccuacaacgccgagcuccucgucgcccucgagaaccagcacaccaucgaccucaccgacuccgagaugaacaagcucuucgagaagaccaagaagcagcuccgcgagaacgccgaggacaugggcaacggcugcuucaagaucuaccacaagugcgacaacgccugcaucggcuccauccgcaacggcaccuacgaccacaacgucuaccgcgacgaggcccucaacaaccgcuuccagaucaagggcgucgagcucaaguccggcuacaaggacuggauccucuggaucuccuucgccaucuccugcuuccuccucugcgucgcccuccucggcuucaucaugugggccugccagaagggcaacauccgcugcaacaucugcaucuga

SEQ ID NO: 106595 - RNA, 1701 nt, Artificial Sequence; identical to SEQ ID NO: 106030
  derived and/or modified CDS sequence (opt2) from hemagglutinin__InfluenzaA__AGW01857

SEQ ID NO: 106596 - RNA, 1701 nt, Artificial Sequence; identical to SEQ ID NO: 106030
  derived and/or modified CDS sequence (opt2) from hemagglutinin__InfluenzaA__AGW01869

SEQ ID NO: 106597 - RNA, 1701 nt, Artificial Sequence; identical to SEQ ID NO: 106581
  derived and/or modified CDS sequence (opt2) from hemagglutinin__InfluenzaA__AGW01881

SEQ ID NO: 106598 - RNA, 1701 nt, Artificial Sequence; identical to SEQ ID NO: 105904
  derived and/or modified CDS sequence (opt2) from hemagglutinin__InfluenzaA__AGW01893

SEQ ID NO: 106599 - RNA, 1701 nt, Artificial Sequence; identical to SEQ ID NO: 105919
  derived and/or modified CDS sequence (opt2) from hemagglutinin__InfluenzaA__AGW01905

SEQ ID NO: 106600 - RNA, 1701 nt, Artificial Sequence; identical to SEQ ID NO: 106030
  derived and/or modified CDS sequence (opt2) from hemagglutinin__InfluenzaA__AGW01917

SEQ ID NO: 106601 - RNA, 1701 nt, Artificial Sequence; identical to SEQ ID NO: 105894
  derived and/or modified CDS sequence (opt2) from hemagglutinin__InfluenzaA__AGW01929

SEQ ID NO: 106602 - RNA, 1701 nt, Artificial Sequence; identical to SEQ ID NO: 106030
  derived and/or modified CDS sequence (opt2) from hemagglutinin__InfluenzaA__AGW01941

SEQ ID NO: 106603 - RNA, 1701 nt, Artificial Sequence; identical to SEQ ID NO: 105894
  derived and/or modified CDS sequence (opt2) from hemagglutinin__InfluenzaA__AGW01953

SEQ ID NO: 106604 - RNA, 1701 nt, Artificial Sequence
  derived and/or modified CDS sequence (opt2) from hemagglutinin__InfluenzaA__AGW01965
augaagaccaucaucgcccucuccuacauccucugccucgucuucgcccaggagcuccccggcaacgacgacuccauggccacccucugccucggccaccacgccguccccaacggcaccaucgucaagaccaucaccaacgaccagaucgaggucaccaacgccaccgagcucguccaguccuccuccaccggcgagaucugcaacuccccccaccagauccucgacggcgagaacugcacccucaucgacgcccuccucggcgacccccagugcgacggcuuccagaacaagaagugggaccucuucgucgagcgcuccaaggcccacuccaacugcuaccccuacgacguccccgacuacgccucccuccgcucccucgucgccuccuccggcacccucgaguucaacaacgaguccuucaacuggaccggcgucacccagaacggcaccuccuccgccugcauccgccgcuccaacaacuccuucuucucccgccucaacuggcucacccaccucaacuucaaguaccccgcccucaacgucaccaugcccaacaacgagcaguucgacaagcucuacaucuggggcguccaccaccccggcaccgacaaggaccagaucuuccucuacgcccaggccuccggccgcaucaccgucuccaccaagcgcucccagcaggccgucauccccaacaucggcucccgcccccgcguccgcaacauccccucccgcgucuccaucuacuggaccaucgucaagcccggcgacauccuccucaucaacuccaccggcaaccucaucgccccccgcggcuacuucaagauccgcuccggcaaguccuccaucaugcgcuccgacgcccccaucggcaagugcaacuccgccugcaucacccccaacggcuccauccccaacgacaagcccuuccagaacgucaaccgcaucaccuacggcgccugcccccgcuacgucaagcagaacacccucaagcucgccaccggcaugcgcaacguccccgagaagcagacccgcggcaucuucggcgccaucgccggcuucaucgagaacggcugggagggcauggucgacggcugguacggcuuccgccaccagaacuccgagggccgcggccaggccgccgaccucaaguccacccaggccgccaucgaccagaucaacggcaagcucaaccgccucaucggcaagaccaacgagaaguuccaccagaucgagaaggaguucuccgaggucgagggccgcauccaggaccucgagaaguacgucgaggacaccaagaucgaccucugguccuacaacgccgagcuccucgucgcccucgagaaccagcacaccaucgaccucaccgacuccgagaugaacaagcucuucgagaagaccaagaagcagcuccgcgagaacgccgaggacaugggcaacggcugcuucaagaucuaccacaagugcgacaacgacugcaucggcuccauccgcaacggcaccuacgaccacaacgucuaccgcgacgaggcccucaacaaccgcuuccagaucaagggcaucgagcucaaguccggcuacaaggacuggauccucuggaucuccuucgccaucuccugcuuccuccucugcgucgcccuccucggcuucaucaugugggccugccagaagggcaacauccgcugcaacaucugcaucuga

SEQ ID NO: 106605 - RNA, 1701 nt, Artificial Sequence; identical to SEQ ID NO: 106030
  derived and/or modified CDS sequence (opt2) from hemagglutinin__InfluenzaA__AGW01977

SEQ ID NO: 106606 - RNA, 1701 nt, Artificial Sequence; identical to SEQ ID NO: 106030
  derived and/or modified CDS sequence (opt2) from hemagglutinin__InfluenzaA__AGW01989

SEQ ID NO: 106607 - RNA, 1701 nt, Artificial Sequence; identical to SEQ ID NO: 106030
  derived and/or modified CDS sequence (opt2) from hemagglutinin__InfluenzaA__AGW02001

SEQ ID NO: 106608 - RNA, 1701 nt, Artificial Sequence; identical to SEQ ID NO: 106030
  derived and/or modified CDS sequence (opt2) from hemagglutinin__InfluenzaA__AGW02013

SEQ ID NO: 106609 - RNA, 1701 nt, Artificial Sequence; identical to SEQ ID NO: 105894
  derived and/or modified CDS sequence (opt2) from hemagglutinin__InfluenzaA__AGW02025

SEQ ID NO: 106610 - RNA, 1701 nt, Artificial Sequence; identical to SEQ ID NO: 106030
  derived and/or modified CDS sequence (opt2) from hemagglutinin__InfluenzaA__AGW02037

SEQ ID NO: 106611 - RNA, 1701 nt, Artificial Sequence; identical to SEQ ID NO: 106030
  derived and/or modified CDS sequence (opt2) from hemagglutinin__InfluenzaA__AGW02061

SEQ ID NO: 106612 - RNA, 1701 nt, Artificial Sequence; identical to SEQ ID NO: 106030
  derived and/or modified CDS sequence (opt2) from hemagglutinin__InfluenzaA__AGW02073

SEQ ID NO: 106613 - RNA, 1701 nt, Artificial Sequence; identical to SEQ ID NO: 106030
  derived and/or modified CDS sequence (opt2) from hemagglutinin__InfluenzaA__AGW02085

SEQ ID NO: 106614 - RNA, 1701 nt, Artificial Sequence; identical to SEQ ID NO: 105919
  derived and/or modified CDS sequence (opt2) from hemagglutinin__InfluenzaA__AGW02097

SEQ ID NO: 106615 - RNA, 1701 nt, Artificial Sequence; identical to SEQ ID NO: 105894
  derived and/or modified CDS sequence (opt2) from hemagglutinin__InfluenzaA__AGW02109

SEQ ID NO: 106616 - RNA, 1701 nt, Artificial Sequence; identical to SEQ ID NO: 106030
  derived and/or modified CDS sequence (opt2) from hemagglutinin__InfluenzaA__AGW02133

SEQ ID NO: 106617 - RNA, 1701 nt, Artificial Sequence; identical to SEQ ID NO: 106030
  derived and/or modified CDS sequence (opt2) from hemagglutinin__InfluenzaA__AGW02157

SEQ ID NO: 106618 - RNA, 1701 nt, Artificial Sequence; identical to SEQ ID NO: 105894
  derived and/or modified CDS sequence (opt2) from hemagglutinin__InfluenzaA__AGW02169

SEQ ID NO: 106619 - RNA, 1701 nt, Artificial Sequence; identical to SEQ ID NO: 106030
  derived and/or modified CDS sequence (opt2) from hemagglutinin__InfluenzaA__AGW02181

SEQ ID NO: 106620 - RNA, 1701 nt, Artificial Sequence; identical to SEQ ID NO: 105904
  derived and/or modified CDS sequence (opt2) from hemagglutinin__InfluenzaA__AGW02193

SEQ ID NO: 106621 - RNA, 1701 nt, Artificial Sequence; identical to SEQ ID NO: 105871
  derived and/or modified CDS sequence (opt2) from hemagglutinin__InfluenzaA__AGW04171

SEQ ID NO: 106622 - RNA, 1707 nt, Artificial Sequence
  derived and/or modified CDS sequence (opt2) from hemagglutinin__InfluenzaA__AGW27061
auggagaagaucguccuccucuucgccaucgucaaccucgucaaguccgaccacaucugcaucggcuaccacgccaacaacuccaccgagcaggucgacaccaucauggagaagaacgucaccgucacccacgcccaggacauccucgagaagacccacaacggcaagcucugcgaccucaacggcgucaagccccucauccucaaggacugcuccgucgccggcuggcuccucggcaaccccaugugcgacgaguucaucgacguccccgagugguccuacaucgucgagaaggccaaccccgccaacgaccucugcuaccccggcaacuucaacgacuacgaggagcucaagcaccuccucucccgcaucaaccacuucgagaagauccgcaucauccccaaggacuccuggcccgaccacgaggccucccucggcgucuccgccgccugcuccuaccagggcaacuccuccuucuuccgcaacgucgucuggcuccucaagaagaacgacgccuaccccaucaucaagaaguccuacaacaacaccaacaaggaggaccuccucguccucuggggcauccaccaccccaacgacgaggccgagcagauccgccucuaccagaaccccaccaccuacgucuccaccggcaccuccacccucaaccagcgccucgucccccgcaucgccacccgcuccaaggucaacggccaguccggccgcaucgacuucuucuggaccauccucaagcccaacgacgccaucaacuucgaguccaacggcaacuucaucgcccccgaguacgccuacaagaucgucaagaagggcgacuccaccaucaugcgcuccgaggucgaguacggcaacugcuccacccgcugccagacccccaugggcgccaucaacuccuccaugcccuuccacaacauccacccccucaccaucggcgagugccccaaguacgucaaguccaacaagcucguccucgccaccggccuccgcaacuccccccagaucgagcgccgccgccgcaagcgcggccucuucggcgccaucgccggcuucaucgagggcggcuggcagggcauggucgacggcugguacggcuaccaccacuccaacgagcagggcuccggcuacgccgccgacaaggaguccacccagaaggccaucgacggcgucaccaacaaggucaacuccaucaucgacaagaugaacacccaguucgaggccgucggccgcgaguucaacaaccucgagcgccgcaucgagaaccucaacaagaagauggaggacggcuuccucgacgucuggaccuacaacgccgagcuccucguccucauggagaacgagcgcacccucgacuuccacgacuccaacgucaagaaccucuacgacaagguccgccuccagcuccgcgacaacgccaaggagcucggcaacggcugcuucgaguucuaccacaagugcgacaacgagugcauggaguccguccgcaacggcaccuacgacuacccccaguacuccgaggaggcccgccucaagcgcgaggagaucuccggcgucaagcucgaguccaucggcaccuaccagauccucuccaucuacuccaccgucgccuccucccucguccucuccaucauggucgccggccucucccucuggaugugcuccaacggcucccuccagugccgcaugugcaucuga

SEQ ID NO: 106623 - RNA, 1698 nt, Artificial Sequence
  derived and/or modified CDS sequence (opt2) from hemagglutinin__InfluenzaA__AGY14471
augaaggucaagcuccucauccuccucugcaccuucaccgccaccuacgccgacaccaucugcaucggcuaccacgccaacaacuccaccgacaccgucgacaccauccucgagaagaacgucaccgucacccacuccgucaaccuccucgaggacucccacaacggcaagcucugccuccucaagggcaucgccccccuccagcucggcaacugcuccgucgccggcuggauccucggcaaccccgagugcggccuccucauccccaaggaguccugguccuacaucgucgagacccccaaccccgagaacggcaccugcuaccccggcuacuucgacgacuacgaggagcuccgcgagcagcucuccuccgucuccuccuucgagcgcuucgagaucuuccccaaggaguccuccuggcccaaccacaccgucaccggcgucuccgccuccugcucccacaacggcaaguccuccuucuaccgcaaccuccucuggcucaccggcaagaacggccucuaccccaaccucuccaaguccuacgccaacaacaaggagaaggagguccucauccucuggggcguccaccaccccuccaacaucggcaaccagcgcacccucuaccacaccgagaacaccuacgucuccgucgucuccucccacuacucccgccgcuucacccccgagaucaccaagcgccccaagguccgcgaccaggagggccgcaucaacuacuacuggacccuccucgagcccggcgacaccaucaucuucgaggccaacggcaaccucaucgcccccugguacgccuucgcccucuccaagggcuucggcuccggcaucaucaccuccaacgcccccauggacgagugcgacgccaagugccagaccccccagggcgccaucaacuccaaccuccccuuccagaacguccaccccgucaccaucggcgagugccccaaguacguccgcuccaccaagcuccgcauggucaccggccuccgcaacauccccuccauccagucccgcggccucuucggcgccaucgccggcuucaucgagggcggcuggaccggcauggucgacggcugguacggcuaccaccaccagaacgagcagggcuccggcuacgccgccgaccaggaguccacccagaacgccaucaacggcaucaccaacaaggucaacuccgucaucgagaagaugaacacccaguucaccgucgucggcaaggaguucaacaagcucgagcgccgcauggagaaccucaacaagaaggucgacgacggcuuccucgacaucuggaccuacaacgccgagcuccucguccuccucgagaacgagcgcacccucgacuuccacgacuccaacgucaugaaccucuacgagaaggucaagggccagcucaagaacaacgccaaggagaucggcaacggcugcuucgaguucuaccacaagugcaacaacgagugcauggaguccgucaagaacggcaccuacgacuaccccaaguacuccgaggaguccaagcucaaccgcgagaagaucgacggcgucaagcucgaguccaugggcgucuaccagauccucgccaucuacuccaccgucgccuccucccucguccuccucgucucccucggcgccaucuccuucuggaugugcuccaacggcucccuccagugccgcaucugcaucuga

SEQ ID NO: 106624 - RNA, 1698 nt, Artificial Sequence; identical to SEQ ID NO: 106623
  derived and/or modified CDS sequence (opt2) from hemagglutinin__InfluenzaA__AGY14477

SEQ ID NO: 106625 - RNA, 1701 nt, Artificial Sequence
  derived and/or modified CDS sequence (opt2) from hemagglutinin__InfluenzaA__AHC57459
augaagaccaucaucgcccucuccuacauccucugccucgucuucgcccagaagcuccccggcaacgacaacuccaccgccacccucugccucggccaccacgccguccccaacggcaccaucgucaagaccaucaccaacgaccagaucgaggucaccaacgccaccgagcucguccaguccuccuccaccggcgagaucugcaacuccccccaccagauccucgacggcgagaacugcacccucaucgacgcccuccucggcgacccccagugcgacggcuuccagaacaagaagugggaccucuucgucgagcgcuccaaggcccacuccaacugcuaccccuacgacguccccgacuacgccucccuccgcucccucgucgccuccuccggcacccucgaguucaacaacgaguccuucaacuggaccggcgucacccagaacggcaccuccuccgccugcauccgccgcuccaacaacuccuucuucucccgccucaacuggcucacccaccucaacuucaaguaccccgcccucaacgucaccaugcccaacaacgagcaguucgacaagcucuacaucuggggcguccaccaccccggcaccgacaaggaccagaucuuccucuacgcccaggccgccggccgcaucaccgucuccaccaagcgcucccagcaggccgucauccccaacaucggcucccgcccccgcauccgcaacauccccucccgcgucuccaucuacuggaccaucgucaagcccggcgacauccuccucaucaacuccaccggcaaccucaucgccccccgcggcuacuucaagauccgcuccggcaaguccuccaucaugcgcuccgacgcccccaucggcaagugcaacuccgccugcaucacccccaacggcuccauccccaacgacaagcccuuccagaacgucaaccgcaucaccuacggcgccugcccccgcuacgucaagcagaacacccucaagcucgccaccggcaugcgcaacguccccgagaagcagacccgcggcaucuucggcgccaucgccggcuucaucgagaacggcugggagggcauggucgacggcugguacggcuuccgccaccagaacuccgagggccgcggccaggccgccgaccucaaguccacccaggccgccaucgaccagaucaacggcaagcucaaccgccucaucggcaagaccaacgagaaguuccaccagaucgagaaggaguucuccgaggucgagggccgcauccaggaccucgagaaguacgucgaggacaccaagaucgaccucugguccuacaacgccgagcuccucgucgcccucgagaaccagcacaccaucgaccucaccgacuccgagaugaacaagcucuucgagaagaccaagaagcagcuccgcgagaacgccgaggacaugggcaacggcugcuucaagaucuaccacaagugcgacaacgccugcaucggcuccauccgcaacggcaccuacgaccacgacgucuaccgcgacgaggcccucaacaaccgcuuccagaucaagggcgucgagcucaaguccggcuacaaggacuggauccucuggaucuccuucgccaucuccugcuuccuccucugcgucgcccuccucggcuucaucaugugggccugccagaagggcaacauccgcugcaacaucugcaucuga

SEQ ID NO: 106626 - RNA, 1701 nt, Artificial Sequence; identical to SEQ ID NO: 103018
  derived and/or modified CDS sequence (opt2) from hemagglutinin__InfluenzaA__AHC57465

SEQ ID NO: 106627 - RNA, 1701 nt, Artificial Sequence; identical to SEQ ID NO: 102891
  derived and/or modified CDS sequence (opt2) from hemagglutinin__InfluenzaA__AHC57487

SEQ ID NO: 106628 - RNA, 1701 nt, Artificial Sequence; identical to SEQ ID NO: 103818
  derived and/or modified CDS sequence (opt2) from hemagglutinin__InfluenzaA__AHC57499

SEQ ID NO: 106629 - RNA, 1701 nt, Artificial Sequence; identical to SEQ ID NO: 103818
  derived and/or modified CDS sequence (opt2) from hemagglutinin__InfluenzaA__AHC57511

SEQ ID NO: 106630 - RNA, 1701 nt, Artificial Sequence; identical to SEQ ID NO: 103818
  derived and/or modified CDS sequence (opt2) from hemagglutinin__InfluenzaA__AHC57523

SEQ ID NO: 106631 - RNA, 1701 nt, Artificial Sequence; identical to SEQ ID NO: 103018
  derived and/or modified CDS sequence (opt2) from hemagglutinin__InfluenzaA__AHC57675

SEQ ID NO: 106632 - RNA, 1701 nt, Artificial Sequence; identical to SEQ ID NO: 103018
  derived and/or modified CDS sequence (opt2) from hemagglutinin__InfluenzaA__AHC57827

SEQ ID NO: 106633 - RNA, 1701 nt, Artificial Sequence; identical to SEQ ID NO: 102891
  derived and/or modified CDS sequence (opt2) from hemagglutinin__InfluenzaA__AHC57956

SEQ ID NO: 106634 - RNA, 1701 nt, Artificial Sequence
  derived and/or modified CDS sequence (opt2) from hemagglutinin__InfluenzaA__AHC57981
augaagaccaucaucgcccucuccuacauccucugccucgucuucgcccagaagauccccggcaacgacaacuccaccgccacccucugccucggccaccacgccguccccaacggcaccaucgucaagaccaucaccaacgaccagaucgaggucaccaacgccaccgagcucguccagaacuccuccaccggcgagaucugcgacuccccccaccagauccucgacggcgagaacugcacccucaucgacgcccuccucggcgacccccagugcgacggcuuccagaacaagaagugggaccucuucgucgagcgcuccaaggccuacuccaacugcuaccccuacgacguccccgacuacgccucccuccgcucccucaucgccuccuccggcacccucgaguucaacaacgaguccuucaacuggaccggcgucacccagaacggcaccuccuccgccugcauccgccgcuccaacaacuccuucuucucccgccucaacuggcucacccaccucaacuucaaguaccccgcccucaacgucaccaugcccaacaacgagcaguucgacaagcucuacaucuggggcguccaccaccccggcaccgacaaggaccagaucuuccucuacgcccaggccuccggccgcaucaccgucuccaccaagcgcucccagcaggccgucauccccaacaucggcucccgcccccgcguccgcaacauccccucccgcaucuccaucuacuggaccaucgucaagcccggcgacauccuccucaucaacuccaccggcaaccucaucgccccccgcggcuacuucaagauccgcuccggcaaguccuccaucaugcgcuccgacgcccccaucggcaagugcaacuccgagugcaucacccccaacggcuccauccccaacgacaagcccuuccagaacgucaaccgcaucaccuacggcgccugcccccgcuacgucaagcagaacacccucaagcucgccaccggcaugcgcaacguccccgagaagcagacccgcggcaucuucggcgccaucgccggcuucaucgagaacggcugggagggcauggucgacggcugguacggcuuccgccaccagaacuccgagggccgcggccaggccgccgaccucaaguccacccaggccgccaucgaccagaucaacggcaaccucaaccgccucaucggcaagaccaacgagaaguuccaccagaucgagaaggaguucuccgaggucgagggccgcauccaggaccucgagaaguacgucgaggacaccaagaucgaccucugguccuacaacgccgagcuccucgucgcccucgagaaccagcacaccaucgaccucaccgacuccgagaugaacaagcucuucgagaagaccaagaagcagcuccgcgagaacgccgaggacaugggcaacggcugcuucaagaucuaccacaagugcgacaacgccugcaucggcuccauccgcaacggcaccuacgaccacgacgucuaccgcgacgaggcccucaacaaccgcuuccagaucaagggcgucgagcucaaguccggcuacaaggacuggauccucuggaucuccuucgccaucuccugcuuccuccucugcgucgcccuccucggcuucaucaugugggccugccagaagggcaacauccgcugcaacaucugcaucuga

SEQ ID NO: 106635 - RNA, 1701 nt, Artificial Sequence; identical to SEQ ID NO: 103818
  derived and/or modified CDS sequence (opt2) from hemagglutinin__InfluenzaA__AHC57993

SEQ ID NO: 106636 - RNA, 1701 nt, Artificial Sequence; identical to SEQ ID NO: 105110
  derived and/or modified CDS sequence (opt2) from hemagglutinin__InfluenzaA__AHC58005

SEQ ID NO: 106637 - RNA, 1701 nt, Artificial Sequence
  derived and/or modified CDS sequence (opt2) from hemagglutinin__InfluenzaA__AHC58017
augaagaccaucaucgcccucuccuacauccucugccucgucuucgcccagaagcuccccggcaacgacaacuccaccgccacccucugccucggccaccacgccguccccaacggcaccaucgucaagaccaucaccaacgaccagaucgaggucaccaacgccaccgagcucguccaguccuccuccaccggcgagaucugcaacuccccccaccagauccucgacggcgagaacugcacccucaucgacgcccuccucggcgacccccagugcgacggcuuccagaacaagaagugggaccucuucgucgagcgcuccaaggcccacuccaacugcuaccccuacgacguccccgacuacgccucccuccgcucccucgucgccuccuccggcacccucgaguucaacaacgaguccuucaacuggaccggcgucacccagaacggcaccuccuccgccugcauccgccgcuccaacaacuccuucuucucccgccucaacuggcucacccaccucaacuucaaguaccccgcccucaacgucaccaugcccaacaacgagcaguucgacaagcucuacaucuggggcguccaccaccccggcaccgacaaggaccagaucuuccucuacgcccaggccgccggccgcaucaccgucuccaccaagcgcucccagcaggccgucauccccaacaucggcucccgcccccgcguccgcaacauccccucccgcgucuccaucuacuggaccaucgucaagcccggcgacauccuccucaucaacuccaccggcaaccucaucgccccccgcggcuacuucaagauccgcuccggcaaguccuccaucaugcgcuccgacgcccccaucggcaagugcaacuccgccugcaucacccccaacggcuccauccccaacgacaagcccuuccagaacgucaaccgcaucaccuacggcgccugcccccgcuacgucaagcagaacacccucaagcucgccaccggcaugcgcaacguccccgagaagcagacccgcggcaucuucggcgccaucgccggcuucaucgagaacggcugggagggcauggucgacggcugguacggcuuccgccaccagaacuccgagggccgcggccaggccgccgaccucaaguccacccaggccgccaucgaccagaucaacggcaagcucaaccgccucaucggcaagaccaacgagaaguuccaccagaucgagaaggaguucuccgaggucgagggccgcauccaggaccucgagaaguacgucgaggacaccaagaucgaccucugguccuacaacgccgagcuccucgucgcccucgagaaccagcacaccaucgaccucaccgacuccgagaugaacaagcucuucgagaagaccaagaagcagcuccgcgagaacgccgaggacaugggcaacggcugcuucaagaucuaccacaagugcgacaacgccugcaucgucuccauccgcaacggcaccuacgaccacgacgucuaccgcgacgaggcccucaacaaccgcuuccagaucaagggcgucgagcucaaguccggcuacaaggacuggauccucuggaucuccuucgccaucuccugcuuccuccucugcgucgcccuccucggcuucaucaugugggccugccagaagggcaacauccgcugcaacaucugcaucuga

SEQ ID NO: 106638 - RNA, 1701 nt, Artificial Sequence
  derived and/or modified CDS sequence (opt2) from hemagglutinin__InfluenzaA__AHC58029
augaagaccaucaucgcccucuccuacauccucugccucgucuucgcccagaagcuccccggcaacgacaacuccaccgccacccucugccucggccaccacgccguccccaacggcaccaucgucaagaccaucaccaacgaccagaucgaggucaccaacgccaccgagcucguccaguccuccuccaccggcgagaucugcaacuccccccaccagauccucgacggcgagaacugcacccucaucgacgcccuccucggcgacccccagugcgacggcuuccagaacaagaagugggaccucuucgucgagcgcuccaaggcccacuccaacugcuaccccuacgacguccccgacuacgccucccuccgcucccucgucgccuccuccggcacccucgaguucaacaacgaguccuucaacuggaccggcgucacccagaacggcaccuccuccgccugcauccgcggcuccaacaacuccuucuucucccgccucaacuggcucacccagcucaacuucaaguaccccgcccucaacgucaccaugcccaacaacgagcaguucgacaagcucuacaucuggggcguccaccaccccggcaccgacaaggaccagaucuuccucuacgcccaggccuccggccgcaucaccgucuccaccaagcgcucccagcaggccgucauccccaacaucggcucccgcccccgcguccgcaacauccccucccgcgucuccaucuacuggaccaucgucaagcccggcgacauccuccucaucaacuccaccggcaaccucaucgccccccgcggcuacuucaagauccgcuccggcaaguccuccaucaugcgcuccgacgcccccaucggcaagugcaacuccgccugcaucacccccaacggcuccauccccaacgacaagcccuuccagaacgucaaccgcaucaccuacggcgccugcccccgcuacgucaagcagaacacccucaagcucgccaccggcaugcgcaacguccccgagaagcagacccgcggcaucuucggcgccaucgccggcuucaucgagaacggcugggagggcauggucgacggcugguacggcuuccgccaccagaacuccgagggccgcggccaggccgccgaccucaaguccacccaggccgccaucgaccagaucaacggcaagcucaaccgccucaucggcaagaccaacgagaaguuccaccagaucgagaaggaguucuccgaggucgagggccgcauccaggaccucgagaaguacgucgaggacaccaagaucgaccucugguccuacaacgccgagcuccucgucgcccucgagaaccagcacaccaucgaccucaccgacuccgagaugaacaagcucuucgagaagaccaagaagcagcuccgcgagaacgccgaggacaugggcaacggcugcuucaagaucuaccacaagugcgacaacgccugcaucggcuccauccgcaacggcaccuacgaccacgacgucuaccgcgacgaggcccucaacaaccgcuuccagaucaagggcgucgagcucaaguccggcuacaaggacuggauccucuggaucuccuucgccaucuccugcuuccuccucugcgucgcccuccucggcuucaucaugugggccugccagaagggcaacauccgcugcaacaucugcaucuga

SEQ ID NO: 106639 - RNA, 1701 nt, Artificial Sequence
  derived and/or modified CDS sequence (opt2) from hemagglutinin__InfluenzaA__AHC58050
augaagaccaucaucgcccucuccuacauccucugccucgucuucgcccagaagcuccccggcaacgacaacuccaccgccacccucugccucggccaccacgccguccccaacggcaccaucgucaagaccaucaccaacgaccagaucgaggucaccaacgccaccgagcucguccaguccuccuccaccggcgagaucugcgacuccccccaccagauccucgacggcgagaacugcacccucaucgacgcccuccucggcgacccccagugcgacggcuuccagaacaagaagugggaccucuucgucgagcgcuccaaggccuacuccaacugcuaccccuacgacguccccgacuacgccucccuccgcucccucgucgccuccuccggcacccucgaguucaacaacgaguccuucaacuggaccggcgucacccagaacggcaccuccuccgccugcauccgccgcuccaacuccuccuucuucucccgccucaacuggcucacccaccucaacuucaaguaccccgcccucaacgucaccaugcccaacaacgagcaguucgacaagcucuacaucuggggcguccaccaccccggcaccgacaaggaccagaucuuccucuacgcccaguccuccggccgcaucaccgucuccacccgccgcucccagcaggccgucauccccaacaucggcucccgcccccgcauccgcaacauccccucccgcaucuccaucuacuggaccaucgucaagcccggcgacauccuccucaucaacuccaccggcaaccucaucgccccccgcggcuacuucaagauccgcuccggcaaguccuccaucaugcgcuccgacgcccccaucggcaagugcaacuccgagugcaucacccccaacggcuccauccccaacgacaagcccuuccagaacgucaaccgcaucaccuacggcgccugcccccgcuacgucaagcaguccacccucaagcucgccaccggcaugcgcaacguccccgagaagcagacccgcggcaucuucggcgccaucgccggcuucaucgagaacggcugggagggcauggucgacggcugguacggcuuccgccaccagaacuccgagggccgcggccaggccgccgaccucaaguccacccaggccgccaucgaccagaucaacggcaagcucaaccgccucaucggcaagaccaacgagaaguuccaccagaucgagaaggaguucuccgaggucgagggccgcauccaggaccucgagaaguacgucgaggacaccaagaucgaccucugguccuacaacgccgagcuccucgucgcccucgagaaccagcacaccaucgaccucaccgacuccgagaugaacaagcucuucgagaagaccaagaagcagcuccgcgagaacgccgaggacaugggcaacggcugcuucaagaucuaccacaagugcgacaacgccugcaucggcuccauccgcaacggcaccuacaaccacgacgucuaccgcgacgaggcccucaacaaccgcuuccagaucaagggcgucgagcucaaguccggcuacaaggacuggauccucuggaucuccuucgccaucuccugcuuccuccucugcgucgcccuccucggcuucaucaugugggccugccagaagggcaacauccgcugcaacaucugcaucuga

SEQ ID NO: 106640 - RNA, 1701 nt, Artificial Sequence; identical to SEQ ID NO: 103818
  derived and/or modified CDS sequence (opt2) from hemagglutinin__InfluenzaA__AHC58074

SEQ ID NO: 106641 - RNA, 1701 nt, Artificial Sequence; identical to SEQ ID NO: 103818
  derived and/or modified CDS sequence (opt2) from hemagglutinin__InfluenzaA__AHC58098

SEQ ID NO: 106642 - RNA, 1701 nt, Artificial Sequence; identical to SEQ ID NO: 103818
  derived and/or modified CDS sequence (opt2) from hemagglutinin__InfluenzaA__AHC58110

SEQ ID NO: 106643 - RNA, 1701 nt, Artificial Sequence; identical to SEQ ID NO: 103818
  derived and/or modified CDS sequence (opt2) from hemagglutinin__InfluenzaA__AHC58126

SEQ ID NO: 106644 - RNA, 1701 nt, Artificial Sequence; identical to SEQ ID NO: 103818
  derived and/or modified CDS sequence (opt2) from hemagglutinin__InfluenzaA__AHC58138

SEQ ID NO: 106645 - RNA, 1701 nt, Artificial Sequence; identical to SEQ ID NO: 103818
  derived and/or modified CDS sequence (opt2) from hemagglutinin__InfluenzaA__AHC58162

SEQ ID NO: 106646 - RNA, 1701 nt, Artificial Sequence; identical to SEQ ID NO: 105110
  derived and/or modified CDS sequence (opt2) from hemagglutinin__InfluenzaA__AHC58186

SEQ ID NO: 106647 - RNA, 1701 nt, Artificial Sequence
  derived and/or modified CDS sequence (opt2) from hemagglutinin__InfluenzaA__AHC58198
augaagaccaucaucgcccucuccuacauccucugccucgucuucgcccagaagcuccccggcaacgacaacuccaccgccacccucugccucggccaccacgccguccccaacggcaccaucgucaagaccaucaccaacgaccagaucgaggucaccaacgccaccgagcucguccagaacuccuccaccggcgagaucugcgacuccccccaccagauccucgacggcgagaacugcacccucaucgacgcccuccucggcgacccccagugcgacggcuuccagaacaagaagugggaccucuucgucgagcgcuccaaggccuacuccaacugcuaccccuacgacguccccgacuacgccucccuccgcucccucgucgccuccuccggcacccucgaguucaacaacgaguccuucaacuggaccggcgucacccagaacggcaccuccuccgccugcauccgccgcuccaacaacuccuucuucucccgccucaacuggcucacccaccucaacuucaaguaccccgcccucaacgucaccaugcccaacaacgagcaguucgacaagcucuacaucuggggcguccaccaccccggcaccgacaaggaccagaucuuccucuacgcccaggccuccggccgcaucaccgucuccaccaagcgcucccagcaggccgucauccccaacaucggcucccgcccccgcguccgcaacauccccucccgcaucuccaucuacuggaccaucgucaagcccggcgacauccuccucaucaacuccaccggcaaccucaucgccccccgcggcuacuucaagauccgcuccggcaaguccuccaucaugcgcuccgacgcccccaucggcaagugcaacuccgagugcaucacccccaacggcuccauccccaacgacaagcccuuccagaacgucaaccgcaucaccuacggcgccugcccccgcuacgucaagcagaacacccucaagcucgccaccggcaugcgcaacguccccgagaagcagacccgcggcaucuucggcgccaucgccggcuucaucgagaacggcugggagggcauggucgacggcugguacggcuuccgccaccagaacuccgagggccgcggccaggccgccgaccucaaguccacccaggccgccaucgaccagaucaacggcaagcucaaccgccucaucggcaagaccaacgagaaguuccaccagaucgagaaggaguucuccgaggucgagggccgcauccagaaccucgagaaguacgucgaggacaccaagaucgaccucugguccuacaacgccgagcuccucgucgcccucgagaaccagcacaccaucgaccucaccgacuccgagaugaacaagcucuucgagaagaccaagaagcagcuccgcgagaacgccgaggacaugggcaacggcugcuucaagaucuaccacaagugcgacaacgccugcaucggcuccauccgcaacggcaccuacgaccacgacgucuaccgcgacgaggcccucaacaaccgcuuccagaucaagggcgucgagcucaaguccggcuacaaggacuggauccucuggaucuccuucgccaucuccugcuuccuccucugcgucgcccuccucggcuucaucaugugggacugccagaagggcaacauccgcugcaacaucugcaucuga

SEQ ID NO: 106648 - RNA, 1701 nt, Artificial Sequence
  derived and/or modified CDS sequence (opt2) from hemagglutinin__InfluenzaA__AHC58210
augaagaccaucaucgcccucuccuacauccucugccucgucuucgcccagaagcuccccggcaacgacaacuccaccgccacccucugccucggccaccacgccguccccaacggcaccaucgucaagaccaucaccaacgaccagaucgaggucaccaacgccaccgagcucguccagaacuccuccaccggcgagaucugcgacuccccccaccagauccucgacggcgagaacugcacccucaucgacgcccuccucggcgacccccagugcgacggcuuccagaacaagaagugggaccucuucgucgagcgcuccaaggccuacuccaacugcuaccccuacgacguccccgacuacgccucccuccgcucccucgucgccuccuccggcacccucgaguucaacaacgaguccuucaacugggccggcgucacccagaacggcaccuccuccgccugcauccgccgcuccaacaacuccuucuucucccgccucaacuggcucacccaccucaacuucaaguaccccgcccucaacgucaccaugcccaacaacgagcaguucgacaagcucuacaucuggggcguccaccaccccggcaccgacaaggaccagaucuuccucuacgcccaggccuccggccgcaucaccgucuccaccaagcgcucccagcaggccgucauccccaacaucggcucccgcccccgcguccgcaacauccccucccgcaucuccaucuacuggaccaucgucaagcccggcgacauccuccucaucaacuccaccggcaaccucaucgccccccgcggcuacuucaagauccgcuccggcaaguccuccaucaugcgcuccgacgcccccaucggcaagugcaacuccgagugcaucacccccaacggcuccauccccaacgacaagcccuuccagaacgucaaccgcaucaccuacggcgccugcccccgcuacgucaagcagaacacccucaagcucgccaccggcaugcgcaacguccccgagaagcagacccgcggcaucuucggcgccaucgccggcuucaucgagaacggcugggagggcauggucgacggcugguacggcuuccgccaccagaacuccgagggccgcggccaggccgccgaccucaaguccacccaggccgccaucgaccagaucaacggcaagcucaaccgccucaucggcaagaccaacgagaaguuccaccagaucgagaaggaguucuccgaggucgagggccgcauccaggaccucgagaaguacgucgaggacaccaagaucgaccucugguccuacaacgccgagcuccucgucgcccucgagaaccagcacaccaucgaccucaccgacuccgagaugaacaagcucuucgagaagaccaagaagcagcuccgcgagaacgccgaggacaugggcaacggcugcuucaagaucuaccacaagugcgacaacgccugcaucggcuccauccgcaacggcaccuacgaccacgacgucuaccgcgacgaggcccucaacaaccgcuuccagaucaagggcgucgagcucaaguccggcuacaaggacuggauccucuggaucuccuucgccaucuccugcuuccuccucugcgucgcccuccucggcuucaucaugugggccugccagaagggcaacauccgcugcaacaucugcaucuga

SEQ ID NO: 106649 - RNA, 1701 nt, Artificial Sequence; identical to SEQ ID NO: 103018
  derived and/or modified CDS sequence (opt2) from hemagglutinin__InfluenzaA__AHC58234

SEQ ID NO: 106650 - RNA, 1701 nt, Artificial Sequence; identical to SEQ ID NO: 103818
  derived and/or modified CDS sequence (opt2) from hemagglutinin__InfluenzaA__AHC58246

SEQ ID NO: 106651 - RNA, 1701 nt, Artificial Sequence; identical to SEQ ID NO: 103018
  derived and/or modified CDS sequence (opt2) from hemagglutinin__InfluenzaA__AHC58258

SEQ ID NO: 106652 - RNA, 1701 nt, Artificial Sequence; identical to SEQ ID NO: 102891
  derived and/or modified CDS sequence (opt2) from hemagglutinin__InfluenzaA__AHC58270

SEQ ID NO: 106653 - RNA, 1701 nt, Artificial Sequence
  derived and/or modified CDS sequence (opt2) from hemagglutinin__InfluenzaA__AHC58372
augaagaccaucaucgcccucuccuacauccucugccucgucuucgcccagaagcuccccggcaacgacaacuccaccgccacccucugccucggccaccacgccguccccaacggcaccaucgucaagaccaucaccaacgaccagaucgaggucaccaacgccaccgagcucguccaguccuccuccaccggcgagaucugcgacuccccccaccagauccucgacggcgagaacugcacccucaucgacgcccuccucggcgacccccagugcgacggcuuccagaacaagaagugggaccucuucgucgagcgcuccaaggccuacuccaacugcuaccccuacgacguccccgacuacgccucccuccgcucccucgucgccuccuccggcacccucgaguucaacaacgaguccuucaacuggaccggcgucacccagaacggcaccuccuccgccugcauccgccgcuccaacuccuccuucuucucccgccucaacuggcucacccaccucaacuucaaguaccccgcccucaacgucaccaugcccaacaacgagcaguucgacaagcucuacaucuggggcguccaccaccccggcaccgacaaggaccagaucuuccucuacgcccaguccuccggccgcaucaccgucuccaccaagcgcucccagcaggccgucacccccaacaucggcucccgcccccgcauccgcaacauccccucccgcaucuccaucuacuggaccaucgucaagcccggcgacauccuccucaucaacuccaccggcaaccucaucgccccccgcggcuacuucaagauccgcuccggcaaguccuccaucaugcgcuccgacgcccccaucggcaagugcaacuccgagugcaucacccccaacggcuccauccccaacgacaagcccuuccagaacgucaaccgcaucaccuacggcgccugcccccgcuacgucaagcaguccacccucaagcucgccaccggcaugcgcaacguccccgagaagcagacccgcggcaucuucggcgccaucgccggcuucaucgagaacggcugggagggcauggucgacggcugguacggcuuccgccaccagaacuccgagggccgcggccaggccgccgaccucaaguccacccaggccgccaucgaccagaucaacggcaagcucaaccgccucaucggcaagaccaacgagaaguuccaccagaucgagaaggaguucuccgaggucgagggccgcauccaggaccucgagaaguacgucgaggacaccaagaucgaccucugguccuacaacgccgagcuccucgucgcccucgagaaccagcacaccaucgaccucaccgacuccgagaugaacaagcucuucgagaagaccaagaagcagcuccgcgagaacgccgaggacaugggcaacggcugcuucaagaucuaccacaagugcgacaacgccugcaucggcuccauccgcaacggcaccuacaaccacgacgucuaccgcgacgaggcccucaacaaccgcuuccagaucaagggcgucgagcucaaguccggcuacaaggacuggauccucuggaucuccuucgccaucuccugcuuccuccucugcgucgcccuccucggcuucaucaugugggccugccagaagggcaacauccgcugcaacaucugcaucuga

SEQ ID NO: 106654 - RNA, 1701 nt, Artificial Sequence
  derived and/or modified CDS sequence (opt2) from hemagglutinin__InfluenzaA__AHC58396
augaagaccaucaucgcccucuccuacauccucugccucgucuucgcccagaagcuccccggcaacgacaacuccaccgccacccucugccucggccaccacgccguccccaacggcaccaucgucaagaccaucaccaacgaccagaucgaggucaccaacgccaccgagcucguccaguccuccuccaccggcgagaucugcaacuccccccaccagauccucgacggcgagaacugcacccucaucgacgcccuccucggcgacccccagugcgacggcuuccagaacaagaagugggaccucuucgucgagcgcuccaaggcccacuccaacugcuaccccuacgacguccccgacuacgccucccuccgcucccucgucgccuccuccggcacccucgaguucaacaacgaguccuucaacuggaccggcgucacccagaacggcaccuccuccgccugcauccgcggcuccaacaacuccuucuucucccgccucaacuggcucacccaccucaacuucaaguaccccgcccucaacgucaccaugcccaacaacgagcaguucgacaagcucuacaucuggggcguccaccaccccggcaccgacaaggaccagaucuuccucuacgcccaggccuccggccgcaucaccgucuccaccaagcgcucccagcaggccgucauccccaacaucggcucccgcccccgcguccgcaacauccccucccgcgucuccaucuacuggaccaucgucaagcccggcgacauccuccucaucaacuccaccggcaaccucaucgccccccgcggcuacuucaagauccgcuccggcaaguccuccaucaugcgcuccgacgcccccaucggcaagugcaacuccgccugcaucacccccaacggcuccauccccaacgacaagcccuuccagaacgucaaccgcaucaccuacggcgccugcccccgcuacgucaagcagaacacccucaagcucgccaccggcaugcgcaacguccccgagaagcagacccgcggcaucuucggcgccaucgccggcuucaucgagaacggcugggagggcauggucgacggcugguacggcuuccgccaccagaacuccgagggccgcggccaggccgccgaccucaaguccacccaggccgccaucgaccagaucaacggcaagcucaaccgccucaucggcaagaccaacgagaaguuccaccagaucgagaaggaguucuccgaggucgagggccgcauccaggaccucgagaaguacgucgaggacaccaagaucgaccucugguccuacaacgccgagcuccucgucgcccucgagaaccagcacaccaucgaccucaccgacuccgagaugaacaagcucuucgagaagaccaagaagcagcuccgcgagaacgccgaggacaugggcaacggcugcuucaagaucuaccacaagugcgacaacgccugcaucggcuccauccgcaacggcaccuacgaccacgacgucuaccgcgacgaggcccucaacaaccgcuuccagaucaagggcgucgagcucaaguccggcuacaaggacuggauccucuggaucuccuucgccaucuccugcuuccuccucugcgucgcccuccucggcuucaucaugugggccugccagaagggcaacauccgcugcaacaucugcaucuga

SEQ ID NO: 106655 - RNA, 1701 nt, Artificial Sequence; identical to SEQ ID NO: 103818
  derived and/or modified CDS sequence (opt2) from hemagglutinin__InfluenzaA__AHC58408

SEQ ID NO: 106656 - RNA, 1701 nt, Artificial Sequence; identical to SEQ ID NO: 105110
  derived and/or modified CDS sequence (opt2) from hemagglutinin__InfluenzaA__AHC58420

SEQ ID NO: 106657 - RNA, 1701 nt, Artificial Sequence; identical to SEQ ID NO: 105110
  derived and/or modified CDS sequence (opt2) from hemagglutinin__InfluenzaA__AHC58432

SEQ ID NO: 106658 - RNA, 1701 nt, Artificial Sequence; identical to SEQ ID NO: 103018
  derived and/or modified CDS sequence (opt2) from hemagglutinin__InfluenzaA__AHC58444

SEQ ID NO: 106659 - RNA, 1701 nt, Artificial Sequence; identical to SEQ ID NO: 106654
  derived and/or modified CDS sequence (opt2) from hemagglutinin__InfluenzaA__AHC58456

SEQ ID NO: 106660 - RNA, 1701 nt, Artificial Sequence
  derived and/or modified CDS sequence (opt2) from hemagglutinin__InfluenzaA__AHC58468
augaaggccauccucgucguccuccucuacaccuucgccaccgccaacgccgacacccucugcaucggcuaccacgccaacaacuccaccgacaccgucgacaccguccucgagaagaacgucaccgucacccacuccgucaaccuccucgaggacaagcacaacggcaagcucugcaagcuccgcggcgucgccccccuccaccucggcaagugcaacaucgccggcuggauccucggcaaccccgagugcgagucccucuccaccgccuccuccugguccuacaucgucgagaccuccuccuccgacaacggcaccugcuaccccggcgacuucaucaacuacgaggagcuccgcgagcagcucuccuccgucuccuccuucgagcgcuucgagaucuuccccaagaccuccuccuggcccaaccacgacuccaacaagggcgucaccgccgccugcccccaggccggcgccaaguccuucuacaagaaccucaucuggcucgucaagaagggcaacuccuaccccaagcucuccaaguccuacaucaacgacaagggcaaggagguccucguccucuggggcauccaccaccccuccaccuccgccgaccagcagucccucuaccagaacgccgacgccuacgucuucgucggcaccuccaaguacuccaagaaguucaagcccgagaucgccguccgccccaagguccgcgaccaggagggccgcaugaacuacuacuggacccucgucgagcccggcgacaagaucaccuucgaggccaccggcaaccuccucgucccccgcuacgccuucgccauggagcgcaacgccggcuccggcaucaucaucuccgacacccccguccacgacugcaacaccaccugccagacccccaagggcgccaucaacaccucccuccccuuccagaacauccaccccaucaccaucggcaagugccccaaguacgucaaguccaccaagcuccgccucgccaccggccuccgcaacguccccuccauccagucccgcggccucuucggcgccaucgccggcuucaucgagggcggcuggaccggcauggucgacggcugguacggcuaccaccaccagaacgcccagggcuccggcuacgccgccgaccucaaguccacccagaacgccaucgacaagaucaccaacaaggucaacuccgucaucgagaagaugaacacccaguucaccgccgucggcaaggaguucaaccaccucgagcgccgcaucgagaaccucaacaagaaggucgacgacggcuuccucgacaucuggaccuacaacgccgagcuccucguccuccucgagaacgagcgcacccucgacuaccacgacuccaacgucaagaaccucuacgagaagguccgcucccagcucaagaacaacgccaaggagaucggcaacggcugcuucgaguucuaccacaagugcgacaacaccugcauggaguccgucaagaacggcaccuacgacuaccccaaguacuccgaggaggccaagcucaaccgcgaggagaucgacggcgucaagcucgaguccacccgcaucuaccagauccucgccaucuacuccaccgucgccuccucccucguccucgucgucucccucggcgccaucuccuucuggaugugcuccaacggcucccuccagugccgcaucugcaucuga

SEQ ID NO: 106661 - RNA, 1701 nt, Artificial Sequence
  derived and/or modified CDS sequence (opt2) from hemagglutinin__InfluenzaA__AHC58479
augaagaccaucaucgcccucuccuacauccucugccucgucuucgcccagaagcuccccggcaacgacaacuccaccgccacccucugccucggccaccacgccguccccaacggcaccaucgucaagaccaucaccaacgaccagaucgaggucaccaacgccaccgagcucguccagaacuccuccaccggcgagaucugcgacuccccccaccagaucaucgacggcgagaacugcacccucaucgacgcccuccucggcgacccccagugcgacggcuuccagaacaagaagugggaccucuucgucgagcgcuccaaggccuacuccaacugcuaccccuacgacguccccgacuacgccucccuccgcucccucgucgccuccuccggcacccucgaguucaacaacgaguccuucaacuggaccggcgucacccagaacggcaccuccuccgccugcauccgccgcuccaacaacuccuucuucucccgccucaacuggcucacccaccucaacuucaaguaccccgcccucaacgucaccaugcccaacaacgagcaguucgacaagcucuacaucuggggcguccaccaccccggcaccgacaaggaccagaucuuccucuacgcccaggccuccggccgcaucaccgucuccaccaagcgcucccagcaggccgucauccccaacaucggcucccgcccccgcguccgcaacauccccucccgcaucuccaucuacuggaccaucgucaagcccggcgacauccuccucaucaacuccaccggcaaccucaucgccccccgcggcuacuucaagauccgcuccggcaaguccuccaucaugcgcuccgacgcccccaucggcaagugcaacuccgagugcaucacccccaacggcuccauccccaacgacaagcccuuccagaacgucaaccgcaucaccuacggcgccugcccccgcuacgucaagcagaacacccucaagcucgccaccggcaugcgcaacguccccgagaagcagacccgcggcaucuucggcgccaucgccggcuucaucgagaacggcugggagggcauggucgacggcugguacggcuuccgccaccagaacuccgagggccgcggccaggccgccgaccucaaguccacccaggccgccaucaaccagaucaacggcaagcucaaccgccucaucggcaagaccaacgagaaguuccaccagaucgagaaggaguucuccgaggucgagggccgcauccaggaccucgagaaguacgucgaggacaccaagaucgaccucugguccuacaacgccgagcuccucgucgcccucgagaaccagcacaccaucgaccucaccgacuccgagaugaacaagcucuucgagaagaccaagaagcagcuccgcgagaacgccgaggacaugggcaacggcugcuucaagaucuaccacaagugcgacaacgccugcaucggcuccauccgcaacggcaccuacgaccacgacgucuaccgcgacgaggcccucaacaaccgcuucaagaucaagggcgucgagcucaaguccggcuacaaggacuggauccucuggaucuccuucgccaucuccugcuuccuccucugcgucgcccuccucggcuucaucaugugggccugccagaagggcaacauccgcugcaacaucugcaucuga

SEQ ID NO: 106662 - RNA, 1701 nt, Artificial Sequence; identical to SEQ ID NO: 106654
  derived and/or modified CDS sequence (opt2) from hemagglutinin__InfluenzaA__AHC58491

SEQ ID NO: 106663 - RNA, 1701 nt, Artificial Sequence; identical to SEQ ID NO: 103018
  derived and/or modified CDS sequence (opt2) from hemagglutinin__InfluenzaA__AHC58515

SEQ ID NO: 106664 - RNA, 1701 nt, Artificial Sequence; identical to SEQ ID NO: 103818
  derived and/or modified CDS sequence (opt2) from hemagglutinin__InfluenzaA__AHC58527

SEQ ID NO: 106665 - RNA, 1701 nt, Artificial Sequence
  derived and/or modified CDS sequence (opt2) from hemagglutinin__InfluenzaA__AHC58563
augaagaccaucaucgcccucuccuacauccucugccucgucuucgcccagaagcuccccggcaacgacaacuccaccgccacccucugccucggccaccacgccguccccaacggcaccaucgucaagaccaucaccaacgaccagaucgaggucaccaacgccaccgagcucguccagaacuccuccaccggcgagaucugcgacuccccccaccagaucaucgacggcgagaacugcacccucaucgacgcccuccucggcgacccccagugcgacggcuuccagaacaagaagugggaccucuucgucgagcgcuccaaggccuacuccaacugcuaccccuacgacguccccgacuacgccucccuccgcucccucgucgccuccuccggcacccucgaguucaacaacgaguccuucaacuggaccggcgucacccagaacggcaccuccuccgccugcauccgccgcuccaacaacuccuucuucucccgccucaacuggcucacccaccucaacuucaaguaccccgcccucaacgucaccaugcccaacaacgagcaguucgacaagcucuacaucuggggcguccaccaccccggcaccgacaaggaccagaucuuccucuacgcccaggccuccggccgcaucaccgucuccaccaagcgcucccagcaggccgucauccccaacaucggcucccgcccccgcguccgcaacauccccucccgcaucuccaucuacuggaccaucgucaagcccggcgacauccuccucaucaacuccaccggcaaccucaucgccccccgcggcuacuucaagauccgcuccggcaaguccuccaucaugcgcuccgacgcccccaucggcaagugcaacuccgagugcaucacccccaacggcuccauccccaacgacaagcccuuccagaacgucaaccgcaucaccuacggcgccugcccccgcuacgucaagcagaacacccucaagcucgccaccggcaugcgcaacguccccgagaagcagacccgcggcaucuucggcgccaucgccggcuucaucgagaacggcugggagggcauggucgacggcugguacggcuuccgccaccagaacuccgagggccgcggccaggccgccgaccucaaguccacccaggccgccaucgaccagaucaacggcaagcucaaccgccucaucggcaagaccaacgagaaguuccaccagaucgagaaggaguucuccgaggucgagggccgcauccaggaccucgagaaguacgucgaggacaccaagaucgaccucugguccuacaacgccgagcuccucgucgcccucgagaaccagcacaccaucgaccucaccgacuccgagaugaacaagcucuucgagaagaccaagaagcagcuccgcgagaacgccgaggacaugggcaacggcugcuucaagaucuaccacaagugcgacaacgccugcaucggcuccauccgcaacggcaccuacgaccacgacgucuaccgcgacgaggcccucaacaaccgcuuccagaucaagggcgucgagcucaaguccggcuacaaggacuggauccucuggaucuccuucgccaucuccugcuuccuccucugcgucgcccuccucggcuucaucaugugggccugccagaagggcaacauccgcugcaacaucugcaucuga

SEQ ID NO: 106666 - RNA, 1701 nt, Artificial Sequence; identical to SEQ ID NO: 103818
  derived and/or modified CDS sequence (opt2) from hemagglutinin__InfluenzaA__AHC58575

SEQ ID NO: 106667 - RNA, 1701 nt, Artificial Sequence; identical to SEQ ID NO: 102891
  derived and/or modified CDS sequence (opt2) from hemagglutinin__InfluenzaA__AHC58587

SEQ ID NO: 106668 - RNA, 1701 nt, Artificial Sequence; identical to SEQ ID NO: 103018
  derived and/or modified CDS sequence (opt2) from hemagglutinin__InfluenzaA__AHC58599

SEQ ID NO: 106669 - RNA, 1701 nt, Artificial Sequence; identical to SEQ ID NO: 103818
  derived and/or modified CDS sequence (opt2) from hemagglutinin__InfluenzaA__AHC58611

SEQ ID NO: 106670 - RNA, 1701 nt, Artificial Sequence; identical to SEQ ID NO: 103818
  derived and/or modified CDS sequence (opt2) from hemagglutinin__InfluenzaA__AHC58623

SEQ ID NO: 106671 - RNA, 1701 nt, Artificial Sequence; identical to SEQ ID NO: 103818
  derived and/or modified CDS sequence (opt2) from hemagglutinin__InfluenzaA__AHC58647

SEQ ID NO: 106672 - RNA, 1701 nt, Artificial Sequence; identical to SEQ ID NO: 103018
  derived and/or modified CDS sequence (opt2) from hemagglutinin__InfluenzaA__AHC58659

SEQ ID NO: 106673 - RNA, 1701 nt, Artificial Sequence; identical to SEQ ID NO: 102891
  derived and/or modified CDS sequence (opt2) from hemagglutinin__InfluenzaA__AHC58671

SEQ ID NO: 106674 - RNA, 1701 nt, Artificial Sequence; identical to SEQ ID NO: 105110
  derived and/or modified CDS sequence (opt2) from hemagglutinin__InfluenzaA__AHC58683

SEQ ID NO: 106675 - RNA, 1701 nt, Artificial Sequence; identical to SEQ ID NO: 102891
  derived and/or modified CDS sequence (opt2) from hemagglutinin__InfluenzaA__AHC58695

SEQ ID NO: 106676 - RNA, 1701 nt, Artificial Sequence; identical to SEQ ID NO: 105110
  derived and/or modified CDS sequence (opt2) from hemagglutinin__InfluenzaA__AHC58707

SEQ ID NO: 106677 - RNA, 1701 nt, Artificial Sequence; identical to SEQ ID NO: 105110
  derived and/or modified CDS sequence (opt2) from hemagglutinin__InfluenzaA__AHC58719

SEQ ID NO: 106678 - RNA, 1701 nt, Artificial Sequence; identical to SEQ ID NO: 106654
  derived and/or modified CDS sequence (opt2) from hemagglutinin__InfluenzaA__AHC58731

SEQ ID NO: 106679 - RNA, 1701 nt, Artificial Sequence
  derived and/or modified CDS sequence (opt2) from hemagglutinin__InfluenzaA__AHC58743
augaagaccaucaucgccugguccuacauccucugccucgucuucgcccagaagcuccccggcaacgacaacuccaccgccacccucugccucggccaccacgccguccccaacggcaccaucgucaagaccaucaccaacgaccagaucgaggucaccaacgccaccgagcucguccagaacuccuccaccggcgagaucugcgacuccccccaccagauccucgacggcgagaacugcacccucaucgacgcccuccucggcgacccccagugcgacggcuuccagaacaagaagugggaccucuucgucgagcgcuccaaggccuacuccaacugcuaccccuacgacguccccgacuacgccucccuccgcucccucgucgccuccuccggcacccucgaguucaacaacgaguccuucaacuggaccggcgucacccagaacggcaccuccuccgccugcauccgccgcuccaacaacuccuucuucucccgccucaacuggcucacccaccucaacuucaaguaccccgcccucaacgucaccaugcccaacaacgagcaguucgacaagcucuacaucuggggcguccaccaccccggcaccgacaaggaccagaucuuccucuacgcccaggccuccggccgcaucaccgucuccaccaagcgcucccagcaggccgucauccccaacaucggcucccgcccccgcguccgcaacauccccucccgcaucuccaucuacuggaccaucgucaagcccggcgacauccuccucaucaacuccaccggcaaccucaucgccccccgcggcuacuucaagauccgcuccggcaaguccuccaucaugcgcuccgacgcccccaucggcaagugcaacuccgagugcaucacccccaacggcuccauccccaacgacaagcccuuccagaacgucaaccgcaucaccuacggcgccugcccccgcuacgucaagcagaacacccucaagcucgccaccggcaugcgcaacguccccgagaagcagacccgcggcaucuucggcgccaucgccggcuucaucgagaacggcugggagggcauggucgacggcugguacggcuuccgccaccagaacuccgagggccgcggccaggccgccgaccucaaguccacccaggccgccaucgaccagaucaacggcaagcucaaccgccucaucggcaagaccaacgagaaguuccaccagaucgagaaggaguucuccgaggucgagggccgcauccaggaccucgagaaguacgucgaggacaccaagaucgaccucugguccuacaacgccgagcuccucgucgcccucgagaaccagcacaccaucgaccucaccgacuccgagaugaacaagcucuucgagaagaccaagaagcagcuccgcgagaacgccgaggacaugggcaacggcugcuucaagaucuaccacaagugcgacaacgccugcaucggcuccauccgcaacggcaccuacgaccacgacgucuaccgcgacgaggcccucaacaaccgcuuccagaucaagggcgucgagcucaaguccggcuacaaggacuggauccucuggaucuccuucgccaucuccugcuuccuccucugcgucgcccuccucggcuucaucaugugggccugccagaagggcaacauccgcugcaacaucugcaucuga

SEQ ID NO: 106680 - RNA, 1701 nt, Artificial Sequence; identical to SEQ ID NO: 106654
  derived and/or modified CDS sequence (opt2) from hemagglutinin__InfluenzaA__AHC58755

SEQ ID NO: 106681 - RNA, 1701 nt, Artificial Sequence; identical to SEQ ID NO: 102891
  derived and/or modified CDS sequence (opt2) from hemagglutinin__InfluenzaA__AHC58779

SEQ ID NO: 106682 - RNA, 1701 nt, Artificial Sequence; identical to SEQ ID NO: 106653
  derived and/or modified CDS sequence (opt2) from hemagglutinin__InfluenzaA__AHC58791

SEQ ID NO: 106683 - RNA, 1701 nt, Artificial Sequence
  derived and/or modified CDS sequence (opt2) from hemagglutinin__InfluenzaA__AHC58803
augaagaccaucaucgcccucuccuacauccucugccucgucuucgcccagaagcuccccggcaacgacaacuccaccgccacccucugccucggccaccacgccguccccaacggcaccaucgucaagaccaucaccaacgaccagaucgaggucaccaacgccaccgagcucguccagaacuccuccaccggcgagaucugcgacuccccccaccagaucaucgacggcgagaacugcacccucaucgacgcccuccucggcgacccccagugcgacggcuuccagaacaagaagugggaccucuucgucgagcgcuccaaggccuacuccaacugcuaccccuacgacguccccgacuacgccucccuccgcucccucgucgccuccuccggcacccucgaguucaacaacgaguccuucaacuggaccggcgucacccagaacggcaccuccuccgccugcauccgccgcuccaacaacuccuucuucucccgccucaacuggcucacccaccucaacuucaaguaccccgcccucaacgucaccaugcccaacaacgagcaguucgacaagcucuacaucuggggcguccaccaccccggcaccgacaaggaccagaucuuccucuacgcccaggccuccggccgcaucaccgucuccaccaagcgcucccagcaggccgucauccccaacaucggcucccgcccccgcguccgcaacauccccucccgcaucuccaucuacuggaccaucgucaagcccggcgacauccuccucaucaacuccaccggcaaccucaucgccccccgcggcuacuucaagauccgcuccggcaaguccuccaucaugaaguccgacgcccccaucggcaagugcaacuccgagugcaucacccccaacggcuccauccccaacgacaagcccuuccagaacgucaaccgcaucaccuacggcgccugcccccgcuacgucaagcagaacacccucaagcucgccaccggcaugcgcaacguccccgagaagcagacccgcggcaucuucggcgccaucgccggcuucaucgagaacggcugggagggcauggucgacggcugguacggcuuccgccaccagaacuccgagggccgcggccaggccgccgaccucaaguccacccaggccgccaucgaccagaucaacggcaagcucaaccgccucaucggcaagaccaacgagaaguuccaccagaucgagaaggaguucuccgaggucgagggccgcauccaggaccucgagaaguacgucgaggacaccaagaucgaccucugguccuacaacgccgagcuccucgucgcccucgagaaccagcacaccaucgaccucaccgacuccgagaugaacaagcucuucgagaagaccaagaagcagcuccgcgagaacgccgaggacaugggcaacggcugcuucaagaucuaccacaagugcgacaacgccugcaucggcuccauccgcaacggcaccuacgaccacgacgucuaccgcgacgaggcccucaacaaccgcuucaagaucaagggcgucgagcucaaguccggcuacaaggacuggauccucuggaucuccuucgccaucuccugcuuccuccucugcgucgcccuccucggcuucaucaugugggccugccagaagggcaacauccgcugcaacaucugcaucuga

SEQ ID NO: 106684 - RNA, 1701 nt, Artificial Sequence
  derived and/or modified CDS sequence (opt2) from hemagglutinin__InfluenzaA__AHC58815
augaagaccaucaucgcccucuccuacauccucugccucgucuucgcccagaagcuccccggcaacgacaacuccaccgccacccucugccucggccaccacgccguccccaacggcaccaucgucaagaccaucaccaacgaccagaucgaggucaccaacgccaccgagcucguccaguccuccuccaccggcgagaucugcaacuccccccaccagauccucgacggcggcaacugcacccucaucgacgcccuccucggcgacccccagugcgacggcuuccagaacaagaagugggaccucuucgucgagcgcuccaaggccuacuccaacugcuaccccuacgacguccccgacuacgccucccuccgcucccucgucgccuccuccggcacccucgaguucaacaacgaguccuucaacuggaccggcgucacccagaacggcaccuccuccgccugcauccgccgcuccaacaacuccuucuucucccgccucaacuggcucacccaccucaacuucaaguaccccgcccucaacgucaccaugcccaacaacgagcaguucgacaagcucuacaucuggggcguccaccaccccggcaccgacaaggaccagaucuuccucuacgcccaggccuccggccgcaucaccgucuccaccaagcgcucccagcaggccgucauccccaacaucggcucccgcccccgcguccgcaacauccccucccgcaucuccaucuacuggaccaucgucaagcccggcgacauccuccucaucaacuccaccggcaaccucaucgccccccgcggcuacuucaagauccgcuccggcaaguccuccaucaugcgcuccgacgcccccaucggcaagugcaacuccgagugcaucacccccaacggcuccauccccaacgacaagcccuuccagaacgucaaccgcaucaccuacggcgccugcccccgcuacgucaagcagaacacccucaagcucgccaccggcaugcgcaacguccccgagaagcagacccgcggcaucuucggcgccaucgccggcuucaucgagaacggcugggagggcauggucgacggcugguacggcuuccgccaccagaacuccgagggccgcggccaggccgccgaccucaaguccacccaggccgccaucgaccagaucaacggcaagcucaaccgccucaucggcaagaccaacgagaaguuccaccagaucgagaaggaguucuccgaggucgagggccgcauccaggaccucgagaaguacgucgaggacaccaagaucgaccucugguccuacaacgccgagcuccucgucgcccucgagaaccagcacaccaucgaccucaccgacuccgagaugaacaagcucuucgagaagaccaagaagcagcuccgcgagaacgccgaggacaugggcaacggcugcuucaagaucuaccacaagugcgacaacgccugcaucggcuccauccgcaacggcaccuacgaccacaacgucuaccgcgacgaggcccucaacaaccgcuuccagaucaagggcgucgagcucaaguccggcuacaaggacuggauccucuggaucuccuucgccaucuccugcuuccuccucugcgucgcccuccucggcuucaucaugugggccugccagaagggcaacauccgcugcaacaucugcaucuga

SEQ ID NO: 106685 - RNA, 1701 nt, Artificial Sequence; identical to SEQ ID NO: 102891
  derived and/or modified CDS sequence (opt2) from hemagglutinin__InfluenzaA__AHC58827

SEQ ID NO: 106686 - RNA, 1701 nt, Artificial Sequence; identical to SEQ ID NO: 103818
  derived and/or modified CDS sequence (opt2) from hemagglutinin__InfluenzaA__AHC58839

SEQ ID NO: 106687 - RNA, 1701 nt, Artificial Sequence
  derived and/or modified CDS sequence (opt2) from hemagglutinin__InfluenzaA__AHC58863
augaagaccaucaucgcccucuccuacauccucugccucgucuucgcccagaagcuccccggcaacgacaacuccaccgccacccucugccucggccaccacgccgucuccaacggcaccaucgucaagaccaucaccaacgaccagaucgaggucaccaacgccaccgagcucguccaguccuccuccaccggcgagaucugcaacuccccccaccagauccucgacggcgagaacugcacccucaucgacgcccuccucggcgacccccagugcgacggcuuccagaacaagaagugggaccucuucgucgagcgcuccaaggcccacuccaacugcuaccccuacgacguccccgacuacgccucccuccgcucccucgucgccuccuccggcacccucgaguucaacaacgaguccuucaacuggaccggcgucacccagaacggcaccuccuccgccugcauccgcggcuccaacaacuccuucuucucccgccucaacuggcucacccaccucaacuucaaguaccccgcccucaacgucaccaugcccaacaacgagcaguucgacaagcucuacaucuggggcguccaccaccccggcaccgacaaggaccagaucuuccucuacgcccaggccuccggccgcaucaccgucuccaccaagcgcucccagcaggccgucauccccaacaucggcucccgcccccgcguccgcaacauccccucccgcgucuccaucuacuggaccaucgucaagcccggcgacauccuccucaucaacuccaccggcaaccucaucgccccccgcggcuacuucaagauccgcuccggcaaguccuccaucaugcgcuccgacgcccccaucggcaagugcaacuccgccugcaucacccccaacggcuccauccccaacgacaagcccuuccagaacgucaaccgcaucaccuacggcgccugcccccgcuacgucaagcagaacacccucaagcucgccaccggcaugcgcaacguccccgagaagcagacccgcggcaucuucggcgccaucgccggcuucaucgagaacggcugggagggcaugauggacggcugguacggcuuccgccaccagaacuccgagggccgcggccaggccgccgaccucaaguccacccaggccgccaucgaccagaucaacggcaagcucaaccgccucaucggcaagaccaacgagaaguuccaccagaucgagaaggaguucuccgaggucgagggccgcauccaggaccucgagaaguacgucgaggacaccaagaucgaccucugguccuacaacgccgagcuccucgucgcccucgagaaccagcacaccaucgaccucaccgacuccgagaugaacaagcucuucgagaagaccaagaagcagcuccgcgagaacgccgaggacaugggcaacggcugcuucaagaucuaccacaagugcgacaacgccugcaucggcuccauccgcaacggcaccuacgaccacgacgucuaccgcgacgaggcccucaacaaccgcuuccagaucaagggcgucgagcucaaguccggcuacaaggacuggauccucuggaucuccuucgccaucuccugcuuccuccucugcgucgcccuccucggcuucaucaugugggccugccagaagggcaacauccgcugcaacaucugcaucuga

SEQ ID NO: 106688 - RNA, 1701 nt, Artificial Sequence; identical to SEQ ID NO: 102891
  derived and/or modified CDS sequence (opt2) from hemagglutinin__InfluenzaA__AHC58875

SEQ ID NO: 106689 - RNA, 1701 nt, Artificial Sequence; identical to SEQ ID NO: 103818
  derived and/or modified CDS sequence (opt2) from hemagglutinin__InfluenzaA__AHC58887

SEQ ID NO: 106690 - RNA, 1701 nt, Artificial Sequence; identical to SEQ ID NO: 106654
  derived and/or modified CDS sequence (opt2) from hemagglutinin__InfluenzaA__AHC58899

SEQ ID NO: 106691 - RNA, 1701 nt, Artificial Sequence; identical to SEQ ID NO: 103818
  derived and/or modified CDS sequence (opt2) from hemagglutinin__InfluenzaA__AHC58981

SEQ ID NO: 106692 - RNA, 1701 nt, Artificial Sequence; identical to SEQ ID NO: 103818
  derived and/or modified CDS sequence (opt2) from hemagglutinin__InfluenzaA__AHC58993

SEQ ID NO: 106693 - RNA, 1701 nt, Artificial Sequence; identical to SEQ ID NO: 103818
  derived and/or modified CDS sequence (opt2) from hemagglutinin__InfluenzaA__AHC59005

SEQ ID NO: 106694 - RNA, 1701 nt, Artificial Sequence
  derived and/or modified CDS sequence (opt2) from hemagglutinin__InfluenzaA__AHC59017
augaagaccaucaucgcccucuccuacauccucugccucgucuucgcccagaagcuccccggcaacgacaacuccaccgccacccucugccucggccaccacgccguccccaacggcaccaucgucaagaccaucaccaacgaccagaucgaggucaccaacgccaccgagcucguccaguccuccuccaccggcgagaucugcaacuccccccaccagauccucgacggcgagaacugcacccucaucgacgcccuccucggcgacccccagugcgacggcuuccagaacaagaagugggaccucuucgucgagcgcuccaaggcccacuccaacugcuaccccuacgacguccccgacuacgccucccuccgcucccucgucgccuccuccggcacccucgaguucaacaacgaguccuucaacuggaccggcgucacccagaacggcaccuccuccgccugcauccgcggcuccaacaacuccuucuucucccgccucaacuggcucacccaccucaacuucaaguaccccgcccucaacgucaccaugcccaacaacgagcaguucgacaagcucuacaucuggggcguccaccaccccggcaccgacaaggaccagaucuuccucuacgcccaggccuccggccgcaucaccgucuccaccaagcgcucccagcaggccgucauccccaacaucggcucccgcccccgcguccgcaacauccccucccgcgucuccaucuacuggaccaucgucaagcccggcgacauccuccucaucaacuccaccggcaaccucaucgccccccgcggcuacuucaagauccgcuccggcaaguccuccaucaugcgcuccgacgcccccaucggcaagugcaacuccgccugcaucacccccaacggcuccauccccaacgacaagcccuuccagaacgucaaccgcaucaccuacggcgccugcccccgcuacgucaagcagaacacccucaagcucgccaccggcaugcgcaacguccccgagaagcagacccgcggcaucuucggcgccaucgccggcuucaucgagaacggcugggagggcauggucgacggcugguacggcuuccgccaccagaacuccgagggccgcggccaggccgccgaccucaaguccacccaggccgccaucgaccagaucaacggcaagcucaaccgccucaucggcaagaccaacgagaaguuccaccagaucgagaaggaguucuccgaggucgagggccgcauccaggaccucgagaaguacgucgaggacaccaagaucgaccucugguccuacaacgccgagcuccucgucgcccucgagaaccagcacaccaucgaccucaccgacuccgagauguccaagcucuucgagaagaccaagaagcagcuccgcgagaacgccgaggacaugggcaacggcugcuucaagaucuaccacaagugcgacaacgccugcaucggcuccauccgcaacggcaccuacgaccacgacgucuaccgcgacgaggcccucaacaaccgcuuccagaucaagggcgucgagcucaaguccggcuacaaggacuggauccucuggaucuccuucgccaucuccugcuuccuccucugcgucgcccuccucggcuucaucaugugggccugccagaagggcaacauccgcugcaacaucugcaucuga

SEQ ID NO: 106695 - RNA, 1701 nt, Artificial Sequence; identical to SEQ ID NO: 106654
  derived and/or modified CDS sequence (opt2) from hemagglutinin__InfluenzaA__AHC59029

SEQ ID NO: 106696 - RNA, 1701 nt, Artificial Sequence; identical to SEQ ID NO: 103018
  derived and/or modified CDS sequence (opt2) from hemagglutinin__InfluenzaA__AHC59041

SEQ ID NO: 106697 - RNA, 1701 nt, Artificial Sequence
  derived and/or modified CDS sequence (opt2) from hemagglutinin__InfluenzaA__AHC59053
augaagaccaucaucgcccucuccuacauccucugccucgucuucgcccagaagcuccccggcaacgacaacuccaccgccacccucugccucggccaccacgccguccccaacggcaccaucgucaagaccaucaccaacgaccagaucgaggucaccaacgccaccgagcucguccaguccuccuccaccggcgagaucugcaacuccccccaccagauccucgacggcgagaacugcacccucaucgacgcccuccucggcgacccccagugcgacggcuuccagaacaagaagugggaccucuucgucgagcgcuccaaggcccacuccaacugcuaccccuacgacguccccgacuacgccucccuccgcucccucgucgccuccuccggcacccucgaguucaacaacgaguccuucaacuggaccggcgucacccagaacggcaccuccuccgccugcauccgccgcuccaacaacuccuucuucucccgccucaacuggcucacccaccucaacuucaaguaccccgcccucaacgucaccaugcccaacaacgagcaguucgacaagcucuacaucuggggcguccaccaccccggcaccgacaaggaccagaucuuccucuacgcccaggccgccggccgcaucaccgucuccaccaagcgcucccagcaggccgucauccccaacaucggcucccgcccccgcguccgcaacauccccucccgcgucuccaucuacuggaccaucgucaagcccggcgacauccuccucaucaacuccaccggcaaccucaucgccccccgcggcuacuucaagauccaguccggcaaguccuccaucaugcgcuccgacgcccccaucggcaagugcaacuccgccugcaucacccccaacggcuccauccccaacgacaagcccuuccagaacgucaaccgcaucaccuacggcgccugcccccgcuacgucaagcagaacacccucaagcucgccaccggcaugcgcaacguccccgagaagcagacccgcggcaucuucggcgccaucgccggcuucaucgagaacggcugggagggcauggucgacggcugguacggcuuccgccaccagaacuccgagggccgcggccaggccgccgaccucaaguccacccaggccgccaucgaccagaucaacggcaagcucaaccgccucaucggcaagaccaacgagaaguuccaccagaucgagaaggaguucuccgaggucgagggccgcauccaggaccucgagaaguacgucgaggacaccaagaucgaccucugguccuacaacgccgagcuccucgucgcccucgagaaccagcacaccaucgaccucaccgacuccgagaugaacaagcucuucgagaagaccaagaagcagcuccgcgagaacgccgaggacaugggcaacggcugcuucaagaucuaccacaagugcgacaacgccugcaucggcuccauccgcaacggcaccuacgaccacgacgucuaccgcgacgaggcccucaacaaccgcuuccagaucaagggcgucgagcucaaguccggcuacaaggacuggauccucuggaucuccuucgccaucuccugcuuccuccucugcgucgcccuccucggcuucaucauguggaccugccagaagggcaacauccgcugcaacaucugcaucuga

SEQ ID NO: 106698 - RNA, 1701 nt, Artificial Sequence
  derived and/or modified CDS sequence (opt2) from hemagglutinin__InfluenzaA__AHC59077
augaagaccaucaucgcccucuccuacauccucugccucgucuucgcccagaagcuccccggcaacgacaacuccaccgccacccucugccucggccaccacgccguccccaacggcaccaucgucaagaccaucaccaacgaccagaucgaggucaccaacgccaccgagcucguccagaacuccuccaccggcgagaucugcgacuccccccaccagauccucgacggcgagaacugcacccucaucgacgcccuccucggcgacccccagugcgacggcuuccagaacaagaagugggaccucuucgucgagcgcuccaaggccuacuccaacugcuaccccuacgacguccccgacuacgccucccuccgcucccucgucgccuccuccggcacccucgaguucaacaacgaguccuucaacuggaccggcgucacccagaacggcaccuccuccgccugcauccgccgcuccaacaacuccuucuucucccgccucaacuggcucacccaccucaacuucaaguaccccgcccucaacgucaccaugcccaacaacgagcaguucgacaagcucuacaucuggggcguccaccaccccggcaccgacaaggaccagaucuuccucuacgcccaggccuccggccgcaucaccgucuccaccaagcgcucccagcaggccgucauccccaacaucggcucccgcccccgcguccgcaacauccccucccgcaucuccaucuacuggaccaucgucaagcccggcgacauccuccucaucaacuccaccggcaaccucaucgccccccgcggcuacuucaagauccgcuccggcaaguccuccaucaugcgcuccgacgcccccaucggcaagugcaacuccgagugcaucacccccaacggcuccauccccaacgacaagcccuuccagaacgucaaccgcaucaccuacggcgccugcccccgcuacgucaagcagaacacccucaagcucgccaccggcaugcgcaacguccccgagaagcagacccgcggcaucuucggcgccaucgccggcuucaucgagaacggcugggagggcauggucgacggcugguacggcuuccgccaccagaacuccgagggccgcggccaggccgccgaccucaaguccacccaggccgccaucgaccagaucaacggcaagcucaaccgccucaucggcaagaccaacgagaaguuccaccagaucgagaaggaguucuccgaggucgagggccgcauccaggaccucgagaaguacgucgaggacaccaagaucgaccucugguccuacaacgccgagcuccucgucgcccucgagaaccagcacaccaucgaccucaccgacuccgagaugaacaagcucuucgagaagaccaagaagcagcuccgcgagaacgccgaggacaugggcaacggcugcuucaagaucuaccacaagugcgacaacgccugcaucggcuccauccgcaacggcaccuacgaccacgacgucuaccgcgacgaggcccucaacaaccgcuuccagaucaagggcgucgagcucaaguccggcuacaaggacuggauccucuggaucuccuucgccaucuccugcuuccuccucugcgucguccuccucggcuucaucaugugggccugccagaagggcaacauccgcugcaacaucugcaucuga

SEQ ID NO: 106699 - RNA, 1701 nt, Artificial Sequence; identical to SEQ ID NO: 105110
  derived and/or modified CDS sequence (opt2) from hemagglutinin__InfluenzaA__AHC59089

SEQ ID NO: 106700 - RNA, 1701 nt, Artificial Sequence; identical to SEQ ID NO: 103818
  derived and/or modified CDS sequence (opt2) from hemagglutinin__InfluenzaA__AHC59101

SEQ ID NO: 106701 - RNA, 1701 nt, Artificial Sequence; identical to SEQ ID NO: 103018
  derived and/or modified CDS sequence (opt2) from hemagglutinin__InfluenzaA__AHC59113

SEQ ID NO: 106702 - RNA, 1701 nt, Artificial Sequence; identical to SEQ ID NO: 103818
  derived and/or modified CDS sequence (opt2) from hemagglutinin__InfluenzaA__AHC59125

SEQ ID NO: 106703 - RNA, 1701 nt, Artificial Sequence
  derived and/or modified CDS sequence (opt2) from hemagglutinin__InfluenzaA__AHC59137
augaagaccaucaucgcccucuccuacauccucugccucgucuucgcccagaagauccccggcaacgacaacuccaccgccacccucugccucggccaccacgccgucuccaacggcaccaucgucaagaccaucaccaacgaccagaucgaggucaccaacgccaccgagcucguccaguccuccuccaccggcgagaucugcaacuccccccaccagauccucgacggcgagaacugcacccucaucgacgcccuccucggcgacccccagugcgacggcuuccagaacaagaagugggaccucuucgucgagcgcuccaaggcccacuccaacugcuaccccuacgacguccccgacuacgccucccuccgcucccucgucgccuccuccggcacccucgaguucaacaacgaguccuucaacuggaccggcgucacccagaacggcaccuccuccgccugcauccgcggcuccaacaacuccuucuucucccgccucaacuggcucacccaccucaacuucaaguaccccgcccucaacgucaccaugcccaacaacgagcaguucgacaagcucuacaucuggggcguccaccaccccggcaccgacaaggaccagaucuuccucuacgcccaggccuccggccgcaucaccgucuccaccaagcgcucccagcaggccgucauccccaacaucggcucccgcccccgcguccgcaacauccccucccgcgucuccaucuacuggaccaucgucaagcccggcgacauccuccucaucaacuccaccggcaaccucaucgccccccgcggcuacuucaagauccgcuccggcaaguccuccaucaugcgcuccgacgcccccaucggcaagugcaacuccgccugcaucacccccaacggcuccauccccaacgacaagcccuuccagaacgucaaccgcaucaccuacggcgccugcccccgcuacgucaagcagaacacccucaagcucgccaccggcaugcgcaacguccccgagaagcagacccgcggcaucuucggcgccaucgccggcuucaucgagaacggcugggagggcaugauggacggcugguacggcuuccgccaccagaacuccgagggccgcggccaggccgccgaccucaaguccacccaggccgccaucgaccagaucaacggcaagcucaaccgccucaucggcaagaccaacgagaaguuccaccagaucgagaaggaguucuccgaggucgagggccgcauccaggaccucgagaaguacgucgaggacaccaagaucgaccucugguccuacaacgccgagcuccucgucgcccucgagaaccagcacaccaucgaccucaccgacuccgagaugaacaagcucuucgagaagaccaagaagcagcuccgcgagaacgccgaggacaugggcaacggcugcuucaagaucuaccacaagugcgacaacgccugcaucggcuccauccgcaacggcaccuacgaccacgacgucuaccgcgacgaggcccucaacaaccgcuuccagaucaagggcgucgagcucaaguccggcuacaaggacuggauccucuggaucuccuucgccaucuccugcuuccuccucugcgucgcccuccucggcuucaucaugugggccugccagaagggcaacauccgcugcaacaucugcaucuga

SEQ ID NO: 106704 - RNA, 1701 nt, Artificial Sequence; identical to SEQ ID NO: 103018
  derived and/or modified CDS sequence (opt2) from hemagglutinin__InfluenzaA__AHC59149

SEQ ID NO: 106705 - RNA, 1701 nt, Artificial Sequence
  derived and/or modified CDS sequence (opt2) from hemagglutinin__InfluenzaA__AHC59185
augaagaccaucaucgcccucuccuacauccucugccucgucuucgcccagaagcuccccggcaacgacaacuccaccgccacccucugccucggccaccacgccguccccaacggcaccaucgucaagaccaucaccaacgaccagaucgaggucaccaacgccaccgagcucguccaguccuccuccaccggcgagaucugcgacuccccccaccagauccucgacggcgagaacugcacccucaucgacgcccuccucggcgacccccagugcgacggcuuccagaacaagaagugggaccucuucgucgagcgcuccaaggccuacuccaacugcuaccccuacgacguccccgacuacgccucccuccgcucccucgucgccuccuccggcacccucgaguucaacaacgaguccuucaacuggaccggcgucacccagaacggcaccuccuccgccugcauccgccgcuccaacuccuccuucuucucccgccucaacuggcucacccaccucaacuucaaguaccccgcccucaacgucaccaugcccaacaacgagcaguucgacaagcucuacaucuggggcguccaccaccccggcaccgacaaggaccagaucuuccucuacgcccaguccuccggccgcaucaccgucuccaccaagcgcucccagcaggccgucauccccaacaucggcucccgcccccgcauccgcaacauccccucccgcaucuccaucuacuggaccaucgucaagcccggcgacauccuccucaucaacuccaccggcaaccucaucgccccccgcggcuacuucaagauccgcuccggcaaguccuccaucaugcgcuccgacgcccccaucggcaagugcaacuccgagugcaucacccccaacggcuccauccccaacgacaagcccuuccagaacgucaaccgcaucaccuacggcgccugcccccgcuacgucaagcaguccacccucaagcucgccaccggcaugcgcaacguccccgagaagcagacccgcggcaucuucggcgccaucgccggcuucaucgagaacggcugggagggcauggucgacggcugguacggcuuccgccaccagaacuccgagggccgcggccaggccgccgaccucaaguccacccaggccgccaucgaccagaucaacggcaagcucaaccgccucaucggcaagaccaacgagaaguuccaccagaucgagaaggaguucuccgaggucgagggccgcauccaggaccucgagaaguacgucgaggacaccaagaucgaccucugguccuacaacgccgagcuccucgucgcccucgagaaccagcacaccaucgaccucaccgacuccgagaugaacaagcucuucgagaagaccaagaagcagcuccgcgagaacgccgaggacaugggcaacggcugcuucaagaucuaccacaagugcgacaacgccugcaucggcuccauccgcaacggcaccuacgaccacaacgucuaccgcgacgaggcccucaacaaccgcuuccagaucaagggcgucgagcucaaguccggcuacaaggacuggauccucuggaucuccuucgccaucuccugcuuccuccucugcgucgcccuccucggcuucaucaugugggccugccagaagggcaacauccgcugcaacaucugcaucuga

SEQ ID NO: 106706 - RNA, 1701 nt, Artificial Sequence; identical to SEQ ID NO: 102891
  derived and/or modified CDS sequence (opt2) from hemagglutinin__InfluenzaA__AHC59197

SEQ ID NO: 106707 - RNA, 1701 nt, Artificial Sequence
  derived and/or modified CDS sequence (opt2) from hemagglutinin__InfluenzaA__AHC59209
augaagaccaucaucgcccucuccuacauccucugccucgucuucgcccaggagauccccggcaacgacaacuccaccgccacccucugccucggccaccacgccguccccaacggcaccaucgucaagaccaucaccaacgaccagaucgaggucaccaacgccaccgagcucguccaguccuccuccaccggcgagaucugcaacuccccccaccagauccucgacggcgagaacugcacccucaucgacgcccuccucggcgacccccagugcgacgacuuccagaacaagaagugggaccucuucgucgagcgcuccaaggcccacuccaacugcuaccccuacgacguccccgacuacgccucccuccgcucccucgucgccuccuccggcacccucgaguucaacaacgaguccuucaacuggaccggcgucacccagaacggcaccuccuccgccugcauccgccgcuccaacaacuccuucuucucccgccucaacuggcucacccaccucaacuucaaguaccccgcccucaacgucaccaugcccaacaacgagcaguucgacaagcucuacaucuggggcguccaccaccccggcaccgacaaggaccagaucuuccucuacgcccaggccuccggccgcaucaccgucuccaccaagcgcucccagcaggccgucauccccaacaucggcucccgcccccgcguccgcaacauccccucccgcgucuccaucuacuggaccaucgucaagcccggcgacauccuccucaucaacuccaccggcaaccucaucgccccccgcggcuacuucaagauccgcuccggcaaguccuccaucaugcgcuccgacgcccccaucggcgagugcaacuccgccugcaucacccccaacggcuccauccccaacgacaagcccuuccagaacgucaaccgcaucaccuacggcgccugcccccgcuacgucaagcagaacacccucaagcucgccaccggcaugcgcaacguccccgagaagcagacccgcggcaucuucggcgccaucgccggcuucaucgagaacggcugggagggcauggucgacggcugguacggcuuccgccaccagaacuccgagggccgcggccaggccgccgaccucaaguccacccaggccgccaucgaccagaucaacggcaagcucaaccgccucaucggcaagaccaacgagaaguuccaccagaucgagaaggaguucuccgaggucgagggccgcauccaggaccucgagaaguacgucgaggacaccaagaucgaccucugguccuacaacgccgagcuccucgucgcccucgagaaccagcacaccaucgaccucaccgacuccgagaugaacaagcucuucgagaagaccaagaagcagcuccgcgagaacgccgaggacaugggcaacggcugcuucaagaucuaccacaagugcgacaacgccugcaucggcuccauccgcaacggcaccuacgaccacgccgucuaccgcgacgaggcccucaacaaccgcuuccagaucaagggcgucgagcucaaguccggcuacaaggacuggauccucuggaucuccuucgccaucuccugcuuccuccucugcgucgcccuccucggcuucaucaugugggccugccagaagggcaacauccgcugcaacaucugcaucuga

SEQ ID NO: 106708 - RNA, 1701 nt, Artificial Sequence; identical to SEQ ID NO: 103018
  derived and/or modified CDS sequence (opt2) from hemagglutinin__InfluenzaA__AHC59221

SEQ ID NO: 106709 - RNA, 1701 nt, Artificial Sequence; identical to SEQ ID NO: 106687
  derived and/or modified CDS sequence (opt2) from hemagglutinin__InfluenzaA__AHC59245

SEQ ID NO: 106710 - RNA, 1701 nt, Artificial Sequence; identical to SEQ ID NO: 106654
  derived and/or modified CDS sequence (opt2) from hemagglutinin__InfluenzaA__AHC59257

SEQ ID NO: 106711 - RNA, 1701 nt, Artificial Sequence; identical to SEQ ID NO: 103818
  derived and/or modified CDS sequence (opt2) from hemagglutinin__InfluenzaA__AHC59269

SEQ ID NO: 106712 - RNA, 1701 nt, Artificial Sequence; identical to SEQ ID NO: 106654
  derived and/or modified CDS sequence (opt2) from hemagglutinin__InfluenzaA__AHC59281

SEQ ID NO: 106713 - RNA, 1701 nt, Artificial Sequence; identical to SEQ ID NO: 103018
  derived and/or modified CDS sequence (opt2) from hemagglutinin__InfluenzaA__AHC59293

SEQ ID NO: 106714 - RNA, 1701 nt, Artificial Sequence
  derived and/or modified CDS sequence (opt2) from hemagglutinin__InfluenzaA__AHC59305
augaagaccaucaucgcccucuccuacauccucugccucgucuucgcccagaagcuccccggcaacgacaacuccaccgccacccucugccucggccaccacgccguccccaacggcaccaucgucaagaccaucaccaacgaccagaucgaggucaccaacgccaccgagcucguccaguccuccuccaccggcgagaucugcuccuccccccaccagauccucgacggcgagaacugcacccucaucgacgcccuccucggcgacccccagugcgacggcuuccagaacaagaagugggaccucuucgucgagcgcuccaaggcccacuccaacugcuaccccuacgacguccccgacuacgccucccuccgcucccucgucgccuccuccggcacccucgaguucaacaacgaguccuucaacuggaccggcgucacccagaacggcaccuccuccgccugcauccgccgcuccaacaacuccuucuucucccgccucaacuggcucacccaccucaacuucaaguaccccgcccucaacgucaccaugcccaacaacgagcaguucgacaagcucuacaucuggggcguccaccaccccggcaccgacaaggaccagaucuuccucuacgcccaggccuccggccgcaucaccgucuccaccaagcgcucccagcaggccgucauccccaacaucggcucccgcccccgcguccgcaacauccccucccgcgucuccaucuacuggaccaucgucaagcccggcgacauccuccucaucaacuccaccggcaaccucaucgccccccgcggcuacuucaagauccgcuccggcaaguccuccaucaugcgcuccgacgcccccaucggcaagugcaacuccgccugcaucacccccaacggcuccauccccaacgacaagcccuuccagaacgucaaccgcaucaccuacggcgccugcccccgcuacgucaagcagaacacccucaagcucgccaccggcaugcgcaacguccccgagaagcagacccgcggcaucuucggcgccaucgccggcuucaucgagaacggcugggagggcauggucgacggcugguacggcuuccgccaccagaacuccgagggccgcggccaggccgccgaccucaaguccacccaggccgccaucgaccagaucaacggcaagcucaaccgccucaucggcaagaccaacgagaaguuccaccagaucgagaaggaguucuccgaggucgagggccgcauccaggaccucgagaaguacgucgaggacaccaagaucgaccucugguccuacaacgccgagcuccucgucgcccucgagaaccagcacaccaucgaccucaccgacuccgagaugaacaagcucuucgagaagaccaagaagcagcuccgcgagaacgccgaggacaugggcaacggcugcuucaagaucuaccacaagugcgacaacgccugcaucggcuccauccgcaacggcaccuacgaccacgacgucuaccgcgacgaggcccucaacaaccgcuuccagaucaagggcgucgagcucaaguccggcuacaaggacuggauccucuggaucuccuucgccaucuccugcuuccuccucugcgucgcccuccucggcuucaucaugugggccugccagaagggcaacauccgcugcaacaucugcaucuga

SEQ ID NO: 106715 - RNA, 1701 nt, Artificial Sequence
  derived and/or modified CDS sequence (opt2) from hemagglutinin__InfluenzaA__AHC59329
augaagaccaucaucgcccucuccuacauccucugccucgucuucgcccagaagcuccccggcaacgacaacuccaccgccacccucugccucggccaccacgccguccccaacggcaccaucgucaagaccaucaccaacgaccgcaucgaggucaccaacgccaccgagcucguccagaacuccuccaucggcgagaucugcgacuccccccaccagauccucgacggcgagaacugcacccucaucgacgcccuccucggcgacccccagugcgacggcuuccagaacaagaagugggaccucuucgucgagcgcuccaaggccuacuccaacugcuaccccuacgacguccccgacuacgccucccuccgcucccucgucgccuccuccggcacccucgaguucaacaacgaguccuucaacuggaccggcgucacccagaacggcaccuccuccgccugcauccgccgcuccaacaacuccuucuucucccgccucaacuggcucacccaccucaacuucaaguaccccgcccucaacgucaccaugcccaacaacgagcaguucgacaagcucuacaucuggggcguccaccaccccggcaccgagaaggaccagaucuuccucuacgcccaguccuccggccgcaucaccgucuccaccaagcgcucccagcaggccgucauccccaacaucggcucccgcccccgcauccgcaacauccccucccgcaucuccaucuacuggaccaucgucaagcccggcgacauccuccucaucaacuccaccggcaaccucaucgccccccgcggcuacuucaagauccgcuccggcaaguccuccaucaugcgcuccgacgcccccaucggcaagugcaaguccgagugcaucacccccaacggcuccauccccaacgacaagcccuuccagaacgucaaccgcaucaccuacggcgccugcccccgcuacgucaagcaguccacccucaagcucgccaccggcaugcgcaacguccccgagaagcagacccgcggcaucuucggcgccaucgccggcuucaucgagaacggcugggagggcauggucgacggcugguacggcuuccgccaccagaacuccgagggccgcggccaggccgccgaccucaaguccacccaggccgccaucgaccagaucaacggcaagcucaaccgccucaucggcaagaccaacgagaaguuccaccagaucgagaaggaguucuccgaggucgagggccgcauccaggaccucgagaaguacgucgaggacaccaagaucgaccucugguccuacaacgccgagcuccucgucgcccucgagaaccagcacaccaucgaccucaccgacuccgagaugaacaagcucuucgagaagaccaagaagcagcuccgcgagaacgccgaggacaugggcaacggcugcuucaagaucuaccacaagugcgacaacgccugcaucggcuccauccgcaacggcaccuacgaccacgacgucuaccgcgacgaggcccucaacaaccgcuuccagaucaagggcgucgagcucaaguccggcuacaaggacuggauccucuggaucuccuucgccaucuccugcuuccuccucugcgucgcccuccucggcuucaucaugugggccugccagaagggcaacauccgcugcaacaucugcaucuga

SEQ ID NO: 106716 - RNA, 1701 nt, Artificial Sequence; identical to SEQ ID NO: 105110
  derived and/or modified CDS sequence (opt2) from hemagglutinin__InfluenzaA__AHC59341

SEQ ID NO: 106717 - RNA, 1701 nt, Artificial Sequence; identical to SEQ ID NO: 106654
  derived and/or modified CDS sequence (opt2) from hemagglutinin__InfluenzaA__AHC59365

SEQ ID NO: 106718 - RNA, 1701 nt, Artificial Sequence
  derived and/or modified CDS sequence (opt2) from hemagglutinin__InfluenzaA__AHC59377
augaagaccaucaucgcccucuccuacauccucugccucgucuucgcccagaagcuccccggcaacgacaacuccaccgccacccucugccucggccaccacgccguccccaacggcaccgucgucaagaccaucaccaacgaccagaucgaggucaccaacgccaccgagcucguccagaacuccuccaccggcgagaucugcgacuccccccaccagauccucgacggcgagaacugcacccucaucgacgcccuccucggcgacccccagugcgacggcuuccagaacaagaagugggaccucuucgucgagcgcuccaaggccuacuccaacugcuaccccuacgacguccccgacuacgccucccuccgcucccucgucgccuccuccggcacccucgaguucaacaacgaguccuucaacuggaccggcgucacccagaacggcaccuccuccgccugcauccgccgcuccaacaacuccuucuucucccgccucaacuggcucacccaccucaacuucaaguaccccgcccucaacgucaccaugcccaacaacgagcaguucgacaagcucuacaucuggggcguccaccaccccggcaccgacaaggaccagaucuuccucuacgcccaggccuccggccgcaucaccgucuccaccaagcgcucccagcaggccgucauccccaacaucggcucccgcccccgcguccgcaacauccccucccgcaucuccaucuacuggaccaucgucaagcccggcgacauccuccucaucaacuccaccggcaaccucaucgccccccgcggcuacuucaagauccgcuccggcaaguccuccaucaugcgcuccgacgcccccaucggcaagugcaacuccgagugcaucacccccaacggcuccauccccaacgacaagcccuuccagaacgucaaccgcaucaccuacggcgccugcccccgcuacgucaagcagaacacccucaagcucgccaccggcaugcgcaacguccccgagaagcagacccgcggcaucuucggcgccaucgccggcuucaucgagaacggcugggagggcauggucgacggcugguacggcuuccgccaccagaacuccgagggccgcggccaggccgccgaccucaaguccacccaggccgccaucgaccagaucaacggcaagcucaaccgccucaucggcaagaccaacgagaaguuccaccagaucgagaaggaguucuccgaggucgagggccgcauccagaaccucgagaaguacgucgaggacaccaagaucgaccucugguccuacaacgccgagcuccucgucgcccucgagaaccagcacaccaucgaccucaccgacuccgagaugaacaagcucuucgagaagaccaagaagcagcuccgcgagaacgccgaggacaugggcaacggcugcuucaagaucuaccacaagugcgacaacgccugcaucggcuccauccgcaacggcaccuacgaccacgacgucuaccgcgacgaggcccucaacaaccgcuuccagaucaagggcgucgagcucaaguccggcuacaaggacuggauccucuggaucuccuucgccaucuccugcuuccuccucugcgucgcccuccucggcuucaucaugugggccugccagaagggcaacauccgcugcaacaucugcaucuga

SEQ ID NO: 106719 - RNA, 1701 nt, Artificial Sequence; identical to SEQ ID NO: 103018
  derived and/or modified CDS sequence (opt2) from hemagglutinin__InfluenzaA__AHC59413

SEQ ID NO: 106720 - RNA, 1701 nt, Artificial Sequence; identical to SEQ ID NO: 103818
  derived and/or modified CDS sequence (opt2) from hemagglutinin__InfluenzaA__AHC59425

SEQ ID NO: 106721 - RNA, 1701 nt, Artificial Sequence; identical to SEQ ID NO: 105110
  derived and/or modified CDS sequence (opt2) from hemagglutinin__InfluenzaA__AHC59437

SEQ ID NO: 106722 - RNA, 1701 nt, Artificial Sequence
  derived and/or modified CDS sequence (opt2) from hemagglutinin__InfluenzaA__AHC59449
augaagaccaucaucgcccucuccuacauccucugccucgucuucgcccagaagcuccccggcaacgacaacuccaccgccacccucugccucggccaccacgccguccccaacggcaccaucgucaagaccaucaccaacgaccagaucgaggucaccaacgccaccgagcucguccaguccuccuccaccggcgagaucugcaacuccccccaccagauccucgacggcgagaacugcacccucaucgacgcccuccucggcgacccccagugcgacggcuuccagaacaagaagugggaccucuucgucgagcgcuccaaggcccacuccaacugcuaccccuacgacguccccgacuacgccucccuccgcucccucgucgccuccuccggcacccucgaguucaacaacgaguccuucaacuggaccggcgucacccagaacggcaccuccuccgccugcauccgcggcuccaacaacuccuucuucucccgccucaacuggcucacccaccucaacuucaaguaccccgcccucaacgucaccaugcccaacaacgagcaguucgacaagcucuacaucuggggcguccaccaccccggcaccgacaaggaccagaucuuccucuacgcccaggccuccggccgcaucaccgucuccaccaagcgcucccagcaggccgucauccccaacaucggcucccgcccccgcguccgcaacauccccucccgcgucuccaucuacuggaccaucgucaagcccggcgacauccuccucaucaacuccaccggcaaccucaucgccccccgcggcuacuucaagauccgcuccggcaaguccuccaucaugcgcuccgacgcccccaucggcaagugcaacuccgccugcaucacccccaacggcuccauccccaacgacaagcccuuccagaacgucaaccgcaucaccuacggcgccugcccccgcuacgucaagcagaacacccucaagcucgccaccggcaugcgcaacguccccgagaagcagacccgcggcaucuucggcgccaucgccggcuucaucgagaacggcugggagggcauggucgacggcugguacggcuuccgccaccagaacuccgagggccgcggccaggccgccgaccucaaguccacccaggccgccaucgaccagaucaacggcaagcucaaccgccucaucggccgcaccaacgagaaguuccaccagaucgagaaggaguucuccgaggucgagggccgcauccaggaccucgagaaguacgucgaggacaccaagaucgaccucugguccuacaacgccgagcuccucgucgcccucgagaaccagcacaccaucgaccucaccgacuccgagaugaacaagcucuucgagaagaccaagaagcagcuccgcgagaacgccgaggacaugggcaacggcugcuucaagaucuaccacaagugcgacaacgccugcaucggcuccauccgcaacggcaccuacgaccacgacgucuaccgcgacgaggcccucaacaaccgcuuccagaucaagggcgucgagcucaaguccggcuacaaggacuggauccucuggaucuccuucgccaucuccugcuuccuccucugcgucgcccuccucggcuucaucaugugggccugccagaagggcaacauccgcugcaacaucugcaucuga

SEQ ID NO: 106723 - RNA, 1701 nt, Artificial Sequence; identical to SEQ ID NO: 102891
  derived and/or modified CDS sequence (opt2) from hemagglutinin__InfluenzaA__AHC59461

SEQ ID NO: 106724 - RNA, 1701 nt, Artificial Sequence; identical to SEQ ID NO: 106715
  derived and/or modified CDS sequence (opt2) from hemagglutinin__InfluenzaA__AHC59473

SEQ ID NO: 106725 - RNA, 1701 nt, Artificial Sequence; identical to SEQ ID NO: 103018
  derived and/or modified CDS sequence (opt2) from hemagglutinin__InfluenzaA__AHC59485

SEQ ID NO: 106726 - RNA, 1701 nt, Artificial Sequence; identical to SEQ ID NO: 103018
  derived and/or modified CDS sequence (opt2) from hemagglutinin__InfluenzaA__AHC59497

SEQ ID NO: 106727 - RNA, 1701 nt, Artificial Sequence; identical to SEQ ID NO: 102891
  derived and/or modified CDS sequence (opt2) from hemagglutinin__InfluenzaA__AHC59509

SEQ ID NO: 106728 - RNA, 1701 nt, Artificial Sequence; identical to SEQ ID NO: 102891
  derived and/or modified CDS sequence (opt2) from hemagglutinin__InfluenzaA__AHC59521

SEQ ID NO: 106729 - RNA, 1701 nt, Artificial Sequence
  derived and/or modified CDS sequence (opt2) from hemagglutinin__InfluenzaA__AHC59533
augaagaccaucaucgcccucuccuacauccucugccucgucuucgcccagaagcuccccggcaacgacaacuccaccgccacccucugccucggccaccacgccguccccaacggcaccaucgucaagaccaucaccaacgaccagaucgaggucaccaacgccaccgagcucguccaguccuccuccaccggcgagaucugcaacuccccccaccagauccucgacggcgagaacugcacccucaucgacgcccuccucggcgacccccagugcgacggcuuccagaacaagaagugggaccucuucgucgagcgcuccaaggcccacuccaacugcuaccccuacgacguccccgacuacgccucccuccgcucccucgucgccuccuccggcacccucgaguucaagaacgaguccuucaacuggaccggcgucacccagaacggcaccuccuccgccugcauccgccgcuccaacaacuccuucuucucccgccucaacuggcucacccaccucaacuucaaguaccccgcccucaacgucaccaugcccaacaacgagcaguucgacaagcucuacaucuggggcguccaccaccccggcaccgacaaggaccagaucuuccucuacgcccaggccuccggccgcaucaccgucuccaccaagcgcucccagcaggccgucauccccaacaucggcucccgcccccgcguccgcaacauccccucccgcgucuccaucuacuggaccaucgucaagcccggcgacauccuccucaucaacuccaccggcaaccucaucgccccccgcggcuacuucaagauccgcuccggcaaguccuccaucaugcgcuccgacgcccccaucggcaagugcaacuccgccugcaucacccccaacggcuccauccccaacgacaagcccuuccagaacgucaaccgcaucaccuacggcgccugcccccgcuacgucaagcagaacacccucaagcucgccaccggcaugcgcaacguccccgagaagcagacccgcggcaucuucggcgccaucgccggcuucaucgagaacggcugggagggcauggucgacggcugguacggcuuccgccaccagaacuccgagggccgcggccaggccgccgaccucaaguccacccaggccgccaucgaccagaucaacggcaagcucaaccgccucaucggcaagaccaacgagaaguuccaccagaucgagaaggaguucuccgaggucgagggccgcauccaggaccucgagaaguacgucgaggacaccaagaucgaccucugguccuacaacgccgagcuccucgucgcccucgagaaccagcacaccaucgaccucaccgacuccgagaugaacaagcucuucgagaagaccaagaagcagcuccgcgagaacgccgaggacaugggcaacggcugcuucaagaucuaccacaagugcgacaacgccugcaucggcuccauccgcaacggcaccuacgaccacgacgucuaccgcgacgaggcccucaacaaccgcuuccagaucaagggcgucgagcucaaguccggcuacaaggacuggauccucuggaucuccuucgccaucuccugcuuccuccucugcgucgcccuccucggcuucaucaugugggccugccagaagggcaacauccgcugcaacaucugcaucuga

SEQ ID NO: 106730 - RNA, 1701 nt, Artificial Sequence; identical to SEQ ID NO: 103018
  derived and/or modified CDS sequence (opt2) from hemagglutinin__InfluenzaA__AHC59545

SEQ ID NO: 106731 - RNA, 1701 nt, Artificial Sequence; identical to SEQ ID NO: 106654
  derived and/or modified CDS sequence (opt2) from hemagglutinin__InfluenzaA__AHC59557

SEQ ID NO: 106732 - RNA, 1701 nt, Artificial Sequence
  derived and/or modified CDS sequence (opt2) from hemagglutinin__InfluenzaA__AHC59569
augaagaccaucaucgcccucuccuacauccucugccucgucuucgcccagaagcuccccggcaacgacaacuccaccgccacccucugccucggccaccacgccguccccaacggcaccaucgucaagaccaucaccaacgaccagaucgaggucaccaacgccaccgagcucguccagaacuccuccaccggcgagaucugcgacuccccccaccagauccucgacggcgagaacugcacccucaucgacgcccuccucggcgacccccagugcgacggcuuccagaacaagaagugggaccucuucgucgagcgcuccaaggccuacuccaacugcuaccccuacgacguccccgacuacgccucccuccgcucccucgucgccuccuccggcacccucgaguucaacaacgaguccuucaacuggaccggcgucacccagaacggcaccuccuccgccugcauccgccgcuccaacaacuccuucuucucccgccucaacuggcucacccaccucaacuucaaguaccccgcccucaacgucaccaugcccaacaacgagcaguucgacaagcucuacaucuggggcguccaccaccccggcaccgacaaggaccagaucuuccucuacgcccaggccuccggccgcaucaccgucuccaccaagcgcucccagcaggccgucauccccaacaucggcucccgcccccgcguccgcaacauccccucccgcaucuccaucuacuggaccaucgucaagcccggcgacauccuccucaucaacuccaccggcaaccucaucgccccccgcggcuacuucaagauccgcuccggcaaguccuccaucaugcgcuccgacgcccccaucggcaagugcaacuccgagugcaucacccccaacggcuccauccccaacgacaagcccuuccagaacgucaaccgcaucaccuacggcgccugcccccgcuacgucaagcagaacacccucaagcucgccaccggcaugcgcaacguccccgagaagcagacccgcggcaucuucggcgccaucgccggcuucaucgagaacggcugggagggcaugauggacggcugguacggcuuccgccaccagaacuccgagggccgcggccaggccgccgaccucaaguccacccaggccgccaucgaccagaucaacggcaagcucaaccgccucaucggcaagaccaacgagaaguuccaccagaucgagaaggaguucuccgaggucgagggccgcauccaggaccucgagaaguacgucgaggacaccaagaucgaccucugguccuacaacgccgagcuccucgucgcccucgagaaccagcacaccaucgaccucaccgacuccgagaugaacaagcucuucgagaagaccaagaagcagcuccgcgagaacgccgaggacaugggcaacggcugcuucaagaucuaccacaagugcgacaacgccugcaucggcuccauccgcaacggcaccuacgaccacgacgucuaccgcgacgaggcccucaacaaccgcuuccagaucaagggcgucgagcucaaguccggcuacaaggacuggauccucuggaucuccuucgccaucuccugcuuccuccucugcgucgcccuccucggcuucaucaugugggccugccagaagggcaacauccgcugcaacaucugcaucuga

SEQ ID NO: 106733 - RNA, 1701 nt, Artificial Sequence; identical to SEQ ID NO: 103018
  derived and/or modified CDS sequence (opt2) from hemagglutinin__InfluenzaA__AHC59581

SEQ ID NO: 106734 - RNA, 1701 nt, Artificial Sequence; identical to SEQ ID NO: 102891
  derived and/or modified CDS sequence (opt2) from hemagglutinin__InfluenzaA__AHC59593

SEQ ID NO: 106735 - RNA, 1701 nt, Artificial Sequence; identical to SEQ ID NO: 105110
  derived and/or modified CDS sequence (opt2) from hemagglutinin__InfluenzaA__AHC59605

SEQ ID NO: 106736 - RNA, 1701 nt, Artificial Sequence; identical to SEQ ID NO: 103018
  derived and/or modified CDS sequence (opt2) from hemagglutinin__InfluenzaA__AHC59617

SEQ ID NO: 106737 - RNA, 1701 nt, Artificial Sequence; identical to SEQ ID NO: 103018
  derived and/or modified CDS sequence (opt2) from hemagglutinin__InfluenzaA__AHC59629

SEQ ID NO: 106738 - RNA, 1701 nt, Artificial Sequence; identical to SEQ ID NO: 106654
  derived and/or modified CDS sequence (opt2) from hemagglutinin__InfluenzaA__AHC59641

SEQ ID NO: 106739 - RNA, 1701 nt, Artificial Sequence
  derived and/or modified CDS sequence (opt2) from hemagglutinin__InfluenzaA__AHC59653
augaagaccaucaucgcccucuccuacauccucugccucgucuucgcccagaagcuccccggcaacgacaacuccaccgccacccucugccucggccaccacgccguccccaacggcaccaucgucaagaccaucaccaacgaccagaucgaggucaccaacgccaccgagcucguccaguccuccuccaccggcgagaucugcaacuccccccaccagauccucgacggcgagaacugcacccucaucgacgcccuccucggcgacccccagugcgacggcuuccagaacaagaagugggaccucuucgucgagcgcuccaaggcccacuccaacugcuaccccuacgacguccccgacuacgccucccuccgcucccucgucgccuccuccggcacccucgaguucaacaacgaguccuucaacuggaccggcgucacccagaacggcaccuccuccgccugcauccgccgcuccaacaacuccuucuucucccgccucaacuggcucacccaccucaacuucaaguaccccgcccucaacgucaccaugcccaacaacgagcaguucgacaagcucuacaucuggggcguccaccaccccggcaccgacaaggaccagaucuuccucuacgcccaggccuccggccgcaucaccgucuccacccagcgcucccagcaggccgucauccccaacaucggcucccgcccccgcguccgcaacauccccucccgcgucuccaucuacuggaccaucgucaagcccggcgacauccuccucaucaacuccaccggcaaccucaucgccccccgcggcuacuucaagauccgcuccggcaaguccuccaucaugcgcuccgacgcccccaucggcaagugcaacuccgccugcaucacccccaacggcuccauccccaacgacaagcccuuccagaacgucaaccgcaucaccuacggcgccugcccccgcuacgucaagcagaacacccucaagcucgccaccggcaugcgcaacguccccgagaagcagacccgcggcaucuucggcgccaucgccggcuucaucgagaacggcugggagggcauggucgacggcugguacggcuuccgccaccagaacuccgagggccgcggccaggccgccgaccucaaguccacccaggccgccaucgaccagaucaacggcaagcucaaccgccucaucggcaagaccaacgagaaguuccaccagaucgagaaggaguucuccgaggucgagggccgcauccaggaccucgagaaguacgucgaggacaccaagaucgaccucugguccuacaacgccgagcuccucgucgcccucgagaaccagcacaccaucgaccucaccgacuccgagaugaacaagcucuucgagaagaccaagaagcagcuccgcgagaacgccgaggacaugggcaacggcugcuucaagaucuaccacaagugcgacaacgccugcaucggcuccauccgcaacggcaccuacgaccacgacgucuaccgcgacgaggcccucaacaaccgcuuccagaucaagggcgucgagcucaaguccggcuacaaggacuggauccucuggaucuccuucgccaucuccugcuuccuccucugcgucgcccuccucggcuucaucaugugggccugccagaagggcaacauccgcugcaacaucugcaucuga

SEQ ID NO: 106740 - RNA, 1701 nt, Artificial Sequence; identical to SEQ ID NO: 102891
  derived and/or modified CDS sequence (opt2) from hemagglutinin__InfluenzaA__AHC59665

SEQ ID NO: 106741 - RNA, 1701 nt, Artificial Sequence; identical to SEQ ID NO: 103018
  derived and/or modified CDS sequence (opt2) from hemagglutinin__InfluenzaA__AHC59677

SEQ ID NO: 106742 - RNA, 1701 nt, Artificial Sequence; identical to SEQ ID NO: 106739
  derived and/or modified CDS sequence (opt2) from hemagglutinin__InfluenzaA__AHC59689

SEQ ID NO: 106743 - RNA, 1701 nt, Artificial Sequence; identical to SEQ ID NO: 106654
  derived and/or modified CDS sequence (opt2) from hemagglutinin__InfluenzaA__AHC59701

SEQ ID NO: 106744 - RNA, 1701 nt, Artificial Sequence; identical to SEQ ID NO: 102891
  derived and/or modified CDS sequence (opt2) from hemagglutinin__InfluenzaA__AHC59713

SEQ ID NO: 106745 - RNA, 1701 nt, Artificial Sequence; identical to SEQ ID NO: 106665
  derived and/or modified CDS sequence (opt2) from hemagglutinin__InfluenzaA__AHC59737

SEQ ID NO: 106746 - RNA, 1701 nt, Artificial Sequence; identical to SEQ ID NO: 102891
  derived and/or modified CDS sequence (opt2) from hemagglutinin__InfluenzaA__AHC59749

SEQ ID NO: 106747 - RNA, 1701 nt, Artificial Sequence; identical to SEQ ID NO: 103018
  derived and/or modified CDS sequence (opt2) from hemagglutinin__InfluenzaA__AHC59761

SEQ ID NO: 106748 - RNA, 1701 nt, Artificial Sequence; identical to SEQ ID NO: 103018
  derived and/or modified CDS sequence (opt2) from hemagglutinin__InfluenzaA__AHC59773

SEQ ID NO: 106749 - RNA, 1701 nt, Artificial Sequence; identical to SEQ ID NO: 103818
  derived and/or modified CDS sequence (opt2) from hemagglutinin__InfluenzaA__AHC59785

SEQ ID NO: 106750 - RNA, 1701 nt, Artificial Sequence; identical to SEQ ID NO: 103018
  derived and/or modified CDS sequence (opt2) from hemagglutinin__InfluenzaA__AHC59797

SEQ ID NO: 106751 - RNA, 1701 nt, Artificial Sequence; identical to SEQ ID NO: 105110
  derived and/or modified CDS sequence (opt2) from hemagglutinin__InfluenzaA__AHC59809

SEQ ID NO: 106752 - RNA, 1701 nt, Artificial Sequence
  derived and/or modified CDS sequence (opt2) from hemagglutinin__InfluenzaA__AHC59821
augaagaccaucaucgcccucuccuacauccucugccucgucuucgcccagaagcuccccggcaacgacaacuccaccgccacccucugccucggccaccacgccguccccaacggcaccaucgucaagaccaucaccaacgaccagaucgaggucaccaacgccaccgagcucguccagaacuccuccaccggcgagaucugcgacuccccccaccagauccucgacggcgagaacugcacccucaucgacgcccuccucggcgacccccagugcgacggccuccagaacaagaagugggaccucuucgucgagcgcuccaaggccuacuccaacugcuaccccuacgacguccccgacuacgccucccuccgcucccucgucgccuccuccggcacccucgaguucaacaacgaguccuucaacuggaccggcgucacccagaacggcaccuccuccgccugcauccgccgcuccaacaacuccuucuucucccgccucaacuggcucacccaccucaacuucaaguaccccgcccucaacgucaccaugcccaacaacgagcaguucgacaagcucuacaucuggggcguccaccaccccggcaccgacaaggaccagaucuuccucuacgcccaggccuccggccgcaucaccgucuccaccaagcgcucccagcaggccgucauccccaacaucggcucccgcccccgcguccgcaacauccccucccgcaucuccaucuacuggaccaucgucaagcccggcgacauccuccucaucaacuccaccggcaaccucaucgccccccgcggcuacuucaagauccgcuccggcaaguccuccaucaugcgcuccgacgcccccaucggcaagugcaacuccgagugcaucacccccaacggcuccauccccaacgacaagcccuuccagaacgucaaccgcaucaccuacggcgccugcccccgcuacgucaagcagaacacccucaagcucgccaccggcaugcgcaacguccccgagaagcagacccgcggcaucuucggcgccaucgccggcuucaucgagaacggcugggagggcauggucgacggcugguacggcuuccgccaccagaacuccgagggccgcggccaggccgccgaccucaaguccacccaggccgccaucgaccagaucaacggcaagcucaaccgccucaucggcaagaccaacgagaaguuccaccagaucgagaaggaguucuccgaggucgagggccgcauccaggaccucgagaaguacgucgaggacaccaagaucgaccucugguccuacaacgccgagcuccucgucgcccucgagaaccagcacaccaucgaccucaccgacuccgagaugaacaagcucgucgagaagaccaagaagcagcuccgcgagaacgccgaggacaugggcaacggcugcuucaagaucuaccacaagugcgacaacgccugcaucggcuccauccgcaacggcaccuacgaccacgacgucuaccgcgacgaggcccucaacaaccgcuuccagaucaagggcgucgagcucaaguccggcuacaaggacuggauccucuggaucuccuucgccaucuccugcuuccuccucugcgucgcccuccucggcuucaucaugugggccugccagaagggcaacauccgcugcaacaucugcaucuga

SEQ ID NO: 106753 - RNA, 1701 nt, Artificial Sequence; identical to SEQ ID NO: 106654
  derived and/or modified CDS sequence (opt2) from hemagglutinin__InfluenzaA__AHC59833

SEQ ID NO: 106754 - RNA, 1701 nt, Artificial Sequence; identical to SEQ ID NO: 106653
  derived and/or modified CDS sequence (opt2) from hemagglutinin__InfluenzaA__AHC59845

SEQ ID NO: 106755 - RNA, 1701 nt, Artificial Sequence; identical to SEQ ID NO: 103818
  derived and/or modified CDS sequence (opt2) from hemagglutinin__InfluenzaA__AHC59857

SEQ ID NO: 106756 - RNA, 1701 nt, Artificial Sequence; identical to SEQ ID NO: 103018
  derived and/or modified CDS sequence (opt2) from hemagglutinin__InfluenzaA__AHC59869

SEQ ID NO: 106757 - RNA, 1701 nt, Artificial Sequence; identical to SEQ ID NO: 103018
  derived and/or modified CDS sequence (opt2) from hemagglutinin__InfluenzaA__AHC59881

SEQ ID NO: 106758 - RNA, 1701 nt, Artificial Sequence; identical to SEQ ID NO: 102891
  derived and/or modified CDS sequence (opt2) from hemagglutinin__InfluenzaA__AHC59892

SEQ ID NO: 106759 - RNA, 1701 nt, Artificial Sequence
  derived and/or modified CDS sequence (opt2) from hemagglutinin__InfluenzaA__AHC59904
augaagaccaucaucgcccucuccuacauccucugccucgucuucgcccagaagcuccccggcaacgacaacuccaccgccacccucugccucggccaccacgccguccccaacggcaccaucgucaagaccaucaccaacgaccagaucgaggucaccaacgccaccgagcucguccaguccuccuccaccggcgagaucugcaacuccccccaccagauccucgacggcgagaacugcacccucaucgacgcccuccucggcgacccccagugcgacggcuuccagaacaagaagugggaccucuucgucgagcgcuccaaggcccacuccaacugcuaccccuacgacguccccgacuacgccucccuccgcucccucgucgccuccuccggcacccucgaguucaacaacgaguccuucaacuggaccggcgucacccagaacggcaccuccuccgccugcauccgcggcuccaacaacuccuucuucucccgccucaacuggcucacccaccucaacuucaaguaccccgcccucaacgucaccaugcccaacaacgagcaguucgacaagcucuacaucuggggcguccaccaccccggcaccgacaaggaccagaucuuccucuacgcccaggccuccggccgcaucaccgucuccaccaagcgcucccagcaggccgucauccccaacaucggcucccgcccccgcguccgcaacauccccucccgcgucuccaucuacuggaccaucgucaagcccggcgacauccuccucaucaacuccaccggcaaccucaucgccccccgcggcuacuucaagauccgcuccggcaaguccuccaucaugcgcuccgacgcccccaucggcaagugcaacuccgccugcaucacccccaacggcuccauccccaacgacaagcccuuccagaacgucaaccgcaucaccuacggcgccugcccccgcuacgucaagcagaacacccucaagcucgccaccggcaugcgcaacguccccgagaagcagacccgcggcaucuucggcgccaucgccggcuucaucgagaacggcugggagggcaugauggacggcugguacggcuuccgccaccagaacuccgagggccgcggccaggccgccgaccucaaguccacccaggccgccaucgaccagaucaacggcaagcucaaccgccucaucggcaagaccaacgagaaguuccaccagaucgagaaggaguucuccgaggucgagggccgcauccaggaccucgagaaguacgucgaggacaccaagaucgaccucugguccuacaacgccgagcuccucgucgcccucgagaaccagcacaccaucgaccucaccgacuccgagaugaacaagcucuucgagaagaccaagaagcagcuccgcgagaacgccgaggacaugggcaacggcugcuucaagaucuaccacaagugcgacaacgccugcaucggcuccauccgcaacggcaccuacgaccacgacgucuaccgcgacgaggcccucaacaaccgcuuccagaucaagggcgucgagcucaaguccggcuacaaggacuggauccucuggaucuccuucgccaucuccugcuuccuccucugcgucgcccuccucggcuucaucaugugggccugccagaagggcaacauccgcugcaacaucugcaucuga

SEQ ID NO: 106760 - RNA, 1701 nt, Artificial Sequence
  derived and/or modified CDS sequence (opt2) from hemagglutinin__InfluenzaA__AHC59915
augaagaccgucaucgcccucuccuacauccucugccucgccuucgcccagaagcuccccggcaacgacaacuccaccgccacccucugccucggccaccacgccguccccaacggcaccaucgucaagaccaucaccaacgaccagaucgaggucaccaacgccaccgagcucguccaguccuccuccaccggcgagaucugcgacuccccccaccagauccucgacggcgagaacugcacccucaucgacgcccuccucggcgacccccagugcgacggcuuccagaacaagaagugggaccucuucgucgagcgcuccaaggccuacuccaacugcuaccccuacgacguccccgacuacgccucccuccgcucccucgucgccuccuccggcacccucgaguucaacaacgaguccuucaacuggaccggcgucacccagaacggcaccuccuccgccugcauccgccgcuccaacaacuccuucuucucccgccucaacuggcucacccaccucaacuucaaguaccccgcccucaacgucaccaugcccaacaacgagcaguucgacaagcucuacaucuggggcguccaccaccccggcaccgacaaggaccagaucuuccucuacgcccaggccuccggccgcaucaccgucuccaccaagcgcucccagcaggccgucauccccaacaucggcucccgcccccgcguccgcaacauccccucccgcaucuccaucuacuggaccaucgucaagcccggcgacauccuccucaucaacuccaccggcaaccucaucgccccccgcggcuacuucaagauccgcuccggcaaguccuccaucaugcgcuccgacgcccccaucggcaagugcaacuccgagugcaucacccccaacggcuccauccccaacgacaagcccuuccagaacgucaaccgcaucaccuacggcgccugcccccgcuacgucaagcagaacacccucaagcucgccaccggcaugcgcaacguccccgagaagcagacccgcggcaucuucggcgccaucgccggcuucaucgagaacggcugggagggcauggucgacggcugguacggcuuccgccaccagaacuccgagggccgcggccaggccgccgaccucaaguccacccaggccgccaucgaccagaucaacggcaagcucaaccgccucaucggcaagaccaacgagaaguuccaccagaucgagaaggaguucuccgaggucgagggccgcauccaggaccucgagaaguacgucgaggacaccaagaucgaccucugguccuacaacgccgagcuccucgucgcccucgagaaccagcacaccaucgaccucaccgacuccgagaugaacaagcucuucgagaagaccaagaagcagcuccgcgagaacgccgaggacaugggcaacggcugcuucaagaucuaccacaagugcgacaacgccugcaucggcuccauccgcaacggcaccuacgaccacgacgucuaccgcgacgaggcccucaacaaccgcuuccagaucaagggcgucgagcucaaguccggcuacaaggacuggauccucuggaucuccuucgccaucuccugcuuccuccucugcgucgcccuccucggcuucaucaugugggccugccagaagggcaacauccgcugcaacaucugcaucuga

SEQ ID NO: 106761 - RNA, 1701 nt, Artificial Sequence; identical to SEQ ID NO: 103018
  derived and/or modified CDS sequence (opt2) from hemagglutinin__InfluenzaA__AHC59939

SEQ ID NO: 106762 - RNA, 1701 nt, Artificial Sequence
  derived and/or modified CDS sequence (opt2) from hemagglutinin__InfluenzaA__AHC59963
augaagaccaucaucgcccucuccuacauccucugccucgucuucgcccagaagcuccccggcaacgacaacuccaccgccacccucugccucggccaccacgccguccccaacggcaccaucgucaagaccaucaccaacgaccagaucgaggucaccaacgccaccgagcucguccaguccuccuccaccggcgagaucugcgacuccccccaccagauccucgacggcgagaacugcacccucaucgacgcccuccucggcgacccccagugcgacggcuuccagaacaagaagugggaccucuucgucgagcgcuccaaggccuacuccaacugcuaccccuacgacguccccgacuacgccucccuccgcucccucgucgccuccuccggcacccucgaguucaacaacgaguccuucaacuggaccggcgucacccagaacggcaccuccuccgccugcauccgccgcuccaacuccuccuucuucucccgccucaacuggcucacccaccucaacuucaaguaccccgcccucaacgucaccaugcccaacaacgagcaguucgacaagcucuacaucuggggcguccaccaccccggcaccgacaaggaccagaucuuccucuacgcccaguccuccggccgcaucaccgucuccaccaagcgcucccagcaggccgucauccccaacaucggcucccgcccccgcauccgcaacauccccucccgcaucuccaucuacuggaccaucgucaagcccggcgacauccuccucaucaacuccaccggcaaccucaucgccccccgcggcuacuucaagauccgcuccggcaaguccuccaucaugcgcuccgacgcccccaucggcaagugcaacuccgagugcaucacccccaacggcuccauccccaacgacaagcccuuccagaacgucaaccgcaucaccuacggcgccugcccccgcuacaucaagcaguccacccucaagcucgccaccggcaugcgcaacguccccgagaagcagacccgcggcaucuucggcgccaucgccggcuucaucgagaacggcugggagggcauggucgacggcugguacggcuuccgccaccagaacuccgagggccgcggccaggccgccgaccucaaguccacccaggccgccaucgaccagaucaacggcaagcucaaccgccucaucggcaagaccaacgagaaguuccaccagaucgagaaggaguucuccgaggucgagggccgcauccaggaccucgagaaguacgucgaggacaccaagaucgaccucugguccuacaacgccgagcuccucgucgcccucgagaaccagcacaccaucgaccucaccgacuccgagaugaacaagcucuucgagaagaccaagaagcagcuccgcgagaacgccgaggacaugggcaacggcugcuucaagaucuaccacaagugcgacaacgccugcaucggcuccauccgcaacggcaccuacaaccacgacgucuaccgcgacgaggcccucaacaaccgcuuccagaucaagggcgucgagcucaaguccggcuacaaggacuggauccucuggaucuccuucgccaucuccugcuuccuccucugcgucgcccuccucggcuucaucaugugggccugccagaagggcaacauccgcugcaacaucugcaucuga

SEQ ID NO: 106763 - RNA, 1701 nt, Artificial Sequence; identical to SEQ ID NO: 102891
  derived and/or modified CDS sequence (opt2) from hemagglutinin__InfluenzaA__AHC59987

SEQ ID NO: 106764 - RNA, 1701 nt, Artificial Sequence; identical to SEQ ID NO: 102891
  derived and/or modified CDS sequence (opt2) from hemagglutinin__InfluenzaA__AHC59999

SEQ ID NO: 106765 - RNA, 1701 nt, Artificial Sequence; identical to SEQ ID NO: 103018
  derived and/or modified CDS sequence (opt2) from hemagglutinin__InfluenzaA__AHC60011

SEQ ID NO: 106766 - RNA, 1701 nt, Artificial Sequence; identical to SEQ ID NO: 102891
  derived and/or modified CDS sequence (opt2) from hemagglutinin__InfluenzaA__AHC60023

SEQ ID NO: 106767 - RNA, 1701 nt, Artificial Sequence; identical to SEQ ID NO: 103818
  derived and/or modified CDS sequence (opt2) from hemagglutinin__InfluenzaA__AHC60035

SEQ ID NO: 106768 - RNA, 1701 nt, Artificial Sequence; identical to SEQ ID NO: 103818
  derived and/or modified CDS sequence (opt2) from hemagglutinin__InfluenzaA__AHC60047

SEQ ID NO: 106769 - RNA, 1701 nt, Artificial Sequence
  derived and/or modified CDS sequence (opt2) from hemagglutinin__InfluenzaA__AHC60059
augaagaccaucaucgcccucuccuacauccucugccucgucuucgcccagaagcuccccggcaacgacaacuccaccgccacccucugccucggccaccacgccguccccaacggcaccaucgucaagaccaucaccaacgaccagaucgaggucaccaacgccaccgagcucguccagaacuccuccaccggcgagaucugcgacuccccccaccagauccucgacggcgagaacugcacccucaucgacgcccuccucggcgacccccagugcgacggcuuccagaacaagaagugggaccucuucgucgagcgcuccaaggccuacuccaacugcuaccccuacgacguccccgacuacgccucccuccgcucccucgucgccuccuccggcacccucgaguucaacaacgaguccuucaacuggaccggcgucacccagaacggcaccuccuccgccugcauccgccgcuccaacaacuccuucuucucccgccucaacuggcucacccaccucaacuucaaguaccccgcccucaacgucaccaugcccaacaacgagcaguucgacaagcucuacaucuggggcguccaccaccccggcaccgacaaggaccagaucuuccucuacgcccaggccuccggccgcaucaccgucuccaccaagcgcucccagcaggccgucauccccaacaucggcucccgcccccgcguccgcaacauccccucccgcaucuccaucuacuggaccaucgucaagcccggcgacauccuccucaucaacuccaccggcaaccucaucgccccccgcggcuacuucaagauccgcuccggcaaguccuccaucaugcgcuccgacgcccccaucggcaagugcaacuccgccugcaucacccccaacggcuccauccccaacgacaagcccuuccagaacgucaaccgcaucaccuacggcgccugcccccgcuacgucaagcagaacacccucaagcucgccaccggcaugcgcaacguccccgagaagcagacccgcggcaucuucggcgccaucgccggcuucaucgagaacggcugggagggcauggucgacggcugguacggcuuccgccaccagaacuccgagggccgcggccaggccgccgaccucaaguccacccaggccgccaucgaccagaucaacggcaagcucaaccgccucaucggcaagaccaacgagaaguuccaccagaucgagaaggaguucuccgaggucgagggccgcauccaggaccucgagaaguacgucgaggacaccaagaucgaccucugguccuacaacgccgagcuccucgucgcccucgagaaccagcacaccaucgaccucaccgacuccgagaugaacaagcucuucgagaagaccaagaagcagcuccgcgagaacgccgaggacaugggcaacggcugcuucaagaucuaccacaagugcgacaacgccugcaucggcuccauccgcaacggcaccuacaaccacgacgucuaccgcgacgaggcccucaacaaccgcuuccagaucaagggcgucgagcucaaguccggcuacaaggacuggauccucuggaucuccuucgccaucuccugcuuccuccucugcgucgcccuccucggcuucaucaugugggccugccagaagggcaacauccgcugcaacaucugcaucuga

SEQ ID NO: 106770 - RNA, 1701 nt, Artificial Sequence; identical to SEQ ID NO: 105110
  derived and/or modified CDS sequence (opt2) from hemagglutinin__InfluenzaA__AHC60071

SEQ ID NO: 106771 - RNA, 1701 nt, Artificial Sequence; identical to SEQ ID NO: 106654
  derived and/or modified CDS sequence (opt2) from hemagglutinin__InfluenzaA__AHC60083

SEQ ID NO: 106772 - RNA, 1701 nt, Artificial Sequence; identical to SEQ ID NO: 103818
  derived and/or modified CDS sequence (opt2) from hemagglutinin__InfluenzaA__AHC60095

SEQ ID NO: 106773 - RNA, 1701 nt, Artificial Sequence
  derived and/or modified CDS sequence (opt2) from hemagglutinin__InfluenzaA__AHC60107
augaagaccaucaucgcccucuccuacauccucugccucgucuucgcccagaagcuccccggcaacgacaacuccaccgccacccucugccucggccaccacgccguccccaacggcaccaucgucaagaccaucaccaacgaccagaucgaggucaccaacgccaccgagcucguccagaacuccuccaccggcgagaucugcgacuccccccaccagaucaucgacggcgagaacugcacccucaucgacgcccuccucggcgacccccagugcgacggcuuccagaacaagaagugggaccucuucgucgagcgcuccaaggccuacuccaacugcuaccccuacgacguccccgacuacgccucccuccgcucccucgucgccuccuccggcacccucgaguucaacaacgaguccuucaacuggaccggcgucacccagaacggcaccuccuccgccugcauccgccgcuccaacaacuccuucuucucccgccucaacuggcucacccaccucaacuucaaguaccccgcccucaacgucaccaugcccaacaacgagcaguucgacaagcucuacaucuggggcguccaccaccccggcaccgacaaggaccagaucuuccucuacgcccaggccuccggccgcaucaccgucuccaccaagcgcucccagcaggccgucauccccaacaucggcucccgcccccgcguccgcaacauccccucccgcaucuccaucuacuggaccaucgucaagcccggcgacauccuccucaucaacuccaccggcaaccucaucgccccccgcggcuacuucaagauccgcuccggcaaguccuccaucaugcgcuccgacgcccccaucggcaagugcaacuccgagugcaucacccccaacggcuccauccccaacgacaagcccuuccagaacgucaaccgcaucaccuacggcgccugcccccgcuacgucaagcagaacacccucaagcucgccaccggcaugcgcaacguccccgagaagcagacccgcggcaucuucggcgccaucgccggcuucaucgagaacggcugggagggcauggucgacggcugguacggcuuccgccaccagaacuccgagggccgcggccaggccgccgaccucaaguccacccaggccgccaucgaccagaucaacggcaagcucaaccgccucaucggcaagaccaacgagaaguuccaccagaucgagaaggaguucuccgaggucgagggccgcauccaggaccucgagaaguacgucgaggacaccaagaucgaccucugguccuacaacgccgagcuccucgucgcccucgagaaccagcacaccaucgaccucaccgacuccgagaugaacaagcucuucgagaagaccaagaagcagcuccgcgagaacgccgaggacaugggcaacggcugcuucaagaucuaccacaagugcgacaacgccugcaucggcuccauccgcaacggcaccuacgaccacgacgucuaccgcgacgaggcccucaacaaccgcuucaagaucaagggcgucgagcucaaguccggcuacaaggacuggauccucuggaucuccuucgccaucuccugcuuccuccucugcgucgcccuccucggcuucaucaugugggccugccagaagggcaacauccgcugcaacaucugcaucuga

SEQ ID NO: 106774 - RNA, 1701 nt, Artificial Sequence; identical to SEQ ID NO: 103018
  derived and/or modified CDS sequence (opt2) from hemagglutinin__InfluenzaA__AHC60119

SEQ ID NO: 106775 - RNA, 1701 nt, Artificial Sequence; identical to SEQ ID NO: 103018
  derived and/or modified CDS sequence (opt2) from hemagglutinin__InfluenzaA__AHC60131

SEQ ID NO: 106776 - RNA, 1701 nt, Artificial Sequence; identical to SEQ ID NO: 106684
  derived and/or modified CDS sequence (opt2) from hemagglutinin__InfluenzaA__AHC60143

SEQ ID NO: 106777 - RNA, 1701 nt, Artificial Sequence
  derived and/or modified CDS sequence (opt2) from hemagglutinin__InfluenzaA__AHC60155
augaagaccgucaucgcccucuccuacauccucugccucgccuucgcccagaagcuccccggcaacgacaacuccaccgccacccucugccucggccaccacgccguccccaacggcaccaucgucaagaccaucaccaacgaccagaucgaggucaccaacgccaccgagcucguccaguccucccccaccggcgagaucugcgacuccccccaccagauccucgacggcgagaacugcacccucaucgacgcccuccucggcgacccccagugcgacggcuuccagaacaagaagugggaccucuucgucgagcgcuccaaggccuacuccaacugcuaccccuacgacguccccgacuacgccucccuccgcucccucgucgccuccuccggcacccucgaguucaacaacgaguccuucaacuggaccggcgucacccagaacggcaccuccuccgccugcauccgccgcuccaacaacuccuucuucucccgccucaacuggcucacccaccucaacuucaaguaccccgcccucaacgucaccaugcccaacaacgagcaguucgacaagcucuacaucuggggcguccaccaccccggcaccgacaaggaccagaucuuccucuacgcccaggccuccggccgcaucaccgucuccaccaagcgcucccagcaggccgucauccccaacaucggcucccgcccccgcguccgcaacauccccucccgcaucuccaucuacuggaccaucgucaagcccggcgacauccuccucaucaacuccaccggcaaccucaucgccccccgcggcuacuucaagauccgcuccggcaaguccuccaucaugcgcuccgacgcccccaucggcaagugcaacuccgagugcaucacccccaacggcuccauccccaacgacaagcccuuccagaacgucaaccgcaucaccuacggcgccugcccccgcuacgucaagcagaacacccucaagcucgccaccggcaugcgcaacguccccgagaagcagacccgcggcaucuucggcgccaucgccggcuucaucgagaacggcugggagggcauggucgacggcugguacggcuuccgccaccagaacuccgagggccgcggccaggccgccgaccucaaguccacccaggccgccaucgaccagaucaacggcaagcucaaccgccucaucggcaagaccaacgagaaguuccaccagaucgagaaggaguucuccgaggucgagggccgcauccaggaccucgagaaguacgucgaggacaccaagaucgaccucugguccuacaacgccgagcuccucgucgcccucgagaaccagcacaccaucgaccucaccgacuccgagaugaacaagcucuucgagaagaccaagaagcagcuccgcgagaacgccgaggacaugggcaacggcugcuucaagaucuaccacaagugcgacaacgccugcaucggcuccauccgcaacggcaccuacgaccacgacgucuaccgcgacgaggcccucaacaaccgcuuccagaucaagggcgucgagcucaaguccggcuacaaggacuggauccucuggaucuccuucgccaucuccugcuuccuccucugcgucgcccuccucggcuucaucaugugggccugccagaagggcaacauccgcugcaacaucugcaucuga

SEQ ID NO: 106778 - RNA, 1701 nt, Artificial Sequence; identical to SEQ ID NO: 102891
  derived and/or modified CDS sequence (opt2) from hemagglutinin__InfluenzaA__AHC60167

SEQ ID NO: 106779 - RNA, 1701 nt, Artificial Sequence; identical to SEQ ID NO: 103818
  derived and/or modified CDS sequence (opt2) from hemagglutinin__InfluenzaA__AHC60179

SEQ ID NO: 106780 - RNA, 1701 nt, Artificial Sequence; identical to SEQ ID NO: 106729
  derived and/or modified CDS sequence (opt2) from hemagglutinin__InfluenzaA__AHC60191

SEQ ID NO: 106781 - RNA, 1701 nt, Artificial Sequence; identical to SEQ ID NO: 106729
  derived and/or modified CDS sequence (opt2) from hemagglutinin__InfluenzaA__AHC60203

SEQ ID NO: 106782 - RNA, 1701 nt, Artificial Sequence; identical to SEQ ID NO: 105110
  derived and/or modified CDS sequence (opt2) from hemagglutinin__InfluenzaA__AHC60215

SEQ ID NO: 106783 - RNA, 1701 nt, Artificial Sequence; identical to SEQ ID NO: 103818
  derived and/or modified CDS sequence (opt2) from hemagglutinin__InfluenzaA__AHC60239

SEQ ID NO: 106784 - RNA, 1701 nt, Artificial Sequence; identical to SEQ ID NO: 103818
  derived and/or modified CDS sequence (opt2) from hemagglutinin__InfluenzaA__AHC60251

SEQ ID NO: 106785 - RNA, 1701 nt, Artificial Sequence
  derived and/or modified CDS sequence (opt2) from hemagglutinin__InfluenzaA__AHC60263
augaagaccaucaucgcccucuccuacauccucugccucgucuucgcccagaagcuccccggcaacgagaacuccaccgccacccucugccucggccaccacgccguccccaacggcaccaucgucaagaccaucaccaacgaccagaucgaggucaccaacgccaccgagcucguccagaacuccuccaccggcgagaucugcgacuccccccaccagauccucgacggcgagaacugcacccucaucgacgcccuccucggcgacccccagugcgacggcuuccagaacaagaagugggaccucuucgucgagcgcuccaaggccuacuccaacugcuaccccuacgacguccccgacuacgccucccuccgcucccucgucgccuccuccggcacccucgaguucaacaacgaguccuucaacuggaccggcgucacccagaacggcaccuccuccgccugcauccgccgcuccaacaacuccuucuucucccgccucaacuggcucacccaccucaacuucaaguaccccgcccucaacgucaccaugcccaacaacgagcaguucgacaagcucuacaucuggggcguccaccaccccggcaccgacaaggaccagaucuuccucuacgcccaggccuccggccgcaucaccgucuccaccaagcgcucccagcaggccgucauccccaacaucggcucccgcccccgcguccgcaacauccccucccgcaucuccaucuacuggaccaucgucaagcccggcgacauccuccucaucaacuccaccggcaaccucaucgccccccgcggcuacuucaagauccgcuccggcaaguccuccaucaugcgcuccgacgcccccaucggcaagugcaacuccgagugcaucacccccaacggcuccauccccaacgacaagcccuuccagaacgucaaccgcaucaccuacggcgccugcccccgcuacgucaagcagaacacccucaagcucgccaccggcaugcgcaacguccccgagaagcagacccgcggcaucuucggcgccaucgccggcuucaucgagaacggcugggagggcauggucgacggcugguacggcuuccgccaccagaacuccgagggccgcggccaggccgccgaccucaaguccacccaggccgccaucgaccagaucaacggcaagcucaaccgccucaucggcaagaccaacgagaaguuccaccagaucgagaaggaguucuccgaggucgagggccgcauccaggaccucgagaaguacgucgaggacaccaagaucgaccucugguccuacaacgccgagcuccucgucgcccucgagaaccagcacaccaucgaccucaccgacuccgagaugaacaagcucuucgagaagaccaagaagcagcuccgcgagaacgccgaggacaugggcaacggcugcuucaagaucuaccacaagugcgacaacgccugcaucggcuccauccgcaacggcaccuacgaccacgacgucuaccgcgacgaggcccucaacaaccgcuuccagaucaagggcgucgagcucaaguccggcuacaaggacuggauccucuggaucuccuucgccaucuccugcuuccuccucugcgucgcccuccucggcuucaucaugugggccugccagaagggcaacauccgcugcaacaucugcaucuga

SEQ ID NO: 106786 - RNA, 1701 nt, Artificial Sequence; identical to SEQ ID NO: 102891
  derived and/or modified CDS sequence (opt2) from hemagglutinin__InfluenzaA__AHC60275

SEQ ID NO: 106787 - RNA, 1701 nt, Artificial Sequence; identical to SEQ ID NO: 106773
  derived and/or modified CDS sequence (opt2) from hemagglutinin__InfluenzaA__AHC60287

SEQ ID NO: 106788 - RNA, 1701 nt, Artificial Sequence; identical to SEQ ID NO: 106654
  derived and/or modified CDS sequence (opt2) from hemagglutinin__InfluenzaA__AHC60299

SEQ ID NO: 106789 - RNA, 1701 nt, Artificial Sequence
  derived and/or modified CDS sequence (opt2) from hemagglutinin__InfluenzaA__AHC60311
augaagaccaucaucgcccucuccuacauccucugccucgucuucgcccagaagcuccccggcaacgacaacuccaccgccacccucugccucggccaccacgccguccccaacggcaccaucgucaagaccaucaccaacgaccagaucgaggucaccaacgccaccgagcucguccagaacuccuccaccggcgagaucugcgacuccccccaccagauccucgacggcgagaacugcacccucaucgacgcccuccucggcgacccccagugcgacggcuuccagaacaagaagugggaccucuucgucgagcgcuccaaggccuacuccaacugcuaccccuacgacguccccgacuacgccucccuccgcucccucgucgccuccuccggcacccucgaguucgacaacgaguccuucaacuggaccggcgucacccagaacggcaccuccuccgccugcauccgccgcuccaacaacuccuucuucucccgccucaacuggcucacccaccucaacuucaaguaccccgcccucaacgucaccaugcccaacaacgagcaguucgacaagcucuacaucuggggcguccaccaccccggcaccgacaaggaccagaucuuccucuacgcccaggccuccggccgcaucaccgucuccaccaagcgcucccagcaggccgucauccccaacaucggcucccgcccccgcguccgcaacauccccucccgcaucuccaucuacuggaccaucgucaagcccggcgacauccuccucaucaacuccaccggcaaccucaucgccccccgcggcuacuucaagauccgcuccggcaaguccuccaucaugcgcuccgacgcccccaucggcaagugcaacuccgagugcaucacccccaacggcuccauccccaacgacaagcccuuccagaacgucaaccgcaucaccuacggcgccugcccccgcuacgucaagcagaacacccucaagcucgccaccggcaugcgcaacguccccgagaagcagacccgcggcaucuucggcgccaucgccggcuucaucgagaacggcugggagggcauggucgacggcugguacggcuuccgccaccagaacuccgagggccgcggccaggccgccgaccucaaguccacccaggccgccaucgaccagaucaacggcaagcucaaccgccucaucggcaagaccaacgagaaguuccaccagaucgagaaggaguucuccgaggucgagggccgcauccaggaccucgagaaguacgucgaggacaccaagaucgaccucugguccuacaacgccgagcuccucgucgcccucgagaaccagcacaccaucgaccucaccgacuccgagaugaacaagcucuucgagaagaccaagaagcagcuccgcgagaacgccgaggacaugggcaacggcugcuucaagaucuaccacaagugcgacaacgccugcaucggcuccauccgcaacggcaccuacgaccacgacgucuaccgcgacgaggcccucaacaaccgcuuccagaucaagggcgucgagcucaaguccggcuacaaggacuggauccucuggaucuccuucgccaucuccugcuuccuccucugcgucgcccuccucggcuucaucaugugggccugccagaagggcaacauccgcugcaacaucugcaucuga

SEQ ID NO: 106790 - RNA, 1701 nt, Artificial Sequence; identical to SEQ ID NO: 103818
  derived and/or modified CDS sequence (opt2) from hemagglutinin__InfluenzaA__AHC60323

SEQ ID NO: 106791 - RNA, 1701 nt, Artificial Sequence; identical to SEQ ID NO: 105110
  derived and/or modified CDS sequence (opt2) from hemagglutinin__InfluenzaA__AHC60335

SEQ ID NO: 106792 - RNA, 1701 nt, Artificial Sequence; identical to SEQ ID NO: 102891
  derived and/or modified CDS sequence (opt2) from hemagglutinin__InfluenzaA__AHC60347

SEQ ID NO: 106793 - RNA, 1701 nt, Artificial Sequence; identical to SEQ ID NO: 103018
  derived and/or modified CDS sequence (opt2) from hemagglutinin__InfluenzaA__AHC60359

SEQ ID NO: 106794 - RNA, 1701 nt, Artificial Sequence; identical to SEQ ID NO: 106715
  derived and/or modified CDS sequence (opt2) from hemagglutinin__InfluenzaA__AHC60371

SEQ ID NO: 106795 - RNA, 1701 nt, Artificial Sequence; identical to SEQ ID NO: 102891
  derived and/or modified CDS sequence (opt2) from hemagglutinin__InfluenzaA__AHC60383

SEQ ID NO: 106796 - RNA, 1701 nt, Artificial Sequence; identical to SEQ ID NO: 103018
  derived and/or modified CDS sequence (opt2) from hemagglutinin__InfluenzaA__AHC60395

SEQ ID NO: 106797 - RNA, 1701 nt, Artificial Sequence; identical to SEQ ID NO: 106729
  derived and/or modified CDS sequence (opt2) from hemagglutinin__InfluenzaA__AHC60407

SEQ ID NO: 106798 - RNA, 1701 nt, Artificial Sequence; identical to SEQ ID NO: 102891
  derived and/or modified CDS sequence (opt2) from hemagglutinin__InfluenzaA__AHC60419

SEQ ID NO: 106799 - RNA, 1701 nt, Artificial Sequence; identical to SEQ ID NO: 103018
  derived and/or modified CDS sequence (opt2) from hemagglutinin__InfluenzaA__AHC60431

SEQ ID NO: 106800 - RNA, 1701 nt, Artificial Sequence; identical to SEQ ID NO: 102891
  derived and/or modified CDS sequence (opt2) from hemagglutinin__InfluenzaA__AHC60455

SEQ ID NO: 106801 - RNA, 1701 nt, Artificial Sequence; identical to SEQ ID NO: 102891
  derived and/or modified CDS sequence (opt2) from hemagglutinin__InfluenzaA__AHC60467

SEQ ID NO: 106802 - RNA, 1701 nt, Artificial Sequence; identical to SEQ ID NO: 106653
  derived and/or modified CDS sequence (opt2) from hemagglutinin__InfluenzaA__AHC60479

SEQ ID NO: 106803 - RNA, 1701 nt, Artificial Sequence; identical to SEQ ID NO: 103818
  derived and/or modified CDS sequence (opt2) from hemagglutinin__InfluenzaA__AHC60491

SEQ ID NO: 106804 - RNA, 1701 nt, Artificial Sequence
  derived and/or modified CDS sequence (opt2) from hemagglutinin__InfluenzaA__AHC60503
augaagaccaucaucgcccucuccuacauccucugccucgucuucgcccagaagcuccccggcaacgacaacuccaccgccacccucugccucggccaccacgccguccccaacggcaccaucgucaagaccaucaccaacgaccagaucgaggucaccaacgccaccgagcucguccaguccuccuccaccggcgagaucugcaacuccccccaccagauccucgacggcgagaacugcacccucaucgacgcccuccucggcgacccccagugcgacggcuuccagaacaagaagugggaccucuucgucgagcgcuccaaggccuacuccaacugcuaccccuacgacguccccgacuacgccucccuccgcucccucgucgccuccuccggcacccucgaguucaacaacgaguccuucaacuggaccggcgucacccagaacggcaccuccuccgccugcauccgccgcuccaacaacuccuucuucucccgccucaacuggcucacccaccucaacuucaaguaccccgcccucaacgucaccaugcccaacaacgagcaguucgacaagcucuacaucuggggcguccaccaccccggcaccgacaaggaccagaucuuccucuacgcccaggccuccggccgcaucaccgucuccaccaagcgcucccagcaggccgucauccccaacaucggcucccgcccccgcguccgcaacauccccucccgcaucuccaucuacuggaccaucgucaagcccggcgacauccuccucaucaacuccaccggcaaccucaucgccccccgcggcuacuucaagauccgcuccggcaaguccuccaucaugcgcuccgacgcccccaucggcaagugcaacuccgccugcaucacccccaacggcuccauccccaacgacaagcccuuccagaacgucaaccgcaucaccuacggcgccugcccccgcuacgucaagcagaacacccucaagcucgccaccggcaugcgcaacguccccgagaagcagacccgcggcaucuucggcgccaucgccggcuucaucgagaacggcugggagggcauggucgacggcugguacggcuuccgccaccagaacuccgagggccgcggccaggccgccgaccucaaguccacccaggccgccaucgaccagaucaacggcaagcucaaccgccucaucggcaagaccaacgagaaguuccaccagaucgagaaggaguucuccgaggucgagggccgcauccaggaccucgagaaguacgucgaggacaccaagaucgaccucugguccuacaacgccgagcuccucgucgcccucgagaaccagcacaccaucgaccucaccgacuccgagaugaacaagcucuucgagaagaccaagaagcagcuccgcgagaacgccgaggacaugggcaacggcugcuucaagaucuaccacaagugcgacaacgccugcaucggcuccauccgcaacggcaccuacgaccacgacgucuaccgcgacgaggcccucaacaaccgcuuccagaucaagggcgucgagcucaaguccggcuacaaggacuggauccucuggaucuccuucgccaucuccugcuuccuccucugcgucguccuccucggcuucaucaugugggccugccagaagggcaacauccgcugcaacaucugcaucuga

SEQ ID NO: 106805 - RNA, 1701 nt, Artificial Sequence; identical to SEQ ID NO: 103018
  derived and/or modified CDS sequence (opt2) from hemagglutinin__InfluenzaA__AHC60515

SEQ ID NO: 106806 - RNA, 1701 nt, Artificial Sequence; identical to SEQ ID NO: 103818
  derived and/or modified CDS sequence (opt2) from hemagglutinin__InfluenzaA__AHC60527

SEQ ID NO: 106807 - RNA, 1701 nt, Artificial Sequence; identical to SEQ ID NO: 103018
  derived and/or modified CDS sequence (opt2) from hemagglutinin__InfluenzaA__AHC60539

SEQ ID NO: 106808 - RNA, 1701 nt, Artificial Sequence; identical to SEQ ID NO: 106665
  derived and/or modified CDS sequence (opt2) from hemagglutinin__InfluenzaA__AHC60551

SEQ ID NO: 106809 - RNA, 1701 nt, Artificial Sequence; identical to SEQ ID NO: 105110
  derived and/or modified CDS sequence (opt2) from hemagglutinin__InfluenzaA__AHC60563

SEQ ID NO: 106810 - RNA, 1701 nt, Artificial Sequence; identical to SEQ ID NO: 105110
  derived and/or modified CDS sequence (opt2) from hemagglutinin__InfluenzaA__AHC60575

SEQ ID NO: 106811 - RNA, 1701 nt, Artificial Sequence
  derived and/or modified CDS sequence (opt2) from hemagglutinin__InfluenzaA__AHC60587
augaagaccaucaucgcccucuccuacauccucugccucgucuucgcccagaagcuccccggcaacgacaacuccaccgccacccucugccucggccaccacgccguccccaacggcaccaucgucaagaccaucaccaacgaccagaucgaggucaccaacgccaccgagcucguccagaacuccuccaccggcgagaucugcgacuccccccaccagauccucgacggcgagaacugcacccucaucgacgcccuccucggcgacccccagugcgacggcuuccagaacaagaagugggaccucuucgucgagcgcuccaaggccuacuccaacugcuaccccuacgacguccccgacuacgccucccuccgcucccucgucgccuccuccggcacccucgaguucaacaacgaguccuucaacuggaccggcgucacccagaacggcaccuccuccgccugcauccgccgcuccaacaacuccuucuucucccgccucaacuggcucacccaccucaacuucaaguaccccgcccucaacgucaccaugcccaacaacgagcaguucgacaagcucuacaucuggggcguccaccaccccggcaccgacaaggaccagaucuuccucuacgcccaggccuccggccgcaucaccgucuccaccaagcgcucccagcaggccgucauccccaacaucggcucccgcccccgcguccgcaacauccccucccgcaucuccaucuacuggaccaucgucaagcccggcgacauccuccucaucaacuccaccggcaaccucaucgccccccgcggcuacuucaagauccgcuccggcaaguccuccaucaugcgcuccgacgcccccaucggcaagugcaacuccgagugcaucacccccaacggcuccauccccaacgacaagcccuuccagaacgucaaccgcaucaccuacggcgccugcccccgcuacgucaagcagaacacccucaagcucgccaccggcaugcgcaacguccccgagaagcagacccgcggcaucuucggcgccaucgccggcuucaucgagaacggcugggagggcauggucgacggcugguacggcuuccgccaccagaacuccgagggccgcggccaggccgccgaccucaaguccacccaggccgccaucgaccagaucaacggcaagcucaaccgccucaucggcaagaccaacgagaaguuccaccagaucgagaaggaguucuccgaggucgagggccgcauccagaaccucgagaaguacgucgaggacaccaagaucgaccucugguccuacaacgccgagcuccucgucgcccucgagaaccagcacaccaucgaccucaccgacuccgagaugaacaagcucuucgagaagaccaagaagcagcuccgcgagaacgccgaggacaugggcaacggcugcuucaagaucuaccacaagugcgacaacgccugcaucggcuccauccgcaacggcaccuacgaccacgacgucuaccgcgacgaggcccucaacaaccgcuuccagaucaagggcgucgagcucaaguccggcuacaaggacuggauccucuggaucuccuucgccaucuccugcuuccuccucugcgucgcccuccucggcuucaucaugugggccugccagaagggcaacauccgcugcaacaucugcaucuga

SEQ ID NO: 106812 - RNA, 1701 nt, Artificial Sequence; identical to SEQ ID NO: 105110
  derived and/or modified CDS sequence (opt2) from hemagglutinin__InfluenzaA__AHC60599

SEQ ID NO: 106813 - RNA, 1701 nt, Artificial Sequence; identical to SEQ ID NO: 102891
  derived and/or modified CDS sequence (opt2) from hemagglutinin__InfluenzaA__AHC60611

SEQ ID NO: 106814 - RNA, 1701 nt, Artificial Sequence
  derived and/or modified CDS sequence (opt2) from hemagglutinin__InfluenzaA__AHC60623
augaagaccaucaucgcccucuccuacauccucugccucgucuucgcccagaagcuccccggcaacgacaacuccaccgccacccucugccucggccaccacgccguccccaacggcaccaucgucaagaccaucaccaacgaccagaucgaggucaccaacgccaccgagcucguccaguccuccuccaccggcgagaucugcgacuccccccaccagauccucgacggcgagaacugcacccucaucgacgcccuccucggcgacccccagugcgacggcuuccagaacaagaagugggaccucuucgucgagcgcuccaaggccuacuccaacugcuaccccuacgacguccccgacuacgccucccuccgcucccucgucgccuccuccggcacccucgaguucaacaacgaguccuucaacuggaccggcgucacccagaacggcaccuccuccgccugcauccgccgcuccaacuccuccuucuucucccgccucaacuggcucacccaccucaacuucaaguaccccgcccucaacgucaccaugcccaacaacgagcaguucgacaagcucuacaucuggggcguccaccaccccggcaccgacaaggaccagaucuuccucuacgcccaguccuccggccgcaucaccgucuccaccaagcgcucccagcaggccgucauccccaacaucggcucccgcccccgcauccgcaacauccccucccgcaucuccaucuacuggaccaucgucaagcccggcgacauccuccucaucaacuccaccggcaaccucaucgccccccgcggcuacuucaagauccgcaacggcaaguccuccaucaugcgcuccgacgcccccaucggcaagugcaacuccgagugcaucacccccaacggcuccauccccaacgacaagcccuuccagaacgucaaccgcaucaccuacggcgccugcccccgcuacgucaagcaguccacccucaagcucgccaccggcaugcgcaacguccccgagaagcagacccgcggcaucuucggcgccaucgccggcuucaucgagaacggcugggagggcauggucgacggcugguacggcuuccgccaccagaacuccgagggccgcggccaggccgccgaccucaaguccacccaggccgccaucgaccagaucaacggcaagcucaaccgccucaucggcaagaccaacgagaaguuccaccagaucgagaaggaguucuccgaggucgagggccgcauccaggaccucgagaaguacgucgaggacaccaagaucgaccucugguccuacaacgccgagcuccucgucgcccucgagaaccagcacaccaucgaccucaccgacuccgagaugaacaagcucuucgagaagaccaagaagcagcuccgcgagaacgccgaggacaugggcaacggcugcuucaagaucuaccacaagugcgacaacgccugcaucggcuccauccgcaacggcaccuacaaccacgacgucuaccgcgacgaggcccucaacaaccgcuuccagaucaagggcgucgagcucaaguccggcuacaaggacuggauccucuggaucuccuucgccaucuccugcuuccuccucugcgucgcccuccucggcuucaucaugugggccugccagaagggcaacauccgcugcaacaucugcaucuga

SEQ ID NO: 106815 - RNA, 1701 nt, Artificial Sequence; identical to SEQ ID NO: 105110
  derived and/or modified CDS sequence (opt2) from hemagglutinin__InfluenzaA__AHC60635

SEQ ID NO: 106816 - RNA, 1701 nt, Artificial Sequence
  derived and/or modified CDS sequence (opt2) from hemagglutinin__InfluenzaA__AHC60647
augaagaccaucaucgcccucuccuacauccucugccucgucuucacccagaagcuccccggcaacgacaacuccaccgccacccucugccucggccaccacgccguccccaacggcaccaucgucaagaccaucaccaacgaccagaucgaggucaccaacgccaccgagcucguccagaacuccuccaccggcgagaucugcgacuccccccaccagauccucgacggcgagaacugcacccucaucgacgcccuccucggcgacccccagugcgacggcuuccagaacaagaagugggaccucuucgucgagcgcuccaaggccuacuccaacugcuaccccuacgacguccccgacuacgccucccuccgcucccucgucgccuccuccggcacccucgaguucaacaacgaguccuucaacuggaccggcgucacccagaacggcaccuccuccgccugcauccgccgcuccaacaacuccuucuucucccgccucaacuggcucacccaccucaacuucaaguaccccgcccucaacgucaccaugcccaacaacgagcaguucgacaagcucuacaucuggggcguccaccaccccggcaccgacaaggaccagaucuuccucuacgcccaggccuccggccgcaucaccgucuccaccaagcgcucccagcaggccgucauccccaacaucggcucccgcccccgcguccgcaacauccccucccgcaucuccaucuacuggaccaucgucaagcccggcgacauccuccucaucaacuccaccggcaaccucaucgccccccgcggcuacuucaagauccgcuccggcaaguccuccaucaugcgcuccgacgcccccaucggcaagugcaacuccgagugcaucacccccaacggcuccauccccaacgacaagcccuuccagaacgucaaccgcaucaccuacggcgccugcccccgcuacgucaagcagaacacccucaagcucgccaccggcaugcgcaacguccccgagaagcagacccgcggcaucuucggcgccaucgccggcuucaucgagaacggcugggagggcauggucgacggcugguacggcuuccgccaccagaacuccgagggccgcggccaggccgccgaccucaaguccacccaggccgccaucgaccagaucaacggcaagcucaaccgccucaucggcaagaccaacgagaaguuccaccagaucgagaaggaguucuccgaggucgagggccgcauccaggaccucgagaaguacgucgaggacaccaagaucgaccucugguccuacaacgccgagcuccucgucgcccucgagaaccagcacaccaucgaccucaccgacuccgagaugaacaagcucuucgagaagaccaagaagcagcuccgcgagaacgccgaggacaugggcaacggcugcuucaagaucuaccacaagugcgacaacgccugcaucggcuccauccgcaacggcaccuacgaccacgacgucuaccgcgacgaggcccucaacaaccgcuuccagaucaagggcgucgagcucaaguccggcuacaaggacuggauccucuggaucuccuucgccaucuccugcuuccuccucugcgucgcccuccucggcuucaucaugugggccugccagaagggcaacauccgcugcaacaucugcaucuga

SEQ ID NO: 106817 - RNA, 1701 nt, Artificial Sequence
  derived and/or modified CDS sequence (opt2) from hemagglutinin__InfluenzaA__AHC60659
augaagaccaucaucgcccucuccuacauccucugccucgucuucacccagaagcuccccggcaacgacaacuccaccgccacccucugccucggccaccacgccguccccaacggcaccaucgucaagaccaucaccaacgaccagaucgaggucaccaacgccaccgagcucguccaguccuccuccaccggcgagaucugcaacuccccccaccagauccucgacggcgagaacugcacccucaucgacgcccuccucggcgacccccagugcgacggcuuccagaacaagaagugggaccucuucgucgagcgcuccaaggcccacuccaacugcuaccccuacgacguccccgacuacgccucccuccgcucccucgucgccuccuccggcacccucgaguucaacaacgaguccuucaacuggaccggcgucacccagaacggcaccuccuccgccugcauccgccgcuccaacaacuccuucuucucccgccucaacuggcucacccaccucaacuucaaguaccccgcccucaacgucaccaugcccaacaacgagcaguucgacaagcucuacaucuggggcguccaccaccccggcaccgacaaggaccagaucuuccucuacgcccaggccgccggccgcaucaccgucuccaccaagcgcucccagcaggccgucauccccaacaucggcucccgcccccgcguccgcaacauccccucccgcgucuccaucuacuggaccaucgucaagcccggcgacauccuccucaucaacuccaccggcaaccucaucgccccccgcggcuacuucaagauccgcuccggcaaguccuccaucaugcgcuccgacgcccccaucggcaagugcaacuccgccugcaucacccccaacggcuccauccccaacgacaagcccuuccagaacgucaaccgcaucaccuacggcgccugcccccgcuacgucaagcagaacacccucaagcucgccaccggcaugcgcaacguccccgagaagcagacccgcggcaucuucggcgccaucgccggcuucaucgagaacggcugggagggcauggucgacggcugguacggcuuccgccaccagaacuccgagggccgcggccaggccgccgaccucaaguccacccaggccgccaucgaccagaucaacggcaagcucaaccgccucaucggcaagaccaacgagaaguuccaccagaucgagaaggaguucuccgaggucgagggccgcauccaggaccucgagaaguacgucgaggacaccaagaucgaccucugguccuacaacgccgagcuccucgucgcccucgagaaccagcacaccaucgaccucaccgacuccgagaugaacaagcucuucgagaagaccaagaagcagcuccgcgagaacgccgaggacaugggcaacggcugcuucaagaucuaccacaagugcgacaacgccugcaucggcuccauccgcaacggcaccuacgaccacgacgucuaccgcgacgaggcccucaacaaccgcuuccagaucaagggcgucgagcucaaguccggcuacaaggacuggauccucuggaucuccuucgccaucuccugcuuccuccucugcgucgcccuccucggcuucaucaugugggccugccagaagggcaacauccgcugcaacaucugcaucuga

SEQ ID NO: 106818 - RNA, 1701 nt, Artificial Sequence
  derived and/or modified CDS sequence (opt2) from hemagglutinin__InfluenzaA__AHC60671
augaagaccaucaucgcccucuccuacauccucugccucgucuucgcccagaagcuccccggcaacgacaacuccaccgccacccucugccucggccaccacgccguccccaacggcaccaucgucaagaccaucaccaacgaccagaucgaggucaccaacgccaccgagcucguccaguccuccuccaccggcgagaucugcaacuccccccaccagauccucgacggcgagaacugcacccucaucgacgcccuccucggcgacccccagugcgacggcuuccagaacaaggagugggaccucuucgucgagcgcuccaaggcccacuccaacugcuaccccuacgacguccccgacuacgccucccuccgcucccucgucgccuccuccggcacccucgaguucaacaacgaguccuucaacuggaccggcgucacccagaacggcaccuccuccgccugcauccgccgcuccaacaacuccuucuucucccgccucaacuggcucacccaccucaacuucaaguaccccgcccucaacgucaccaugcccaacaacgagcaguucgacaagcucuacaucuggggcguccaccaccccggcaccgacaaggaccagaucuuccucuacgcccaggccuccggccgcaucaccgucuccaccaagcgcucccagcaggccgucauccccaacaucggcucccgcccccgcguccgcaacauccccucccgcgucuccaucuacuggaccaucgucaagcccggcgacauccuccucaucaacuccaccggcaaccucaucgccccccgcggcuacuucaagauccgcuccggcaaguccuccaucaugcgcuccgacgcccccaucggcaagugcaacuccgccugcaucacccccaacggcuccauccccaacgacaagcccuuccagaacgucaaccgcaucaccuacggcgccugcccccgcuacgucaagcagaacacccucaagcucgccaccggcaugcgcaacguccccgagaagcagacccgcggcaucuucggcgccaucgccggcuucaucgagaacggcugggagggcauggucgacggcugguacggcuuccgccaccagaacuccgagggccgcggccaggccgccgaccucaaguccacccaggccgccaucgaccagaucaacggcaagcucaaccgccucaucggcaagaccaacgagaaguuccaccagaucgagaaggaguucuccgaggucgagggccgcauccaggaccucgagaaguacgucgaggacaccaagaucgaccucugguccuacaacgccgagcuccucgucgcccucgagaaccagcacaccaucgaccucaccgacuccgagaugaacaagcucuucgagaagaccaagaagcagcuccgcgagaacgccgaggacaugggcaacggcugcuucaagaucuaccacaagugcgacaacgccugcaucggcuccauccgcaacggcaccuacgaccacgacgucuaccgcgacgaggcccucaacaaccgcuuccagaucaagggcgucgagcucaaguccggcuacaaggacuggauccucuggaucuccuucgccaucuccugcuuccuccucugcgucgcccuccucggcuucaucaugugggccugccagaagggcaacauccgcugcaacaucugcaucuga

SEQ ID NO: 106819 - RNA, 1701 nt, Artificial Sequence
  derived and/or modified CDS sequence (opt2) from hemagglutinin__InfluenzaA__AHC60683
augaagaccaucaucgcccucuccuacauccucugccucgucuucgcccagaagcuccccggcaacgacaacuccaccgccacccucugccucggccaccacgccguccccaacggcaccaucgucaagaccaucaccaacgaccagaucgaggucaccaacgccaccgagcucguccaguccuccuccaccggcgagaucugcaacuccccccaccagauccucgacggcgagaacugcacccucaucgacgcccuccucggcgacccccagugcgacggcuuccagaacaagaagugggaccucuucgucgagcgcuccaaggcccacuccaacugcuaccccuacgacguccccgacuacgccucccuccgcucccucgucgccuccuccggcacccucgaguucaacaacgaguccuucaacuggaccggcgucacccagaacggcaccuccuccgccugcauccgccgcuccaacaacuccuucuucucccgccucaacuggcucacccaccucaacuucaaguaccccgcccucaacgucaccaugcccaacaacgagcaguucgacaagcucuacaucuggggcguccaccaccccggcaccgacaaggaccagaucuuccucuacgcccaggccgccggccgcaucaccgucuccaccaagcgcucccagcaggccgucauccccaacaucggcucccgcccccgcguccgcaacauccccucccgcgucuccaucuacuggaccaucgucaagcccggcgacauccuccucaucaacuccaccggcaaccucaucgccccccgcggcuacuucaagauccgcuccggcaaguccuccaucauccgcuccgacgcccccaucggcaagugcaacuccgccugcaucacccccaacggcuccauccccaacgacaagcccuuccagaacgucaaccgcaucaccuacggcgccugcccccgcuacgucaagcagaacacccucaagcucgccaccggcaugcgcaacguccccgagaagcagacccgcggcaucuucggcgccaucgccggcuucaucgagaacggcugggagggcauggucgacggcugguacggcuuccgccaccagaacuccgagggccgcggccaggccgccgaccucaaguccacccaggccgccaucgaccagaucaacggcaagcucaaccgccucaucggcaagaccaacgagaaguuccaccagaucgagaaggaguucuccgaggucgagggccgcauccaggaccucgagaaguacgucgaggacaccaagaucgaccucugguccuacaacgccgagcuccucgucgcccucgagaaccagcacaccaucgaccucaccgacuccgagaugaacaagcucuucgagaagaccaagaagcagcuccgcgagaacgccgaggacaugggcaacggcugcuucaagaucuaccacaagugcgacaacgccugcaucggcuccauccgcaacggcaccuacgaccacgacgucuaccgcgacgaggcccucaacaaccgcuuccagaucaagggcgucgagcucaaguccggcuacaaggacuggauccucuggaucuccuucgccaucuccugcuuccuccucugcgucgcccuccucggcuucaucaugugggccugccagaagggcaacauccgcugcaacaucugcaucuga

SEQ ID NO: 106820 - RNA, 1701 nt, Artificial Sequence
  derived and/or modified CDS sequence (opt2) from hemagglutinin__InfluenzaA__AHC60695
augaagaccaucaucgcccucuccuacauccucugccucgucuucgcccagaagcuccccggcaacgacaacuccaccgccacccucugccucggccaccacgccguccccaacggcaccaucgucaagaccaucaccaacgaccagaucgaggucaccaacgccaccgagcucguccaguccuccuccaccggcgagaucugcaacuccccccaccagauccucgacggcgagaacugcacccucaucgacgcccuccucggcgacccccagugcgacggcuuccagaacaagaagugggaccucuucgucgagcgcuccaaggcccacuccaacugcuaccccuacgacguccccgacuacgccucccuccgcucccucgucgccuccuccggcacccucgaguucaacaacgaguccuucaacuggaccggcgucacccagaacggcaccuccuccgccugcaugcgcggcuccaacaacuccuucuucucccgccucaacuggcucacccaccucaacuucaaguaccccgcccucaacgucaccaugcccaacaacgagcaguucgacaagcucuacaucuggggcguccaccaccccggcaccgacaaggaccagaucuuccucuacgcccaggccuccggccgcaucaccgucuccaccaagcgcucccagcaggccgucauccccaacaucggcucccgcccccgcguccgcaacauccccucccgcgucuccaucuacuggaccaucgucaagcccggcgacauccuccucaucaacuccaccggcaaccucaucgccccccgcggcuacuucaagauccgcuccggcaaguccuccaucaugcgcuccgacgcccccaucggcaagugcaacuccgccugcaucacccccaacggcuccauccccaacgacaagcccuuccagaacgucaaccgcaucaccuacggcgccugcccccgcuacgucaagcagaacacccucaagcucgccaccggcaugcgcaacguccccgagaagcagacccgcggcaucuucggcgccaucgccggcuucaucgagaacggcugggagggcauggucgacggcugguacggcuuccgccaccagaacuccgagggccgcggccaggccgccgaccucaaguccacccaggccgccaucgaccagaucaacggcaagcucaaccgccucaucggcaagaccaacgagaaguuccaccagaucgagaaggaguucuccgaggucgagggccgcauccaggaccucgagaaguacgucgaggacaccaagaucgaccucugguccuacaacgccgagcuccucgucgcccucgagaaccagcacaccaucgaccucaccgacuccgagaugaacaagcucuucgagaagaccaagaagcagcuccgcgagaacgccgaggacaugggcaacggcugcuucaagaucuaccacaagugcgacaacgccugcaucggcuccauccgcaacggcaccuacgaccacgacgucuaccgcgacgaggcccucaacaaccgcuuccagaucaagggcgucgagcucaaguccggcuacaaggacuggauccucuggaucuccuucgccaucuccugcuuccuccucugcgucgcccuccucggcuucaucaugugggccugccagaagggcaacauccgcugcaacaucugcaucuga

SEQ ID NO: 106821 - RNA, 1701 nt, Artificial Sequence
  derived and/or modified CDS sequence (opt2) from hemagglutinin__InfluenzaA__AHC60707
augaagaccaucaucgcccucuccuacauccucugccucgucuucgcccagaagcuccccggcaacgacaacuccaccgccacccucugccucggccaccacgccguccccaacggcaccaucgucaagaccaucaccgacgaccagaucgaggucaccaacgccaccgagcucguccagaacuccuccaccggcgagaucugcgacuccccccaccagauccucgacggcgagaacugcacccucaucgacgcccuccucggcgacccccagugcgacggcuuccagaacaagaagugggaccucuucgucgagcgcuccaaggccuacuccaacugcuaccccuacgacguccccgacuacgccucccuccgcucccucgucgccuccuccggcacccucgaguucaacaacgaguccuucaacuggaccggcgucacccagaacggcaccuccuccgccugcauccgccgcuccaacaacuccuucuucucccgccucaacuggcucacccaccucaacuucaaguaccccgcccucaacgucaccaugcccaacaacgagcaguucgacaagcucuacaucuggggcguccaccaccccggcaccgacaaggaccagaucuuccucuacgcccaggccuccggccgcaucaccgucuccaccaagcgcucccagcaggccgucauccccaacaucggcucccgcccccgcguccgcaacauccccucccgcaucuccaucuacuggaccaucgucaagcccggcgacauccuccucaucaacuccaccggcaaccucaucgccccccgcggcuacuucaagauccgcuccggcaaguccuccaucaugcgcuccgacgcccccaucggcaagugcaacuccgagugcaucacccccaacggcuccauccccaacgacaagcccuuccagaacgucaaccgcaucaccuacggcgccugcccccgcuacgucaagcagaacacccucaagcucgccaccggcaugcgcaacguccccgagaagcagacccgcggcaucuucggcgccaucgccggcuucaucgagaacggcugggagggcauggucgacggcugguacggcuuccgccaccagaacuccgagggccgcggccaggccgccgaccucaaguccacccaggccgccaucgaccagaucaacggcaagcucaaccgccucaucggcaagaccaacgagaaguuccaccagaucgagaaggaguucuccgaggucgagggccgcauccaggaccucgagaaguacgucgaggacaccaagaucgaccucugguccuacaacgccgagcuccucgucgcccucgagaaccagcacaccaucgaccucaccgacuccgagaugaacaagcucuucgagaagaccaagaagcagcuccgcgagaacgccgaggacaugggcaacggcugcuucaagaucuaccacaagugcgacaacgccugcaucggcuccauccgcaacggcaccuacgaccacgacgucuaccgcgacgaggcccucaacaaccgcuuccagaucaagggcgucgagcucaaguccggcuacaaggacuggaucaucuggaucuccuucgccaucuccugcuuccuccucugcgucgcccuccucggcuucaucaugugggccugccagaagggcaacauccgcugcaacaucugcaucuga

SEQ ID NO: 106822 - RNA, 1701 nt, Artificial Sequence; identical to SEQ ID NO: 102891
  derived and/or modified CDS sequence (opt2) from hemagglutinin__InfluenzaA__AHC60719

SEQ ID NO: 106823 - RNA, 1701 nt, Artificial Sequence; identical to SEQ ID NO: 103018
  derived and/or modified CDS sequence (opt2) from hemagglutinin__InfluenzaA__AHC60731

SEQ ID NO: 106824 - RNA, 1701 nt, Artificial Sequence; identical to SEQ ID NO: 106729
  derived and/or modified CDS sequence (opt2) from hemagglutinin__InfluenzaA__AHC60743

SEQ ID NO: 106825 - RNA, 1701 nt, Artificial Sequence; identical to SEQ ID NO: 99447
  derived and/or modified CDS sequence (opt2) from hemagglutinin__InfluenzaA__AHC60767

SEQ ID NO: 106826 - RNA, 1701 nt, Artificial Sequence
  derived and/or modified CDS sequence (opt2) from hemagglutinin__InfluenzaA__AHC60779
augaagaccaucaucgcccucuccuacauccucugccucgucuucgcccagaagcuccccggcaacgacaacuccaccgccacccucugccucggccaccacgccguccccaacggcaccaucgucaagaccaucaccaacgaccagaucgaggucaccaacgccaccgagcucguccaguccuccuccaccggcgagaucugcaacuccccccaccagauccucgacggcgagaacugcacccucaucgacgcccuccucggcgacccccagugcgacggcuuccagaacaagaagugggaccucuucgucgagcgcuccaaggcccacuccaacugcuaccccuacgacguccccgacuacgccucccuccgcucccucgucgccuccuccggcacccucgaguucaacaacgagcgcuucaacuggaccggcgucacccagaacggcaccuccuccgccugcauccgccgcuccaacaacuccuucuucucccgccucaacuggcucacccaccucaacuucaaguaccccgcccucaacgucaccaugcccaacaacgagcaguucgacaagcucuacaucuggggcguccaccaccccggcaccgacaaggaccagaucuuccucuacgcccaggccgccggccgcaucaccgucuccaccaagcgcucccagcaggccgucauccccaacaucggcucccgcccccgcguccgcaacauccccucccgcgucuccaucuacuggaccaucgucaagcccggcgacauccuccucaucaacuccaccggcaaccucaucgccccccgcggcuacuucaagauccgcuccggcaaguccuccaucaugcgcuccgacgcccccaucggcaagugcaacuccgccugcaucacccccaacggcuccauccccaacgacaagcccuuccagaacgucaaccgcaucaccuacggcgccugcccccgcuacgucaagcagaacacccucaagcucgccaccggcaugcgcaacguccccgagaagcagacccgcggcaucuucggcgccaucgccggcuucaucgagaacggcugggagggcauggucgacggcugguacggcuuccgccaccagaacuccgagggccgcggccaggccgccgaccucaaguccacccaggccgccaucgaccagaucaacggcaagcucaaccgccucaucggcaagaccaacgagaaguuccaccagaucgagaaggaguucuccgaggucgagggccgcauccaggaccucgagaaguacgucgaggacaccaagaucgaccucugguccuacaacgccgagcuccucgucgcccucgagaaccagcacaccaucgaccucaccgacuccgagaugaacaagcucuucgagaagaccaagaagcagcuccgcgagaacgccgaggacaugggcaacggcugcuucaagaucuaccacaagugcgacaacgccugcaucggcuccauccgcaacggcaccuacgaccacgacgucuaccgcgacgaggcccucaacaaccgcuuccagaucaagggcgucgagcucaaguccggcuacaaggacuggauccucuggaucuccuucgccaucuccugcuuccuccucugcgucgcccuccucggcuucaucaugugggccugccagaagggcaacauccgcugcaacaucugcaucuga

SEQ ID NO: 106827 - RNA, 1701 nt, Artificial Sequence; identical to SEQ ID NO: 103018
  derived and/or modified CDS sequence (opt2) from hemagglutinin__InfluenzaA__AHC60791

SEQ ID NO: 106828 - RNA, 1701 nt, Artificial Sequence; identical to SEQ ID NO: 106687
  derived and/or modified CDS sequence (opt2) from hemagglutinin__InfluenzaA__AHC60803

SEQ ID NO: 106829 - RNA, 1701 nt, Artificial Sequence; identical to SEQ ID NO: 102891
  derived and/or modified CDS sequence (opt2) from hemagglutinin__InfluenzaA__AHC60815

SEQ ID NO: 106830 - RNA, 1701 nt, Artificial Sequence
  derived and/or modified CDS sequence (opt2) from hemagglutinin__InfluenzaA__AHC60827
augaagaccaucaucgcccucuccuacauccucugccucgucuucgcccagaagcuccccggcaacgacaacuccaccgccacccucugccucggccaccacgccguccccaacggcaccaucgucaagaccaucaccaacgaccagaucgaggucaccaacgccaccgagcucguccaguccuccuccaccgacgagaucugcaacuccccccaccagauccucgacggcgagaacugcacccucaucgacgcccuccucggcgacccccagugcgacggcuuccagaacaagaagugggaccucuucgucgagcgcuccaaggcccacuccaacugcuaccccuacgacguccccgacuacgccucccuccgcucccucgucgccuccuccggcacccucgaguucaacaacgaguccuucaacuggaccggcgucacccagaacggcaccuccuccgccugcauccgcggcuccaacaacuccuucuucucccgccucaacuggcucacccaccucaacuucaaguaccccgcccucaacgucaccaugcccaacaacgagcaguucgacaagcucuacaucuggggcguccaccaccccggcaccgacaaggaccagaucuuccucuacgcccaggccuccggccgcaucaccgucuccaccaagcgcucccagcaggccgucauccccaacaucggcucccgcccccgcguccgcaacauccccucccgcgucuccaucuacuggaccaucgucaagcccggcgacauccuccucaucaacuccaccggcaaccucaucgccccccgcggcuacuucaagauccgcuccggcaaguccuccaucaugcgcuccgacgcccccaucggcaagugcaacuccgccugcaucacccccaacggcuccauccccaacgacaagcccuuccagaacgucaaccgcaucaccuacggcgccugcccccgcuacgucaagcagaacacccucaagcucgccaccggcaugcgcaacguccccgagaagcagacccgcggcaucuucggcgccaucgccggcuucaucgagaacggcugggagggcauggucgacggcugguacggcuuccgccaccagaacuccgagggccgcggccaggccgccgaccucaaguccacccaggccgccaucgaccagaucaacggcaagcucaaccgccucaucggcaagaccaacgagaaguuccaccagaucgagaaggaguucuccgaggucgagggccgcauccaggaccucgagaaguacgucgaggacaccaagaucgaccucugguccuacaacgccgagcuccucgucgcccucgagaaccagcacaccaucgaccucaccgacuccgagaugaacaagcucuucgagaagaccaagaagcagcuccgcgagaacgccgaggacaugggcaacggcugcuucaagaucuaccacaagugcgacaacgccugcaucggcuccauccgcaacggcaccuacgaccacgacgucuaccgcgacgaggcccucaacaaccgcuuccagaucaagggcgucgagcucaaguccggcuacaaggacuggauccucuggaucuccuucgccaucuccugcuuccuccucugcgucgcccuccucggcuucaucaugugggccugccagaagggcaacauccgcugcaacaucugcaucuga

SEQ ID NO: 106831 - RNA, 1701 nt, Artificial Sequence; identical to SEQ ID NO: 106665
  derived and/or modified CDS sequence (opt2) from hemagglutinin__InfluenzaA__AHC60839

SEQ ID NO: 106832 - RNA, 1701 nt, Artificial Sequence; identical to SEQ ID NO: 103018
  derived and/or modified CDS sequence (opt2) from hemagglutinin__InfluenzaA__AHC60851

SEQ ID NO: 106833 - RNA, 1701 nt, Artificial Sequence
  derived and/or modified CDS sequence (opt2) from hemagglutinin__InfluenzaA__AHC60863
augaagaccaucaucgcccucuccuacauccucugccucgucuucgcccagaagcuccccggcaacgacaacuccaccgccacccucugccucggccaccacgccguccccaacggcaccaucgucaagaccaucaccaacgaccagaucgaggucaccaacgccaccgagcucguccaguccuccuccaccggcgagaucugcaacuccccccaccagauccucgacggcgagaacugcacccucaucgacgcccuccucggcgacccccagugcgacggcuuccagaacaagaagugggaccucuucgucgagcgcuccaaggcccacuccaacugcuaccccuacgacguccccgacuacgccucccuccgcucccucgucgccuccuccggcacccucgaguucaacaacgaguccuucaacuggaccggcgucacccagaacggcaccuccuccgccugcauccgccgcuccaacaacuccuucuucucccgccucaacuggcucacccaccucaacuucaaguaccccgcccucaacgucaccaugcccaacaacgagcaguucgacaagcucuacaucuggggcguccaccaccccggcaccgacaaggaccagaucuuccucuacgcccaggccgccggccgcaucaccgucuccaccaagcgcucccagcaggccgucauccccaacaucggcucccgcccccgcguccgcaacauccccucccgcgucuccaucuacuggaccaucgucaagcccggcgacauccuccucaucaacuccaccggcaaccucaucgccccccgcggcuacuucaagauccgcuccggcaaguccuccaucaugcgcuccgacgcccccaucggcaagugcaacuccgccugcaucacccccaacggcuccauccccaacgacaagcccuuccagaacgucaaccgcaucaccuacggcgccugcccccgcuacgucaagcagaacacccucaagcucgccaccggcaugcgcaacguccccgagaagcagacccgcggcaucuucggcgccaucgccggcuucaucgagaacggcugggagggcauggucgacggcugguacggcuuccgccaccagaacuccgagggccgcggccaggccgccgaccucaaguccacccaggccgccaucgaccagaucaacggcaagcucaaccgccucaucggcaagaccaacgagaaguuccaccagaucgagaaggaguucuccgaggucgagggccgcauccaggaccucgagaaguacgucgaggacaccaagaucgaccucugguccuacaacgccgagcuccucgucgcccucgagaaccagcacaccaucgaccucaccgacuccgagaugaacaagcucuucgagaagaccaagaagcagcuccgcgagaacgccgaggacaugggcaacggcugcuucaagaucuaccacaagugcgacaacgccugcaucggcuccauccgcaacggcaccuacgaccacgacgucuaccgcgacgaggcccucaacaaccgcuuccagaucaagggcgucgagcucaaggccggcuacaaggacuggauccucuggaucuccuucgccaucuccugcuuccuccucugcgucgcccuccucggcuucaucaugugggccugccagaagggcaacauccgcugcaacaucugcaucuga

SEQ ID NO: 106834 - RNA, 1701 nt, Artificial Sequence; identical to SEQ ID NO: 103018
  derived and/or modified CDS sequence (opt2) from hemagglutinin__InfluenzaA__AHC60875

SEQ ID NO: 106835 - RNA, 1701 nt, Artificial Sequence; identical to SEQ ID NO: 103018
  derived and/or modified CDS sequence (opt2) from hemagglutinin__InfluenzaA__AHC60887

SEQ ID NO: 106836 - RNA, 1701 nt, Artificial Sequence; identical to SEQ ID NO: 99447
  derived and/or modified CDS sequence (opt2) from hemagglutinin__InfluenzaA__AHC60899

SEQ ID NO: 106837 - RNA, 1701 nt, Artificial Sequence; identical to SEQ ID NO: 103818
  derived and/or modified CDS sequence (opt2) from hemagglutinin__InfluenzaA__AHC60911

SEQ ID NO: 106838 - RNA, 1701 nt, Artificial Sequence; identical to SEQ ID NO: 106654
  derived and/or modified CDS sequence (opt2) from hemagglutinin__InfluenzaA__AHC60923

SEQ ID NO: 106839 - RNA, 1701 nt, Artificial Sequence; identical to SEQ ID NO: 103818
  derived and/or modified CDS sequence (opt2) from hemagglutinin__InfluenzaA__AHC60935

SEQ ID NO: 106840 - RNA, 1701 nt, Artificial Sequence; identical to SEQ ID NO: 103018
  derived and/or modified CDS sequence (opt2) from hemagglutinin__InfluenzaA__AHC60947

SEQ ID NO: 106841 - RNA, 1701 nt, Artificial Sequence; identical to SEQ ID NO: 103818
  derived and/or modified CDS sequence (opt2) from hemagglutinin__InfluenzaA__AHC60959

SEQ ID NO: 106842 - RNA, 1701 nt, Artificial Sequence; identical to SEQ ID NO: 102891
  derived and/or modified CDS sequence (opt2) from hemagglutinin__InfluenzaA__AHC60971

SEQ ID NO: 106843 - RNA, 1701 nt, Artificial Sequence; identical to SEQ ID NO: 103818
  derived and/or modified CDS sequence (opt2) from hemagglutinin__InfluenzaA__AHC60983

SEQ ID NO: 106844 - RNA, 1701 nt, Artificial Sequence; identical to SEQ ID NO: 103018
  derived and/or modified CDS sequence (opt2) from hemagglutinin__InfluenzaA__AHC61007

SEQ ID NO: 106845 - RNA, 1701 nt, Artificial Sequence; identical to SEQ ID NO: 102891
  derived and/or modified CDS sequence (opt2) from hemagglutinin__InfluenzaA__AHC61019

SEQ ID NO: 106846 - RNA, 1701 nt, Artificial Sequence
  derived and/or modified CDS sequence (opt2) from hemagglutinin__InfluenzaA__AHC61031
augaagaccaucaucgcccucuccuacauccucugccucgucuucgcccagaagcuccccggcaacgacaacuccaccgccacccucugccucggccaccacgccguccccaacggcaccaucgucaagaccaucaccaacgaccagaucgaggucaccaacgccaccgagcucguccaguccuccuccaccggcgagaucugcaacuccccccaccagauccucgacggcgagaacugcacccucaucgacgcccuccucggcgacccccagugcgacggcuuccagaacaagaagugggaccucuucgucgagcgcuccaaggcccacuccaacugcuaccccuacgacguccccgacuacgccucccuccgcucccucgucgccuccuccggcacccucgaguucaacaacgaguccuucaacuggaccggcgucacccagaacggcaccuccuccgccugcauccgccgcuccaacaacuccuucuucucccgccucaacuggcucacccaccucaacuucaaguaccccgcccucaacgucaccaugcccaacaacgagcaguucgacaagcucuacaucuggggcguccaccaccccggcaccgacaaggaccagaucuuccucuacgcccaggccgccggccgcaucaccgucuccaccaagcgcucccagcaggccgucauccccaacaucggcucccgcccccgcguccgcaacauccccucccgcgucuccaucuacuggaccaucgucaagcccggcgacauccuccucaucaacuccaccggcaaccucaucgccccccgcggcuacuucaagauccgcuccggcaaguccuccaucaugcgcuccgacgcccccaucggcaagugcaacuccgccugcaucacccccaacggcuccauccccaacgacaagcccuuccagaacgucaaccgcaucaccuacggcgccugcccccgcuacgucaagcagaacacccucaagcucgccaccggcaugcgcaacguccccgagaagcagacccgcggcaucuucggcgccaucgccggcuucaucgagaacggcugggagggcauggucgacggcugguacggcuuccgccaccagaacuccgagggccgcggccaggccgccgaccucaaguccacccaggccgccaucgaccagaucaacggcaagcucaaccgccucaucggcaagaccaacgagaaguuccaccagaucgagaaggaguucuccgaggucgagggccgcauccaggaccucgagaaguacgucgaggacaccaagaucgaccucugguccuacaacgccgagcuccucgucgcccucgagaaccagcacaccaucgaccucaccgacuccgagaugaacaagcucuucgagaagaccaagaagcagcuccgcgagaacgccgaggacaugggcaacggcugcuucaagaucuaccacaagugcgacaacgccugcaucggcuccauccgcaacggcaccuacgaccacgacgucuaccgcgacgaggcccucaacaaccgcuuccagaucaagggcgucgagcucaaguccggcuacaaggacuggauccucuggaucuccuucgccaucuccugcuuccuccucugcgucguccuccucggcuucaucaugugggccugccagaagggcaacauccgcugcaacaucugcaucuga

SEQ ID NO: 106847 - RNA, 1701 nt, Artificial Sequence; identical to SEQ ID NO: 103818
  derived and/or modified CDS sequence (opt2) from hemagglutinin__InfluenzaA__AHC61043

SEQ ID NO: 106848 - RNA, 1701 nt, Artificial Sequence
  derived and/or modified CDS sequence (opt2) from hemagglutinin__InfluenzaA__AHC61055
augaagaccaucaucgcccucuccuacauccucugccucgucuucgcccagaagcuccccggcaacgacaacuccaccgccacccucugccucggccaccacgccguccccaacggcaccaucgucaagaccaucaccaacgaccagaucgaggucaccaacgccaccgagcucguccaguccuccuccaccggcgagaucugcaacuccccccaccagauccucgacggcgagaacugcacccucaucgacgcccuccucggcgacccccagugcgacggcuuccagaacaagaagugggaccucuucgucgagcgcuccaaggcccacuccaacugcuaccccuacgacguccccgacuacgccucccuccgcucccucgucgccuccuccggcacccucgaguucaacaacgaguccuucaacuggaccggcgucacccagaacggcaccuccuccgccugcauccgccgcuccaacaacuccuucuucucccgccucaacuggcucacccaccucaacuucaaguaccccgcccucaacgucaccaugcccaacaacgagcaguucgacaagcucuacaucuggggcguccaccaccccggcaccgacaaggaccagaucuuccucuacgcccaggccgccggccgcaucaccgucuccaccaagcgcucccagcaggccgucauccccaacaucggcucccgcccccgcguccgcaacauccccucccgcgucuccaucuacuggaccaucgucaagcccggcgacauccuccucaucaacuccaccggcaaccucaucgccccccgcggcuacuucaagauccgcuccggcaaguccuccaucaugcgcuccgacgcccccaucggcaagugcaacuccgccugcaucacccccaacggcuccauccccaacgacaagcccuuccagaacgucaaccgcaucaccuacggcgccugcccccgcuacgucaagcagaacacccucaagcucgccaccggcaugcgcaacguccccgagaagcagacccgcggcaucuucggcgccaucgccggcuucaucgagaacggcugggagggcauggucgacggcugguacggcuuccgccaccagaacuccgagggccgcggccaggccgccgaccucaaguccacccaggccgccaucgaccagaucaacggcaagcucaaccgccucaucggcaagaccaacgagaaguuccaccagaucgagaaggaguucuccgaggucgagggccgcauccagaaccucgagaaguacgucgaggacaccaagaucgaccucugguccuacaacgccgagcuccucgucgcccucgagaaccagcacaccaucgaccucaccgacuccgagaugaacaagcucuucgagaagaccaagaagcagcuccgcgagaacgccgaggacaugggcaacggcugcuucaagaucuaccacaagugcgacaacgccugcaucggcuccauccgcaacggcaccuacgaccacgacgucuaccgcgacgaggcccucaacaaccgcuuccagaucaagggcgucgagcucaaguccggcuacaaggacuggauccucuggaucuccuucgccaucuccugcuuccuccucugcgucgcccuccucggcuucaucaugugggccugccagaagggcaacauccgcugcaacaucugcaucuga

SEQ ID NO: 106849 - RNA, 1701 nt, Artificial Sequence; identical to SEQ ID NO: 106715
  derived and/or modified CDS sequence (opt2) from hemagglutinin__InfluenzaA__AHC61067

SEQ ID NO: 106850 - RNA, 1701 nt, Artificial Sequence; identical to SEQ ID NO: 105110
  derived and/or modified CDS sequence (opt2) from hemagglutinin__InfluenzaA__AHC61079

SEQ ID NO: 106851 - RNA, 1701 nt, Artificial Sequence; identical to SEQ ID NO: 103018
  derived and/or modified CDS sequence (opt2) from hemagglutinin__InfluenzaA__AHC61103

SEQ ID NO: 106852 - RNA, 1701 nt, Artificial Sequence; identical to SEQ ID NO: 103018
  derived and/or modified CDS sequence (opt2) from hemagglutinin__InfluenzaA__AHC61115

SEQ ID NO: 106853 - RNA, 1701 nt, Artificial Sequence; identical to SEQ ID NO: 103818
  derived and/or modified CDS sequence (opt2) from hemagglutinin__InfluenzaA__AHC61127

SEQ ID NO: 106854 - RNA, 1701 nt, Artificial Sequence
  derived and/or modified CDS sequence (opt2) from hemagglutinin__InfluenzaA__AHC61139
augaagaccaucaucgcccucuccuacauccucugccucgucuucgcccagaagcuccccggcaacgacaacuccaccgccacccucugccucggccaccacgccguccccaacggcaccaucgucaagaccaucaccaacgaccagaucgaggucaccaacgccaccgagcucguccaguccuccuccaccggcgagaucugcaacuccccccaccagauccucgacggcgagaacugcacccucaucgacgcccuccucggcgacccccagugcgacggcuuccagaacaagaagugggaccucuucgucgagcgcuccaaggcccacuccaacugcuaccccuacgacguccccgacuacgccucccuccgcucccucgucgccuccuccggcacccucgaguucaacaacgaguccuucaacuggaccggcgucacccagaacggcaccuccuccgccugcauccgccgcuccaacaacuccuucuucucccgccucaacuggcucacccaccucaacuucaaguaccccgcccucaacgucaccaugcccaacaacgagcaguucgacaagcucuacaucuggggcguccaccaccccggcaccgacaaggaccagaucuuccucuacgcccaggccuccggccgcaucaccgucuccacccagcgcucccagcaggccgucauccccaacaucggcucccgcccccgcguccgcaacauccccucccgcgucuccaucuacuggaccaucgucaagcccggcgacauccuccucaucaacuccaccggcaaccucaucgccccccgcggcuacuucaagauccgcuccggcaaguccuccaucaugcgcuccgacgcccccaucggcaagugcaacuccgccugcaucacccccaacggcuccauccccaacgacaagcccuuccagaacgucaaccgcaucaccuacggcgccugcccccgcuacgucaagcagaacacccucaagcucgccaccggcaugcgcaacguccccgagaagcagacccgcggcaucuucggcgccaucgccggcuucaucgagaacggcugggagggcauggucgacggcugguacggcuuccgccaccagaacuccgagggccgcggccaggccgccgaccucaaguccacccaggccgccaucgaccagaucaacggcaagcucaaccgccucaucggcaagaccaacgagaaguuccaccagaucgagaaggaguucuccgaggucgagggccgcauccaggaccucgagaaguacgucgaggacaccaagaucgaccucugguccuacaacgccgagcuccucgucgcccucgagaaccagcacaccaucgaccucaccgacuccgagaugaacaagcucuucgagaagaccaagaagcagcuccgcgagaacgccgaggacaugggcaacggcugcuucaagaucuaccacaagugcgacaacgccugcaucggcuccauccgcaacggcaccuacaaccacgacgucuaccgcgacgaggcccucaacaaccgcuuccagaucaagggcgucgagcucaaguccggcuacaaggacuggauccucuggaucuccuucgccaucuccugcuuccuccucugcgucgcccuccucggcuucaucaugugggccugccagaagggcaacauccgcugcaacaucugcaucuga

SEQ ID NO: 106855 - RNA, 1701 nt, Artificial Sequence; identical to SEQ ID NO: 103018
  derived and/or modified CDS sequence (opt2) from hemagglutinin__InfluenzaA__AHC61151

SEQ ID NO: 106856 - RNA, 1701 nt, Artificial Sequence
  derived and/or modified CDS sequence (opt2) from hemagglutinin__InfluenzaA__AHC61163
augaagaccaucaucgcccucuccuacauccucugccucgucuucgcccagaagcuccccggcaacgacaacuccaccgccacccucugccucggccaccacgccguccccaacggcaccaucgucaagaccaucaccaacgaccagaucgaggucaccaacgccaccgagcucguccaguccuccuccaccggcgagaucugcaacuccccccaccagauccucgacggcgagaacugcacccucaucgacgcccuccucggcgacccccagugcgacggcuuccagaacaagaagugggaccucuucgucgagcgcuccaaggcccacuccaacugcuaccccuacgacguccccgacuacgccucccuccgcucccucgucgccuccuccggcacccucgaguucaagaacgaguccuucaacuggaccggcgucacccagaacggcaccuccuccgccugcauccgccgcuccaacaacuccuucuucucccgccucaacuggcucacccaccucaacuucaaguaccccgcccucaacgucaccaugcccaacaacgagcaguucgacaagcucuacaucuggggcguccaccaccccggcaccgacaaggaccagaucuuccucuacgcccaggccuccggccgcaucaccgucuccaccaagcgcucccagcaggccgucguccccaacaucggcucccgcccccgcguccgcaacauccccucccgcgucuccaucuacuggaccaucgucaagcccggcgacauccuccucaucaacuccaccggcaaccucaucgccccccgcggcuacuucaagauccgcuccggcaaguccuccaucaugcgcuccgacgcccccaucggcaagugcaacuccgccugcaucacccccaacggcuccauccccaacgacaagcccuuccagaacgucaaccgcaucaccuacggcgccugcccccgcuacgucaagcagaacacccucaagcucgccaccggcaugcgcaacguccccgagaagcagacccgcggcaucuucggcgccaucgccggcuucaucgagaacggcugggagggcauggucgacggcugguacggcuuccgccaccagaacuccgagggccgcggccaggccgccgaccucaaguccacccaggccgccaucgaccagaucaacggcaagcucaaccgccucaucggcaagaccaacgagaaguuccaccagaucgagaaggaguucuccgaggucgagggccgcauccaggaccucgagaaguacgucgaggacaccaagaucgaccucugguccuacaacgccgagcuccucgucgcccucgagaaccagcacaccaucgaccucaccgacuccgagaugaacaagcucuucgagaagaccaagaagcagcuccgcgagaacgccgaggacaugggcaacggcugcuucaagaucuaccacaagugcgacaacgccugcaucggcuccauccgcaacggcaccuacgaccacgacgucuaccgcgacgaggcccucaacaaccgcuuccagaucaagggcgucgagcucaaguccggcuacaaggacuggauccucuggaucuccuucgccaucuccugcuuccuccucugcgucgcccuccucggcuucaucaugugggccugccagaagggcaacauccgcugcaacaucugcaucuga

SEQ ID NO: 106857 - RNA, 1701 nt, Artificial Sequence; identical to SEQ ID NO: 103818
  derived and/or modified CDS sequence (opt2) from hemagglutinin__InfluenzaA__AHC61175

SEQ ID NO: 106858 - RNA, 1701 nt, Artificial Sequence; identical to SEQ ID NO: 103018
  derived and/or modified CDS sequence (opt2) from hemagglutinin__InfluenzaA__AHC61187

SEQ ID NO: 106859 - RNA, 1701 nt, Artificial Sequence; identical to SEQ ID NO: 102891
  derived and/or modified CDS sequence (opt2) from hemagglutinin__InfluenzaA__AHC61199

SEQ ID NO: 106860 - RNA, 1701 nt, Artificial Sequence; identical to SEQ ID NO: 106654
  derived and/or modified CDS sequence (opt2) from hemagglutinin__InfluenzaA__AHC61211

SEQ ID NO: 106861 - RNA, 1701 nt, Artificial Sequence; identical to SEQ ID NO: 102891
  derived and/or modified CDS sequence (opt2) from hemagglutinin__InfluenzaA__AHC61223

SEQ ID NO: 106862 - RNA, 1701 nt, Artificial Sequence; identical to SEQ ID NO: 103018
  derived and/or modified CDS sequence (opt2) from hemagglutinin__InfluenzaA__AHC61235

SEQ ID NO: 106863 - RNA, 1701 nt, Artificial Sequence; identical to SEQ ID NO: 103818
  derived and/or modified CDS sequence (opt2) from hemagglutinin__InfluenzaA__AHC61247

SEQ ID NO: 106864 - RNA, 1701 nt, Artificial Sequence; identical to SEQ ID NO: 103818
  derived and/or modified CDS sequence (opt2) from hemagglutinin__InfluenzaA__AHC61259

SEQ ID NO: 106865 - RNA, 1701 nt, Artificial Sequence; identical to SEQ ID NO: 103018
  derived and/or modified CDS sequence (opt2) from hemagglutinin__InfluenzaA__AHC61271

SEQ ID NO: 106866 - RNA, 1701 nt, Artificial Sequence; identical to SEQ ID NO: 102891
  derived and/or modified CDS sequence (opt2) from hemagglutinin__InfluenzaA__AHC61283

SEQ ID NO: 106867 - RNA, 1701 nt, Artificial Sequence; identical to SEQ ID NO: 105110
  derived and/or modified CDS sequence (opt2) from hemagglutinin__InfluenzaA__AHC61295

SEQ ID NO: 106868 - RNA, 1701 nt, Artificial Sequence; identical to SEQ ID NO: 106722
  derived and/or modified CDS sequence (opt2) from hemagglutinin__InfluenzaA__AHC61307

SEQ ID NO: 106869 - RNA, 1701 nt, Artificial Sequence; identical to SEQ ID NO: 103018
  derived and/or modified CDS sequence (opt2) from hemagglutinin__InfluenzaA__AHC61319

SEQ ID NO: 106870 - RNA, 1701 nt, Artificial Sequence; identical to SEQ ID NO: 106654
  derived and/or modified CDS sequence (opt2) from hemagglutinin__InfluenzaA__AHC61331

SEQ ID NO: 106871 - RNA, 1701 nt, Artificial Sequence
  derived and/or modified CDS sequence (opt2) from hemagglutinin__InfluenzaA__AHC61343
augaagaccaucaucgcccucuccuacauccucugccucgucuucgcccagaagcuccccggcaacgacaacuccaccgccacccucugccucggccaccacgccguccccaacggcaccaucgucaagaccaucaccaacgaccagaucgaggucaccaacgccaccgagcucguccaguccuccuccaccggcgagaucugcaacuccccccaccagauccucgacggcgagaacugcacccucaucgacgcccuccucggcgacccccagugcgacggcuuccagaacaagaagugggaccucuucgucgagcgcuccaaggcccacuccaacugcuaccccuacgacguccccgacuacgccucccuccgcucccucgucgccuccuccggcacccucgaguucaacaacgaguccuucaacuggaccggcgucacccagaacggcaccuccuccgccugcauccgcggcuccaacaacuccuucuucucccgccucaacuggcucacccaccucaacuucaaguaccccgcccucaacgucaccaugcccaacaacgagcaguucgacaagcucuacaucuggggcguccaccaccccggcaccgacaaggaccagaucuuccucuacgcccaggccuccggccgcaucaccgucuccaccaagcgcucccagcaggccgucauccccaacaucggcucccgcccccgcguccgcaacauccccucccgcaucuccaucuacuggaccaucgucaagcccggcgacauccuccucaucaacuccaccggcaaccucaucgccccccgcggcuacuucaagauccgcuccggcaaguccuccaucaugcgcuccgacgcccccaucggcaagugcaacuccgccugcaucacccccaacggcuccauccccaacgacaagcccuuccagaacgucaaccgcaucaccuacggcgccugcccccgcuacgucaagcagaacacccucaagcucgccaccggcaugcgcaacguccccgagaagcagacccgcggcaucuucggcgccaucgccggcuucaucgagaacggcugggagggcauggucgacggcugguacggcuuccgccaccagaacuccgagggccgcggccaggccgccgaccucaaguccacccaggccgccaucgaccagaucaacggcaagcucaaccgccucaucggcaagaccaacgagaaguuccaccagaucgagaaggaguucuccgaggucgagggccgcauccaggaccucgagaaguacgucgaggacaccaagaucgaccucugguccuacaacgccgagcuccucgucgcccucgagaaccagcacaccaucgaccucaccgacuccgagaugaacaagcucuucgagaagaccaagaagcagcuccgcgagaacgccgaggacaugggcaacggcugcuucaagaucuaccacaagugcgacaacgccugcaucggcuccauccgcaacggcaccuacgaccacgacgucuaccgcgacgaggcccucaacaaccgcuuccagaucaagggcgucgagcucaaguccggcuacaaggacuggauccucuggaucuccuucgccaucuccugcuuccuccucugcgucgcccuccucggcuucaucaugugggccugccagaagggcaacauccgcugcaacaucugcaucuga

SEQ ID NO: 106872 - RNA, 1701 nt, Artificial Sequence; identical to SEQ ID NO: 102891
  derived and/or modified CDS sequence (opt2) from hemagglutinin__InfluenzaA__AHC61355

SEQ ID NO: 106873 - RNA, 1701 nt, Artificial Sequence; identical to SEQ ID NO: 102891
  derived and/or modified CDS sequence (opt2) from hemagglutinin__InfluenzaA__AHC61367

SEQ ID NO: 106874 - RNA, 1701 nt, Artificial Sequence; identical to SEQ ID NO: 103018
  derived and/or modified CDS sequence (opt2) from hemagglutinin__InfluenzaA__AHC61379

SEQ ID NO: 106875 - RNA, 1701 nt, Artificial Sequence; identical to SEQ ID NO: 102891
  derived and/or modified CDS sequence (opt2) from hemagglutinin__InfluenzaA__AHC61391

SEQ ID NO: 106876 - RNA, 1701 nt, Artificial Sequence
  derived and/or modified CDS sequence (opt2) from hemagglutinin__InfluenzaA__AHC61403
augaagaccaucaucgcccucuccuacauccucugccucgucuucgcccagaagcuccccggcaacgacaacuccaccgccacccucugccucggccaccacgccguccccaacggcaccaucgucaagaccaucaccaacgaccagaucgaggucaccaacgccaccgagcucguccaguccuccuccaccggcgagaucugcaacuccccccaccagauccucgacggcgagaacugcacccucaucgacgcccuccucggcgacccccagugcgacggcuuccagaacaagaagugggaccucuucgucgagcgcuccaaggcccacuccaacugcuaccccuacgacguccccgacuacgccucccuccgcucccucgucgccuccuccggcacccucgaguucaacaacgaguccuucaacuggaccggcgucacccagaacggcaccuccuccgccugcauccgccgcuccaacaacuccuucuucucccgccucaacuggcucacccaccucaacuucaaguaccccgcccucaacgucaccaugcccaacaacgagcaguucgacaagcucuacaucuggggcguccaccaccccggcaccgacaaggaccagaucuuccucuacgcccaggccuccggccgcaucaccgucuccaccaagcgcucccagcaggccgucauccccaacaucggcucccgcccccgcguccgcaacauccccucccgcgucuccaucuacuggaccaucgucaagcccggcgacauccuccucaucaacuccaccggcaaccucaucgccccccgcggcuacuucaagauccgcuccggcaaguccuccaucaugcgcuccgacgcccccaucggcaagugcaacuccgccugcaucacccccaacggcuccauccccaacgacaagcccuuccagaacgucaaccgcaucaccuacggcgccugcucccgcuacgucaagcagaacacccucaagcucgccaccggcaugcgcaacguccccgagaagcagacccgcggcaucuucggcgccaucgccggcuucaucgagaacggcugggagggcauggucgacggcugguacggcuuccgccaccagaacuccgagggccgcggccaggccgccgaccucaaguccacccaggccgccaucgaccagaucaacggcaagcucaaccgccucaucggcaagaccaacgagaaguuccaccagaucgagaaggaguucuccgaggucgagggccgcauccaggaccucgagaaguacgucgaggacaccaagaucgaccucugguccuacaacgccgagcuccucgucgcccucgagaaccagcacaccaucgaccucaccgacuccgagaugaacaagcucuucgagaagaccaagaagcagcuccgcgagaacgccgaggacaugggcaacggcugcuucaagaucuaccacaagugcgacaacgccugcaucggcuccauccgcaacggcaccuacgaccacgacgucuaccgcgacgaggcccucaacaaccgcuuccagaucaagggcgucgagcucaaguccggcuacaaggacuggauccucuggaucuccuucgccaucuccugcuuccuccucugcgucgcccuccucggcuucaucaugugggccugccagaagggcaacauccgcugcaacaucugcaucuga

SEQ ID NO: 106877 - RNA, 1701 nt, Artificial Sequence; identical to SEQ ID NO: 103018
  derived and/or modified CDS sequence (opt2) from hemagglutinin__InfluenzaA__AHC61415

SEQ ID NO: 106878 - RNA, 1701 nt, Artificial Sequence
  derived and/or modified CDS sequence (opt2) from hemagglutinin__InfluenzaA__AHC61427
augaagaccaucaucgcccucuccuacauccucugccucgucuucgcccagaagcuccccggcaacgacaacuccaccgccacccucugccucggccaccacgccguccccaacggcaccaucgucaagaccaucaccaacgaccagaucgaggucaccaacgccaccgagcucguccaguccuccuccaccggcgagaucugcaacuccccccaccagauccucgacggcgagaacugcacccucaucgacgcccuccucggcgacccccagugcgacggcuuccagaacaacaagugggaccucuucgucgagcgcuccaaggcccacuccaacugcuaccccuacgacguccccgacuacgccucccuccgcucccucgucgccuccuccggcacccucgaguucaacaacgaguccuucaacuggaccggcgucacccagaacggcaccuccuccgccugcauccgccgcuccaacaacuccuucuucucccgccucaacuggcucacccaccucaacuucaaguaccccgcccucaacgucaccaugcccaacaacgagcaguucgacaagcucuacaucuggggcguccaccaccccggcaccgacaaggaccagaucuuccucuacgcccaggccgccggccgcaucaccgucuccaccaagcgcucccagcaggccgucauccccaacaucggcucccgcccccgcguccgcaacauccccucccgcgucuccaucuacuggaccaucgucaagcccggcgacauccuccucaucaacuccaccggcaaccucaucgccccccgcggcuacuucaagauccgcuccggcaaguccuccaucauccgcuccgacgcccccaucggcaagugcaacuccgccugcaucacccccaacggcuccauccccaacgacaagcccuuccagaacgucaaccgcaucaccuacggcgccugcccccgcuacgucaagcagaacacccucaagcucgccaccggcaugcgcaacguccccgagaagcagacccgcggcaucuucggcgccaucgccggcuucaucgagaacggcugggagggcauggucgacggcugguacggcuuccgccaccagaacuccgagggccgcggccaggccgccgaccucaaguccacccaggccgccaucgaccagaucaacggcaagcucaaccgccucaucggcaagaccaacgagaaguuccaccagaucgagaaggaguucuccgaggucgagggccgcauccaggaccucgagaaguacgucgaggacaccaagaucgaccucugguccuacaacgccgagcuccucgucgcccucgagaaccagcacaccaucgaccucaccgacuccgagaugaacaagcucuucgagaagaccaagaagcagcuccgcgagaacgccgaggacaugggcaacggcugcuucaagaucuaccacaagugcgacaacgccugcaucggcuccauccgcaacggcaccuacgaccacgacgucuaccgcgacgaggcccucaacaaccgcuuccagaucaagggcgucgagcucaaguccggcuacaaggacuggauccucuggaucuccuucgccaucuccugcuuccuccucugcgucgcccuccucggcuucaucaugugggccugccagaagggcaacauccgcugcaacaucugcaucuga

SEQ ID NO: 106879 - RNA, 1701 nt, Artificial Sequence
  derived and/or modified CDS sequence (opt2) from hemagglutinin__InfluenzaA__AHC61439
augaagaccaucaucgcccucuccuacauccucugccucgucuucgcccagaagcuccccggcaacgacaacuccaccgccacccucugccucggccaccacgccguccccaacggcaccaucgucaagaccaucaccaacgaccagaucgaggucaccaacgccaccgagcucguccaguccuccuccaccggcgagaucugcaacuccccccaccagauccucgacggcgagaacugcacccucaucgacgcccuccucggcgacccccagugcgacggcuuccagaacaagaagugggaccucuucgucgagcgcuccaaggcccacuccaacugcuaccccuacgacguccccgacuacgccucccuccgcucccucgucgccuccuccggcacccucgaguucaacaacgaguccuucaacuggaccggcgucacccagaacggcaccuccuccgccugcauccgccgcuccaacaacuccuucuucucccgccucaacuggcucacccaccucaacuucaaguaccccgcccucaacgucaccaugcccaacaacgagcaguucgacaagcucuacaucuggggcguccaccaccccggcaccgacaaggaccagaucuuccucuacgcccaggccgccggccgcaucaccgucuccaccaagcgcucccagcaggccgucauccccaacaucggcucccgcccccgcguccgcaacauccccucccgcgucuccaucuacuggaccaucgucaagcccggcgacauccuccucaucaacuccaccggcaaccucaucgccccccgcggcuacuucaagauccgcuccggcaaguccuccaucaugcgcuccgacgcccccaucggcaagugcaacuccaccugcaucacccccaacggcuccauccccaacgacaagcccuuccagaacgucaaccgcaucaccuacggcgccugcccccgcuacgucaagcagaacacccucaagcucgccaccggcaugcgcaacguccccgagaagcagacccgcggcaucuucggcgccaucgccggcuucaucgagaacggcugggagggcauggucgacggcugguacggcuuccgccaccagaacuccgagggccgcggccaggccgccgaccucaaguccacccaggccgccaucgaccagaucaacggcaagcucaaccgccucaucggcaagaccaacgagaaguuccaccagaucgagaaggaguucuccgaggucgagggccgcauccaggaccucgagaaguacgucgaggacaccaagaucgaccucugguccuacaacgccgagcuccucgucgcccucgagaaccagcacaccaucgaccucaccgacuccgagaugaacaagcucuucgagaagaccaagaagcagcuccgcgagaacgccgaggacaugggcaacggcugcuucaagaucuaccacaagugcgacaacgccugcaucggcuccauccgcaacggcaccuacgaccacgacgucuaccgcgacgaggcccucaacaaccgcuuccagaucaagggcgucgagcucaaguccggcuacaaggacuggauccucuggaucuccuucgccaucuccugcuuccuccucugcgucgcccuccucggcuucaucaugugggccugccagaagggcaacauccgcugcaacaucugcaucuga

SEQ ID NO: 106880 - RNA, 1701 nt, Artificial Sequence; identical to SEQ ID NO: 102891
  derived and/or modified CDS sequence (opt2) from hemagglutinin__InfluenzaA__AHC61451

SEQ ID NO: 106881 - RNA, 1701 nt, Artificial Sequence; identical to SEQ ID NO: 102891
  derived and/or modified CDS sequence (opt2) from hemagglutinin__InfluenzaA__AHC61463

SEQ ID NO: 106882 - RNA, 1701 nt, Artificial Sequence; identical to SEQ ID NO: 103818
  derived and/or modified CDS sequence (opt2) from hemagglutinin__InfluenzaA__AHC61475

SEQ ID NO: 106883 - RNA, 1701 nt, Artificial Sequence; identical to SEQ ID NO: 103018
  derived and/or modified CDS sequence (opt2) from hemagglutinin__InfluenzaA__AHC61487

SEQ ID NO: 106884 - RNA, 1701 nt, Artificial Sequence; identical to SEQ ID NO: 103818
  derived and/or modified CDS sequence (opt2) from hemagglutinin__InfluenzaA__AHC61499

SEQ ID NO: 106885 - RNA, 1701 nt, Artificial Sequence; identical to SEQ ID NO: 102891
  derived and/or modified CDS sequence (opt2) from hemagglutinin__InfluenzaA__AHC61511

SEQ ID NO: 106886 - RNA, 1701 nt, Artificial Sequence; identical to SEQ ID NO: 105110
  derived and/or modified CDS sequence (opt2) from hemagglutinin__InfluenzaA__AHC61523

SEQ ID NO: 106887 - RNA, 1701 nt, Artificial Sequence
  derived and/or modified CDS sequence (opt2) from hemagglutinin__InfluenzaA__AHC61535
augaagaccaucaucgcccucuccuacauccucugccucgucuucgcccagaagcuccccggcaacgacaacuccaccgccacccucugccucggccaccacgccguccccaacggcaccaucgucaagaccaucaccaacgaccagaucgaggucaccaacgccaccgagcucguccaguccuccuccaccggcgagaucugcaacuccccccaccagauccucgacggcgagaacugcacccucaucgacgcccuccucggcgacccccagugcgacggcuuccagaacaagaagugggaccucuucgucgagcgcuccaaggcccacuccaacugcuaccccuacgacguccccgacuacgccucccuccgcucccucgucgccuccuccggcacccucgaguucaacaacgaguccuucaacuggaccggcgucacccagaacggcaccuccuccgccugcauccgccgcuccaacaacuccuucuucucccgccucaacuggcucacccaccucaacuucaaguaccccgcccucaacgucaccaugcccaacaacgagcaguucgacaagcucuacaucuggggcguccaccaccccggcaccgacaaggaccagaucuuccucuacgcccaggccuccggccgcaucaccgucuccaccaagcgcucccagcaggccgucauccccaacaucggcucccgcccccgcguccgcaacauccccucccgcgucuccaucuacuggaccaucgucaagcccggcgacauccuccucaucaacuccaccggcaaccucaucgccccccgcggcuacuucaagauccgcuccggcaaguccuccaucaugcgcuccgacgcccccaucggcaagugcaacuccgccugcaucacccccaacggcuccauccccaacgacaagcccuuccagaacgucaaccgcaucaccuacggcgccugcccccgcuacgucaagcagaacacccucaagcucgccaccggcaugcgcaacguccccgagaagcagacccgcggcaucuucggcgccaucgccggcuucaucgagaacggcugggagggcauggucgacggcugguacggcuuccgccaccagaacuccgagggccgcggccaggccgccgaccucaaguccacccaggccgccaucgaccagaucaacggcaagcucaaccgccucaucggcaagaccaacgagaaguuccaccagaucgagaaggaguucuccgaggucgagggccgcauccaggaccucgagaaguacgucgaggacaccaagaucgaccucugguccuacaacgccgagcuccucgucgcccucgagaaccagcacaccaucgaccucaccgacuccgagaugaccaagcucuucgagaagaccaagaagcagcuccgcgagaacgccgaggacaugggcaacggcugcuucaagaucuaccacaagugcgacaacgccugcaucggcuccauccgcaacggcaccuacgaccacgacgucuaccgcgacgaggcccucaacaaccgcuuccagaucaagggcgucgagcucaaguccggcuacaaggacuggauccucuggaucuccuucgccaucuccugcuuccuccucugcgucgcccuccucggcuucaucaugugggccugccagaagggcaacauccgcugcaacaucugcaucuga

SEQ ID NO: 106888 - RNA, 1701 nt, Artificial Sequence; identical to SEQ ID NO: 102891
  derived and/or modified CDS sequence (opt2) from hemagglutinin__InfluenzaA__AHC61547

SEQ ID NO: 106889 - RNA, 1701 nt, Artificial Sequence
  derived and/or modified CDS sequence (opt2) from hemagglutinin__InfluenzaA__AHC61559
augaagaccaucaucgcccucuccuacauccucugccucgucuucgcccagaagcuccccggcaacgacaacuccaccgccacccucugccucggccaccacgccguccccaacggcaccaucgucaagaccaucaccaacgaccagaucgaggucaccaacgccaccgagcucguccagaacuccuccaccggcgagaucugcgacuccccccaccagaucaucgacggcgagaacugcacccucaucgacgcccuccucggcgacccccagugcgacggcuuccagaacaagaagugggaccucuucgucgagcgcuccaaggccuacuccaacugcuaccccuacgacguccccgacuacgccucccuccgcucccucgucgccuccuccggcacccucgaguucaacaacgaguccuucaacuggaccggcgucacccagaacggcaccuccuccgccugcauccgccgcuccaacaacuccuucuucucccgccucaacuggcucacccaccucaacuucaaguaccccgcccucaacgucaccaugcccaacaacgagcaguucgacaagcucuacaucuggggcguccaccaccccggcaccgacaaggaccagaucuuccucuacgcccaggccuccggccgcaucaccgucuccaccaagcgcucccagcaggccgucauccccaacaucggcucccgcccccgcguccgcaacauccccucccgcaucuccaucuacuggaccaucgucaagcccggcgacauccuccucaucaacuccaccggcaaccucaucgccccccgcggcuacuucaagauccgcuccggcaaguccuccaucaugcgcuccgacgcccccaucggcaagugcaacuccgagugcaucacccccaacggcuccauccccaacgacaagcccuuccagaacgucaaccgcaucaccuacggcgccugcccccgcuacgucaagcagaacacccucaagcucgccaccggcaugcgcaacguccccgagaagcagacccgcggcaucuucggcgccaucgccggcuucaucgagaacggcugggagggcauggucgacggcugguacggcuuccgccaccagaacuccgagggccgcggccaggccgccgaccucaaguccacccaggccgccaucgaccagaucaacggcaagcucaaccgccucauccgcaagaccaacgagaaguuccaccagaucgagaaggaguucuccgaggucgagggccgcauccaggaccucgagaaguacgucgaggacaccaagaucgaccucugguccuacaacgccgagcuccucgucgcccucgagaaccagcacaccaucgaccucaccgacuccgagaugaacaagcucuucgagaagaccaagaagcagcuccgcgagaacgccgaggacaugggcaacggcugcuucaagaucuaccacaagugcgacaacgccugcaucggcuccauccgcaacggcaccuacgaccacgacgucuaccgcgacgaggcccucaacaaccgcuuccagaucaagggcgucgagcucaaguccggccacaaggacuggauccucuggaucuccuucgccaucuccugcuuccuccucugcgucgcccuccucggcuucaucaugugggccugccagaagggcaacauccgcugcaacaucugcaucuga

SEQ ID NO: 106890 - RNA, 1701 nt, Artificial Sequence; identical to SEQ ID NO: 105110
  derived and/or modified CDS sequence (opt2) from hemagglutinin__InfluenzaA__AHC61571

SEQ ID NO: 106891 - RNA, 1701 nt, Artificial Sequence; identical to SEQ ID NO: 102891
  derived and/or modified CDS sequence (opt2) from hemagglutinin__InfluenzaA__AHC61583

SEQ ID NO: 106892 - RNA, 1701 nt, Artificial Sequence; identical to SEQ ID NO: 105110
  derived and/or modified CDS sequence (opt2) from hemagglutinin__InfluenzaA__AHC61595

SEQ ID NO: 106893 - RNA, 1701 nt, Artificial Sequence
  derived and/or modified CDS sequence (opt2) from hemagglutinin__InfluenzaA__AHC61607
augaagaccaucaucgcccucuccuacauccucugccucgucuucgcccagaagcuccccggcaacgacaacuccaccgccacccucugccucggccaccacgccguccccaacggcaccaucgucaagaccaucaccaacgaccagaucgaggucaccaacgccaccgagcucguccagaacuccuccaccggcgagaucugcgacuccccccaccagauccucgacggcgagaacugcacccucaucgacgcccuccucggcgacccccagugcgacggcuuccagaacaagaagugggaccucuucgucgagcgcuccaaggccuacuccaacugcuaccccuacgacguccccgacuacgccucccuccgcucccucgucgccuccuccggcacccucgaguucaacaacgaguccuucaacuggaccggcgucacccagaacggcaccuccuccgccugcauccgccgcuccaacaacuccuucuucucccgccucaacuggcucacccaccucaacuucaaguaccccgcccucaacgucaccaugcccaacaacgagcaguucgacaagcucuacaucuggggcguccaccaccccggcaccgacaaggaccagaucuuccucuacgcccaggccuccggccgcaucaccgucuccaccaagcgcucccagcaggccgucauccccaacaucggcucccgcccccgcguccgcaacauccccucccgcaucuccaucuacuggaccaucgucaagcccggcgacauccuccucaucaacuccaccggcaaccucaucgccccccgcggcuacuucaagauccgcuccggcaaguccuccaucaugcgcuccgacgcccccaucggcaagugcaacuccgagugcaucacccccaacggcuccauccccaacgacaagcccuuccagaacgucaaccgcaucaccuacggcgccugcccccgcuacgucaagcagcacacccucaagcucgccaccggcaugcgcaacguccccgagaagcagacccgcggcaucuucggcgccaucgccggcuucaucgagaacggcugggagggcauggucgacggcugguacggcuuccgccaccagaacuccgagggccgcggccaggccgccgaccucaaguccacccaggccgccaucgaccagaucaacggcaagcucaaccgccucaucggcaagaccaacgagaaguuccaccagaucgagaaggaguucuccgaggucgagggccgcauccaggaccucgagaaguacgucgaggacaccaagaucgaccucugguccuacaacgccgagcuccucgucgcccucgagaaccagcacaccaucgaccucaccgacuccgagaugaacaagcucuucgagaagaccaagaagcagcuccgcgagaacgccgaggacaugggcaacggcugcuucaagaucuaccacaagugcgacaacgccugcaucggcuccauccgcaacggcaccuacgaccacgacgucuaccgcgacgaggcccucaacaaccgcuuccagaucaagggcgucgagcucaaguccggcuacaaggacuggauccucuggaucuccuucgccaucuccugcuuccuccucugcgucgcccuccucggcuucaucaugugggccugccagaagggcaacauccgcugcaacaucugcaucuga

SEQ ID NO: 106894 - RNA, 1701 nt, Artificial Sequence; identical to SEQ ID NO: 105110
  derived and/or modified CDS sequence (opt2) from hemagglutinin__InfluenzaA__AHC61619

SEQ ID NO: 106895 - RNA, 1701 nt, Artificial Sequence
  derived and/or modified CDS sequence (opt2) from hemagglutinin__InfluenzaA__AHC61631
augaagaccaucaucgcccucuccuacauccucugccucgucuucgcccagaagcuccccggcaacgacaacuccaccgccacccucugccucggccaccacgccguccccaacggcaccaucgucaagaccaucaccaacgaccagaucgaggucaccaacgccaccgagcucguccaguccuccuccaccggcgagaucugcaacuccccccaccagauccucgacggcgagaacugcaccaucaucgacgcccuccucggcgacccccagugcgacggcuuccagaacaagaagugggaccucuucgucgagcgcuccaaggcccacuccaacugcuaccccuacgacguccccgacuacgccucccuccgcucccucgucgccuccuccggcacccucgaguucaacaacgaguccuucaacuggaccggcgucacccagaacggcaccuccuccgccugcauccgccgcuccaacaacuccuucuucucccgccucaacuggcucacccaccucaacuucaaguaccccgcccucaacgucaccaugcccaacaacgagcaguucgacaagcucuacaucuggggcguccaccaccccggcaccgacaaggaccagaucuuccucuacgcccaggccgccggccgcaucaccgucuccaccaagcgcucccagcaggccgucauccccaacaucggcucccgcccccgcguccgcaacauccccucccgcgucuccaucuacuggaccaucgucaagcccggcgacauccuccucaucaacuccaccggcaaccucaucgccccccgcggcuacuucaagauccgcuccggcaaguccuccaucaugcgcuccgacgcccccaucggcaagugcaacuccgccugcaucacccccaacggcuccauccccaacgacaagcccuuccagaacgucaaccgcaucaccuacggcgccugcccccgcuacgucaagcagaacacccucaagcucgccaccggcaugcgcaacguccccgagaagcagacccgcggcaucuucggcgccaucgccggcuucaucgagaacggcugggagggcauggucgacggcugguacggcuuccgccaccagaacuccgagggccgcggccaggccgccgaccucaaguccacccaggccgccaucgaccagaucaacggcaagcucaaccgccucaucggcaagaccaacgagaaguuccaccagaucgagaaggaguucuccgaggucgagggccgcauccaggaccucgagaaguacgucgaggacaccaagaucgaccucugguccuacaacgccgagcuccucgucgcccucgagaaccagcacaccaucgaccucaccgacuccgagaugaacaagcucuucgagaagaccaagaagcagcuccgcgagaacgccgaggacaugggcaacggcugcuucaagaucuaccacaagugcgacaacgccugcaucggcuccauccgcaacggcaccuacgaccacgacgucuaccgcgacgaggcccucaacaaccgcuuccagaucaagggcgucgagcucaaguccggcuacaaggacuggauccucuggaucuccuucgccaucuccugcuuccuccucugcgucgcccuccucggcuucaucaugugggccugccagaagggcaacauccgcugcaacaucugcaucuga

SEQ ID NO: 106896 - RNA, 1701 nt, Artificial Sequence
  derived and/or modified CDS sequence (opt2) from hemagglutinin__InfluenzaA__AHC61643
augaagaccaucaucgcccucuccuacguccucugccucgucuucgcccagaagcuccccggcaacgacaacuccaccgccacccucugccucggccaccacgccguccccaacggcaccaucgucaagaccaucaccaacgaccagaucgaggucaccaacgccaccgagcucguccaguccuccuccaccggcgagaucugcaacuccccccaccagauccucgacggcgagaacugcacccucaucgacgcccuccucggcgacccccagugcgacggcuuccagaacaagaagugggaccucuucgucgagcgcuccaaggcccacuccaacugcuaccccuacgacguccccgacuacgccucccuccgcucccucgucgccuccuccggcacccucgaguucaacaacgaguccuucaacuggaccggcgucacccagaacggcaccuccuccgccugcauccgccgcuccaacaacuccuucuucucccgccucaacuggcucacccaccucaacuucaaguaccccgcccucaacgucaccaugcccaacaacgagcaguucgacaagcucuacaucuggggcguccaccaccccggcaccgacaaggaccagaucuuccucuacgcccaggccgccggccgcaucaccgucuccaccaagcgcucccagcaggccgucauccccaacaucggcucccgcccccgcguccgcaacauccccucccgcgucuccaucuacuggaccaucgucaagcccggcgacauccuccucaucaacuccaccggcaaccucaucgccccccgcggcuacuucaagauccgcuccggcaaguccuccaucaugcgcuccgacgcccccaucggcaagugcaacuccgccugcaucacccccaacggcuccauccccaacgacaagcccuuccagaacgucaaccgcaucaccuacggcgccugcccccgcuacgucaagcagaacacccucaagcucgccaccggcaugcgcaacguccccgagaagcagacccgcggcaucuucggcgccaucgccggcuucaucgagaacggcugggagggcauggucgacggcugguacggcuuccgccaccagaacuccgagggccgcggccaggccgccgaccucaaguccacccaggccgccaucgaccagaucaacggcaagcucaaccgccucaucggcaagaccaacgagaaguuccaccagaucgagaaggaguucuccgaggucgagggccgcauccaggaccucgagaaguacgucgaggacaccaagaucgaccucugguccuacaacgccgagcuccucgucgcccucgagaaccagcacaccaucgaccucaccgacuccgagaugaacaagcucuucgagaagaccaagaagcagcuccgcgagaacgccgaggacaugggcaacggcugcuucaagaucuaccacaagugcgacaacgccugcaucggcuccauccgcaacggcaccuacgaccacgacgucuaccgcgacgaggcccucaacaaccgcuuccagaucaagggcgucgagcucaaguccggcuacaaggacuggauccucuggaucuccuucgccaucuccugcuuccuccucugcgucgcccuccucggcuucaucaugugggccugccagaagggcaacauccgcugcaacaucugcaucuga

SEQ ID NO: 106897 - RNA, 1701 nt, Artificial Sequence
  derived and/or modified CDS sequence (opt2) from hemagglutinin__InfluenzaA__AHC61655
augaagaccaucaucgcccucuccuacauccucugccucgucuucacccagaagcuccccggcaacgacaacuccaccgccacccucugccucggccaccacgccguccccaacggcaccaucgucaagaccaucaccaacgaccagaucgaggucaccaacgccaccgagcucguccaguccuccuccaccggcgagaucugcaacuccccccaccagauccucgacggcgagaacugcacccucaucgacgcccuccucggcgacccccagugcgacggcuuccagaacaacaagugggaccucuucgucgagcgcuccaaggcccacuccaacugcuaccccuacgacguccccgacuacgccucccuccgcucccucgucgccuccuccggcacccucgaguucaacaacgaguccuucaacuggaccggcgucacccagaacggcaccuccuccgccugcauccgccgcuccaacaacuccuucuucucccgccucaacuggcucacccaccucaacuucaaguaccccgcccucaacgucaccaugcccaacaacgagcaguucgacaagcucuacaucuggggcguccaccaccccggcaccgacaaggaccagaucuuccucuacgcccaggccgccggccgcaucaccgucuccaccaagcgcucccagcaggccgucauccccaacaucggcucccgcccccgcguccgcaacauccccucccgcgucuccaucuacuggaccaucgucaagcccggcgacauccuccucaucaacuccaccggcaaccucaucgccccccgcggcuacuucaagauccgcuccggcaaguccuccaucauccgcuccgacgcccccaucggcaagugcaacuccgccugcaucacccccaacggcuccauccccaacgacaagcccuuccagaacgucaaccgcaucaccuacggcgccugcccccgcuacgucaagcagaacacccucaagcucgccaccggcaugcgcaacguccccgagaagcagacccgcggcaucuucggcgccaucgccggcuucaucgagaacggcugggagggcauggucgacggcugguacggcuuccgccaccagaacuccgagggccgcggccaggccgccgaccucaaguccacccaggccgccaucgaccagaucaacggcaagcucaaccgccucaucggcaagaccaacgagaaguuccaccagaucgagaaggaguucuccgaggucgagggccgcauccaggaccucgagaaguacgucgaggacaccaagaucgaccucugguccuacaacgccgagcuccucgucgcccucgagaaccagcacaccaucgaccucaccgacuccgagaugaacaagcucuucgagaagaccaagaagcagcuccgcgagaacgccgaggacaugggcaacggcugcuucaagaucuaccacaagugcgacaacgccugcaucggcuccauccgcaacggcaccuacgaccacgacgucuaccgcgacgaggcccucaacaaccgcuuccagaucaagggcgucgagcucaaguccggcuacaaggacuggauccucuggaucuccuucgccaucuccugcuuccuccucugcgucgcccuccucggcuucaucaugugggccugccagaagggcaacauccgcugcaacaucugcaucuga

SEQ ID NO: 106898 - RNA, 1701 nt, Artificial Sequence
  derived and/or modified CDS sequence (opt2) from hemagglutinin__InfluenzaA__AHC61667
augaagaccaucaucgcccucuccuacauccucugccucgucuucgcccagaagcuccccggcaacgacaacuccaccgccacccucugccucggccaccacgccguccccaacggcaccaucgucaagaccaucaccaacgaccagaucgaggucaccaacgccaccgagcucguccaguccuccuccaccggcgagaucugcgacuccccccaccagauccucgacggcgagaacugcacccucaucgacgcccuccucggcgacccccagugcgacggcuuccagaacaagaagugggaccucuucgucgagcgcuccaaggccuacuccaacugcuaccccuacgacguccccgacuacgccucccuccgcucccucgucgccuccuccggcacccucgaguucaacaacgaguccuucaacuggaccggcgucacccagaacggcaccuccuccgccugcauccgccgcuccaacaacuccuucuucucccgccucaacuggcucacccaccucaacuucaaguaccccgcccucaacgucaccaugcccaacaacgagcaguucgacaagcucuacaucuggggcguccaccaccccggcaccgacaaggaccagaucuuccucuacgcccaguccuccggccgcaucaccgucuccaccaagcgcucccagcaggccgucauccccaacaucggcucccgcccccgcauccgcaacauccccucccgcaucuccaucuacuggaccaucgucaagcccggcgacauccuccucaucaacuccaccggcaaccucaucgccccccgcggcuacuucaagauccgcuccggcaaguccuccaucaugcgcuccgacgcccccaucggcaagugcaacuccgagugcaucacccccaacggcuccauccccaacgacaagcccuuccagaacgucaaccgcaucaccuacggcgccugcccccgcuacgucaagcaguccacccucaagcucgccaccggcaugcgcaacguccccgagaagcagacccgcggcaucuucggcgccaucgccggcuucaucgagaacggcugggagggcauggucgacggcugguacggcuuccgccaccagaacuccgagggccgcggccaggccgccgaccucaaguccacccaggccgccaucgaccagaucaacggcaagcucaaccgccucaucggcaagaccaacgagaaguuccaccagaucgagaaggaguucuccgaggucgagggccgcauccaggaccucgagaaguacgucgaggacaccaagaucgaccucugguccuacaacgccgagcuccucgucgcccucgagaaccagcacaccaucgaccucaccgacuccgagaugaacaagcucuucgagaagaccaagaagcagcuccgcgagaacgccgaggacaugggcaacggcugcuucaagaucuaccacaagugcgacaacgccugcaucggcuccauccgcaacggcaccuacaaccacgacgucuaccgcgacgaggcccucaacaaccgcuuccagaucaagggcgucgagcucaaguccggcuacaaggacuggauccucuggaucuccuucgccaucuccugcuuccuccucugcgucgcccuccucggcuucaucaugugggccugccagaagggcaacauccgcugcaacaucugcaucuga

SEQ ID NO: 106899 - RNA, 1701 nt, Artificial Sequence; identical to SEQ ID NO: 106654
  derived and/or modified CDS sequence (opt2) from hemagglutinin__InfluenzaA__AHC61679

SEQ ID NO: 106900 - RNA, 1701 nt, Artificial Sequence; identical to SEQ ID NO: 105110
  derived and/or modified CDS sequence (opt2) from hemagglutinin__InfluenzaA__AHC61691

SEQ ID NO: 106901 - RNA, 1701 nt, Artificial Sequence; identical to SEQ ID NO: 102891
  derived and/or modified CDS sequence (opt2) from hemagglutinin__InfluenzaA__AHC61703

SEQ ID NO: 106902 - RNA, 1701 nt, Artificial Sequence; identical to SEQ ID NO: 106687
  derived and/or modified CDS sequence (opt2) from hemagglutinin__InfluenzaA__AHC61715

SEQ ID NO: 106903 - RNA, 1701 nt, Artificial Sequence; identical to SEQ ID NO: 103818
  derived and/or modified CDS sequence (opt2) from hemagglutinin__InfluenzaA__AHC61727

SEQ ID NO: 106904 - RNA, 1701 nt, Artificial Sequence; identical to SEQ ID NO: 102891
  derived and/or modified CDS sequence (opt2) from hemagglutinin__InfluenzaA__AHC61739

SEQ ID NO: 106905 - RNA, 1701 nt, Artificial Sequence
  derived and/or modified CDS sequence (opt2) from hemagglutinin__InfluenzaA__AHC61751
augaagaccaucaucgcccucuccuacauccucugccucgucuucgcccagaagcuccccggcaacgacaacuccaccgccacccucugccucggccaccacgccguccccaacggcaccaucgucaagaccaucaccaacgaccagaucgaggucaccaacgccaccgagcucguccagaacuccuccaccggcgagaucugcgacuccccccaccagauccucgacggcgagaacugcacccucaucgacgcccuccucggcgacccccagugcgacggcuuccagaacaagaagugggaccucuucgucgagcgcuccaaggccuacuccaacugcuaccccuacgacguccccgacuacgccucccuccgcucccucgucgccuccuccggcacccucgaguucaacaacgaguccuucaacuggaccggcgucacccagaacggcaccuccuccgccugcauccgccgcuccaacaacuccuucuucucccgccucaacuggcucacccaccucaacuucaaguaccccgcccucaacgucaccaugcccaacaacgagcaguucgacaagcucuacaucuggggcguccaccaccccggcaccgacaaggaccagaucuuccucuacgcccaggccuccggccgcaucaccgucuccaccaagcgcucccagcaggccgucauccccaacgucggcucccgcccccgcguccgcaacauccccucccgcaucuccaucuacuggaccaucgucaagcccggcgacauccuccucaucaacuccaccggcaaccucaucgccccccgcggcuacuucaagauccgcuccggcaaguccuccaucaugcgcuccgacgcccccaucggcaagugcaacuccgagugcaucacccccaacggcuccauccccaacgacaagcccuuccagaacgucaaccgcaucaccuacggcgccugcccccgcuacgucaagcagaacacccucaagcucgccaccggcaugcgcaacguccccgagaagcagacccgcggcaucuucggcgccaucgccggcuucaucgagaacggcugggagggcauggucgacggcugguacggcuuccgccaccagaacuccgagggccgcggccaggccgccgaccucaaguccacccaggccgccaucgaccagaucaacggcaagcucaaccgccucaucggcaagaccaacgagaaguuccaccagaucgagaaggaguucuccgaggucgagggccgcauccaggaccucgagaaguacgucgaggacaccaagaucgaccucugguccuacaacgccgagcuccucgucgcccucgagaaccagcacaccaucgaccucaccgacuccgagaugaacaagcucuucgagaagaccaagaagcagcuccgcgagaacgccgaggacaugggcaacggcugcuucaagaucuaccacaagugcgacaacgccugcaucggcuccauccgcaacggcaccuacgaccacgacgucuaccgcgacgaggcccucaacaaccgcuuccagaucaagggcgucgagcucaaguccggcuacaaggacuggauccucuggaucuccuucgccaucuccugcuuccuccucugcgucgcccuccucggcuucaucaugugggccugccagaagggcaacauccgcugcaacaucugcaucuga

SEQ ID NO: 106906 - RNA, 1701 nt, Artificial Sequence
  derived and/or modified CDS sequence (opt2) from hemagglutinin__InfluenzaA__AHC61763
augaagaccaucaucgcccucuccuacauccucugccucgucuucgcccagaagcuccccggcaacgacaacuccaccgccacccucugccucggccaccacgccguccccaacggcaccaucgucaagaccaucaccaacgaccagaucgaggucaccaacgccaccgagcucguccaguccuccuccaccggcgagaucugcaacuccccccaccagauccucgacggcgagaacugcacccucaucgacgcccuccucggcgacccccagugcgacggcuuccagaacaagaagugggaccucuucgucgagcgcuccaaggcccacuccaacugcuaccccuacgacguccccgacuacgccucccuccgcucccucgucgccuccuccggcacccucgaguucaacaacgaguccuucaacuggaccggcgucacccagaacggcaccuccuccgccugcauccgccgcuccaacaacuccuucuucucccgccucaacuggcucacccaccucaacuucaaguaccccgcccucaacgucaccaugcccaacaacgagcaguucgacaagcucuacaucuggggcguccaccaccccggcaccgacaaggaccagaucuuccucuacgcccaggccgccggccgcaucaccgucuccaccaagcgcucccagcagaccgucauccccaacaucggcucccgcccccgcguccgcaacauccccucccgcgucuccaucuacuggaccaucgucaagcccggcgacauccuccucaucaacuccaccggcaaccucaucgccccccgcggcuacuucaagauccgcuccggcaaguccuccaucaugcgcuccgacgcccccaucggcaagugcaacuccgccugcaucacccccaacggcuccauccccaacgacaagcccuuccagaacgucaaccgcaucaccuacggcgccugcccccgcuacgucaagcagaacacccucaagcucgccaccggcaugcgcaacguccccgagaagcagacccgcggcaucuucggcgccaucgccggcuucaucgagaacggcugggagggcauggucgacggcugguacggcuuccgccaccagaacuccgagggccgcggccaggccgccgaccucaaguccacccaggccgccaucgaccagaucaacggcaagcucaaccgccucaucggcaagaccaacgagaaguuccaccagaucgagaaggaguucuccgaggucgagggccgcauccaggaccucgagaaguacgucgaggacaccaagaucgaccucugguccuacaacgccgagcuccucgucgcccucgagaaccagcacaccaucgaccucaccgacuccgagaugaacaagcucuucgagaagaccaagaagcagcuccgcgagaacgccgaggacaugggcaacggcugcuucaagaucuaccacaagugcgacaacgccugcaucggcuccauccgcaacggcaccuacgaccacgacgucuaccgcgacgaggcccucaacaaccgcuuccagaucaagggcgucgagcucaaguccggcuacaaggacuggauccucuggaucuccuucgccaucuccugcuuccuccucugcgucgcccuccucggcuucaucaugugggccugccagaagggcaacauccgcugcaacaucugcaucuga

SEQ ID NO: 106907 - RNA, 1701 nt, Artificial Sequence; identical to SEQ ID NO: 103018
  derived and/or modified CDS sequence (opt2) from hemagglutinin__InfluenzaA__AHC61775

SEQ ID NO: 106908 - RNA, 1701 nt, Artificial Sequence; identical to SEQ ID NO: 103818
  derived and/or modified CDS sequence (opt2) from hemagglutinin__InfluenzaA__AHC61787

SEQ ID NO: 106909 - RNA, 1701 nt, Artificial Sequence; identical to SEQ ID NO: 106654
  derived and/or modified CDS sequence (opt2) from hemagglutinin__InfluenzaA__AHC61799

SEQ ID NO: 106910 - RNA, 1701 nt, Artificial Sequence
  derived and/or modified CDS sequence (opt2) from hemagglutinin__InfluenzaA__AHC61823
augaagaccaucaucgcccucuccuacauccucugccucgucuucgcccagaagcuccccggcaacgacaacuccaccgccacccucugccucggccaccacgccguccccaacggcaccaucgucaagaccaucaccaacgaccagaucgaggucaccaacgccaccgagcucguccaguccuccuccaccggcgagaucugcgacuccccccaccagauccucgacggcgagaacugcacccucaucgacgcccuccucggcgacccccagugcgacggcuuccagaacaagaagugggaccucuucgucgagcgcuccaaggccuacuccaacugcuaccccuacgacguccccgacuacgccucccuccgcucccucgucgccuccuccggcacccucgaguucaacaacgaguccuucaacuggaccggcgucacccagaacggcaccuccuccgccugcauccgccgcuccaacuccuccuucuucucccgccucaacuggcucacccaccucaacuucaaguaccccgcccucaacgucaccaugcccaacaacgagcaguucgacaagcucuacaucuggggcguccaccaccccggcaccgacaaggaccagaucuuccucuacgcccaguccuccggccgcaucaccgucuccaccaagcgcucccagcaggccgucauccccaacaucggcucccgcccccgcauccgcaacauccccucccgcaucuccaucuacuggaccaucgucaagcccggcgacauccuccucaucaacuccaccggcaaccucaucgccccccgcggcuacuucaagauccgcuccggcaaguccuccaucaugaaguccgacgcccccaucgacaagugcaacuccgagugcaucacccccaacggcuccauccccaacgacaagcccuuccagaacgucaaccgcaucaccuacggcgccugcccccgcuacgucaagcaguccacccucaagcucgccaccggcaugcgcaacguccccgagaagcagacccgcggcaucuucggcgccaucgccggcuucaucgagaacggcugggagggcauggucgacggcugguacggcuuccgccaccagaacuccgagggccgcggccaggccgccgaccucaaguccacccaggccgccaucgaccagaucaacggcaagcucaaccgccucaucggcaagaccaacgagaaguuccaccagaucgagaaggaguucuccgaggucgagggccgcauccaggaccucgagaaguacgucgaggacaccaagaucgaccucugguccuacaacgccgagcuccucgucgcccucgagaaccagcacaccaucgaccucaccgacuccgagaugaacaagcucuucgagaagaccaagaagcagcuccgcgagaacgccgaggacaugggcaacggcugcuucaagaucuaccacaagugcgacaacgccugcaucggcuccauccgcaacggcaccuacaaccacgacgucuaccgcgacgaggcccucaacaaccgcuuccagaucaagggcgucgagcucaaguccggcuacaaggacuggauccucuggaucuccuucgccaucuccugcuuccuccucugcgucgcccuccucggcuucaucaugugggccugccagaagggcaacauccgcugcaacaucugcaucuga

SEQ ID NO: 106911 - RNA, 1701 nt, Artificial Sequence; identical to SEQ ID NO: 103818
  derived and/or modified CDS sequence (opt2) from hemagglutinin__InfluenzaA__AHC61835

SEQ ID NO: 106912 - RNA, 1701 nt, Artificial Sequence; identical to SEQ ID NO: 103018
  derived and/or modified CDS sequence (opt2) from hemagglutinin__InfluenzaA__AHC61847

SEQ ID NO: 106913 - RNA, 1701 nt, Artificial Sequence; identical to SEQ ID NO: 102891
  derived and/or modified CDS sequence (opt2) from hemagglutinin__InfluenzaA__AHC61859

SEQ ID NO: 106914 - RNA, 1701 nt, Artificial Sequence; identical to SEQ ID NO: 103818
  derived and/or modified CDS sequence (opt2) from hemagglutinin__InfluenzaA__AHC61871

SEQ ID NO: 106915 - RNA, 1701 nt, Artificial Sequence
  derived and/or modified CDS sequence (opt2) from hemagglutinin__InfluenzaA__AHC61883
augaagaccaucaucgcccucuccuacauccucugccucgucuucgcccagaagcuccccggcaacgacaacuccaccgccacccucugccucggccaccacgccguccccaacggcaccaucgucaagaccaucaccaacgaccagaucgaggucaccaacgccaccgagcucguccaguccuccuccaccggcgagaucugcgacuccccccaccagauccucgacggcgagaacugcacccucaucgacgcccuccucggcgacccccagugcgacggcuuccagaacaagaagugggaccucuucgucgagcgcuccaaggccuacuccaacugcuaccccuacgacguccccgacuacgccucccuccgcucccucgucgccuccuccggcacccucgaguucaacaacgaguccuucaacuggaccggcgucacccagaacggcaccuccuccgccugcauccgccgcuccaacuccuccuucuucucccgccucaacuggcucacccaccucaacuucaaguaccccgcccucaacgucaccaugcccaacaacgagcaguucgacaagcucuacaucuggggcguccaccaccccggcaccgacaaggaccagaucuuccucuacgcccaguccuccggccgcaucaccgucuccaccaagcgcucccagcaggccgucauccccaacaucggcucccgcccccgcauccgcaacauccccucccgcaucuccaucuacuggaccaucgucaagcccggcgacauccuccucaucaacuccaccggcaaccucaucgccccccgcggcuacuucaagauccgcuccggcaaguccuccaucaugcgcuccgacgcccccaucggcaagugcaacuccgagugcaucacccccaacggcuccauccccaacgacaagcccuuccagaacgucaaccgcaucaccuacggcgccugcccccgcuacgucaagcaguccacccucaagcucgccaccggcaugcgcaacguccccgagaagcagacccgcggcaucuucggcgccaucgccggcuucaucgagaacggcugggagggcauggucgacggcugguacggcuuccgccaccagaacuccgagggccgcggccaggccgccgaccucaaguccacccaggccgccaucgaccagaucaacggcaagcucaaccgccucaucggcaagaccaacgagaaguuccaccagaucgagaaggaguucuccgaggucgagggccgcauccaggaccucgagaaguacgucgaggacaccaagaucgaccucugguccuacaacgccgagcuccucgucgcccucgagaaccagcacaccaucgaccucgccgacuccgagaugaacaagcucuucgagaagaccaagaagcagcuccgcgagaacgccgaggacaugggcaacggcugcuucaagaucuaccacaagugcgacaacgccugcaucggcuccauccgcaacggcaccuacaaccacgacgucuaccgcgacgaggcccucaacaaccgcuuccagaucaagggcgucgagcucaaguccggcuacaaggacuggauccucuggaucuccuucgccaucuccugcuuccuccucugcgucgcccuccucggcuucaucaugugggccugccagaagggcaacauccgcugcaacaucugcaucuga

SEQ ID NO: 106916 - RNA, 1701 nt, Artificial Sequence; identical to SEQ ID NO: 103018
  derived and/or modified CDS sequence (opt2) from hemagglutinin__InfluenzaA__AHC61895

SEQ ID NO: 106917 - RNA, 1701 nt, Artificial Sequence; identical to SEQ ID NO: 103018
  derived and/or modified CDS sequence (opt2) from hemagglutinin__InfluenzaA__AHC61907

SEQ ID NO: 106918 - RNA, 1701 nt, Artificial Sequence
  derived and/or modified CDS sequence (opt2) from hemagglutinin__InfluenzaA__AHC61931
augaagaccaucaucgcccucuccuacauccucugccucgucuucgcccagaagcuccccggcaacgacaacuccaccgccacccucugccucggccaccacgccguccccaacggcaccaucgucaagaccaucaccaacgaccagaucgaggucaccaacgccaccgagcucguccaguccuccuccaccggcgagaucugcaacuccccccaccagauccucgacggcgagaacugcacccucaucgacgcccuccucggcgacccccagugcgacggcuuccagaacaagaagugggaccucuucgucgagcgcuccaaggcccacuccaacugcuaccccuacgacguccccgacuacgccucccuccgcucccucgucgccuccuccggcacccucgaguucaacaacgaguccuucaacuggaccggcgucacccagaacggcaccuccuccgccugcauccgccgcuccaacaacuccuucuucucccgccucaacuggcucacccaccucaacuucaaguaccccgcccucaacgucaccaugcccaacaacgagcaguucgacaagcucuacaucuggggcguccaccaccccggcaccgacaaggaccagaucuuccucuacgcccaggccgccggccgcaucaccgucuccaccaagcgcucccagcaggccgucauccccaacaucggcucccgcccccgcguccgcaacauccccucccgcgucuccaucuacuggaccaucgucaagcccggcgacauccuccucaucaacuccaccggcaaccucaucgccccccgcggcuacuucaagauccgcuccggcaaguccuccaucaugcgcuccgacgcccccaucggcaagugcaacuccgccugcaucacccccaacggcuccauccccaacgacaagcccuuccagaacgucaaccgcaucaccuacggcgccugcccccgcuacgucaagcagaacacccucaagcucgccaccggcaugcgcaacguccccgagaagcagacccgcggcaucuucggcgccaucgccggcuucaucgagaacggcugggagggcauggucgacggcugguacggcuuccgccaccagaacuccgagggccgcggccaggccgccgaccucaaguccacccaggccgccaucgaccagaucaacggcaagcucaaccgccucaucggcaagaccaacgagaaguuccaccagaucgagaaggaguucuccgaggucgagggccgcauccaggaccucgagaaguacgucgaggacaccaagaucgaccucugguccuacaacgccgagcuccucgucgcccucgagaaccagcacaccaucgaccucaccgacuccgagaugaacaagcucuucgagaagaccaagaagcagcuccgcgagaacgccgaggacaugggcaacggcugcuucaagaucuaccacaagugcgacaacgccugcaucggcuccauccgcaacggcaccuacgaccacgacgucuaccgcgacgaggcccucaacaaccgcuuccagaucaagggcgucgagcucaaguccggcuacaagggcuggauccucuggaucuccuucgccaucuccugcuuccuccucugcgucgcccuccucggcuucaucaugugggccugccagaagggcaacauccgcugcaacaucugcaucuga

SEQ ID NO: 106919 - RNA, 1701 nt, Artificial Sequence; identical to SEQ ID NO: 103818
  derived and/or modified CDS sequence (opt2) from hemagglutinin__InfluenzaA__AHC61943

SEQ ID NO: 106920 - RNA, 1701 nt, Artificial Sequence; identical to SEQ ID NO: 105110
  derived and/or modified CDS sequence (opt2) from hemagglutinin__InfluenzaA__AHC61955

SEQ ID NO: 106921 - RNA, 1701 nt, Artificial Sequence; identical to SEQ ID NO: 103818
  derived and/or modified CDS sequence (opt2) from hemagglutinin__InfluenzaA__AHC61967

SEQ ID NO: 106922 - RNA, 1701 nt, Artificial Sequence; identical to SEQ ID NO: 102891
  derived and/or modified CDS sequence (opt2) from hemagglutinin__InfluenzaA__AHC61979

SEQ ID NO: 106923 - RNA, 1701 nt, Artificial Sequence; identical to SEQ ID NO: 103018
  derived and/or modified CDS sequence (opt2) from hemagglutinin__InfluenzaA__AHC61991

SEQ ID NO: 106924 - RNA, 1701 nt, Artificial Sequence; identical to SEQ ID NO: 106729
  derived and/or modified CDS sequence (opt2) from hemagglutinin__InfluenzaA__AHC62003

SEQ ID NO: 106925 - RNA, 1701 nt, Artificial Sequence; identical to SEQ ID NO: 103818
  derived and/or modified CDS sequence (opt2) from hemagglutinin__InfluenzaA__AHC62015

SEQ ID NO: 106926 - RNA, 1701 nt, Artificial Sequence; identical to SEQ ID NO: 105110
  derived and/or modified CDS sequence (opt2) from hemagglutinin__InfluenzaA__AHC62027

SEQ ID NO: 106927 - RNA, 1701 nt, Artificial Sequence
  derived and/or modified CDS sequence (opt2) from hemagglutinin__InfluenzaA__AHC62039
augaagaccaucaucgcccucuccuacauccucugccucgucuucgcccagaagcuccccggcaacgacaacuccaccgccacccucugccucggccaccacgccguccccaacggcaccaucgucaagaccaucaccaacgaccagaucgaggucaccaacgccaccgagcucguccaguccuccuccaccggcgagaucugcaacuccccccaccagauccucgacggcgagaacugcacccucaucgacgcccuccucggcgacccccagugcgacggcuuccagaacaagaagugggaccucuucgucgagcgcuccaaggcccacuccaacugcuaccccuacgacguccccgacuacgccucccuccgcucccucgucgccuccuccggcacccucgaguucaacaacgaguccuucaacuggaccggcgucacccagaacggcaccuccuccgccugcauccgcggcuccaacaacuccuucuucucccgccucaacuggcucacccaccucaacuucaaguaccccgcccucaacgucaccaugcccaacaacgagcaguucgacaagcucuacaucuggggcguccaccaccccggcaccgacaaggaccagaucuuccucuacgcccaggccuccggccgcaucaccgucuccaccaagcgcucccagcaggccgucauccccaacaucggcucccgcccccgcguccgcaacauccccucccgcgucuccaucuacuggaccaucgucaagcccggcgacauccuccucaucaacuccaccggcaaccucaucgccccccgcggcuacuucaagauccgcuccggcaaguccuccaucaugaaguccgacgcccccaucggcaagugcaacuccgccugcaucacccccaacggcuccauccccaacgacaagcccuuccagaacgucaaccgcaucaccuacggcgccugcccccgcuacgucaagcagaacacccucaagcucgccaccggcaugcgcaacguccccgagaagcagacccgcggcaucuucggcgccaucgccggcuucaucgagaacggcugggagggcaugauggacggcugguacggcuuccgccaccagaacuccgagggccgcggccaggccgccgaccucaaguccacccaggccgccaucgaccagaucaacggcaagcucaaccgccucaucggcaagaccaacgagaaguuccaccagaucgagaaggaguucuccgaggucgagggccgcauccaggaccucgagaaguacgucgaggacaccaagaucgaccucugguccuacaacgccgagcuccucgucgcccucgagaaccagcacaccaucgaccucaccgacuccgagaugaacaagcucuucgagaagaccaagaagcagcuccgcgagaacgccgaggacaugggcaacggcugcuucaagaucuaccacaagugcgacaacgccugcaucggcuccauccgcaacggcaccuacgaccacgacgucuaccgcgacgaggcccucaacaaccgcuuccagaucaagggcgucgagcucaaguccggcuacaaggacuggauccucuggaucuccuucgccaucuccugcuuccuccucugcgucgcccuccucggcuucaucaugugggccugccagaagggcaacauccgcugcaacaucugcaucuga

SEQ ID NO: 106928 - RNA, 1701 nt, Artificial Sequence
  derived and/or modified CDS sequence (opt2) from hemagglutinin__InfluenzaA__AHC62050
augaagaccaucaucgcccucuccuacauccucugccucgucuucgcccagaagcuccccggcaacgacaacuccaccgccacccucugccucggccaccacgccguccccaacggcaccaucgucaagaccaucaccaacgaccagaucgaggucaccaacgccaccgagcucguccaguccuccuccaccggcgagaucugcaacuccccccaccagauccucgacggcgagaacugcacccucaucgacgcccuccucggcgacccccagugcgacggcuuccagaacaagaagugggaccucuucgucgagcgcuccaaggcccacuccaacugcuaccccuacgacguccccgacuacgccucccuccgcucccucgucgccuccuccggcacccucgaguucaacaacgaguccuucaacuggaccggcgucacccagaacggcaccuccuccgccugcauccgccgcuccaacaacuccuucuucucccgccucaacuggcucacccaccucaacuucaaguaccccgcccucaacgucaccaugcccaacaacgagcaguucgacaagcucuacaucuggggcguccaccaccccggcaccgacaaggaccagaucuuccucuacgcccaggccuccggccgcaucaccgucuccaccaagcgcucccagcaggccgucauccccaacaucggcucccgcccccgcguccgcaacguccccucccgcgucuccaucuacuggaccaucgucaagcccggcgacauccuccucaucaacuccaccggcaaccucaucgccccccgcggcuacuucaagauccgcuccggcaaguccuccaucaugcgcuccgacgcccccaucggcaagugcaacuccgccugcaucacccccaacggcuccauccccaacgacaagcccuuccagaacgucaaccgcaucaccuacggcgccugcccccgcuacgucaagcagaacacccucaagcucgccaccggcaugcgcaacguccccgagaagcagacccgcggcaucuucggcgccaucgccggcuucaucgagaacggcugggagggcauggucgacggcugguacggcuuccgccaccagaacuccgagggccgcggccaggccgccgaccucaaguccacccaggccgccaucgaccagaucaacggcaagcucaaccgccucaucggcaagaccaacgagaaguuccaccagaucgagaaggaguucuccgaggucgagggccgcauccaggaccucgagaaguacgucgaggacaccaagaucgaccucugguccuacaacgccgagcuccucgucgcccucgagaaccagcacaccaucgaccucaccgacuccgagaugaacaagcucuucgagaagaccaagaagcagcuccgcgagaacgccgaggacaugggcaacggcugcuucaagaucuaccacaagugcgacaacgccugcaucggcuccauccgcaacggcaccuacgaccacgacgucuaccgcgacgaggcccucaacaaccgcuuccagaucaagggcgucgagcucaaguccggcuacaaggacuggauccucuggaucuccuucgccaucuccugcuuccuccucugcgucgcccuccucggcuucaucaugugggccugccagaagggcaacauccgcugcaacaucugcaucuga

SEQ ID NO: 106929 - RNA, 1701 nt, Artificial Sequence; identical to SEQ ID NO: 105110
  derived and/or modified CDS sequence (opt2) from hemagglutinin__InfluenzaA__AHC62062

SEQ ID NO: 106930 - RNA, 1701 nt, Artificial Sequence
  derived and/or modified CDS sequence (opt2) from hemagglutinin__InfluenzaA__AHC62074
augaagaccaucaucgcccucuccuacauccucugccucgucuucgcccagaagcuccccggcaacgacaacuccaccgccacccucugccucggccaccacgccguccccaacggcaccaucgucaagaccaucaccaacgaccagaucgaggucaccaacgccaccgagcucguccaguccuccuccaccggcgagaucugcgacuccccccaccagauccucgacggcgagaacugcacccucaucgacgcccuccucggcgacccccagugcgacggcuuccagaacaagaagugggaccucuucgucgagcgcuccaaggccuacuccaacugcuaccccuacgacguccccgacuacgccucccuccgcucccucgucgccuccuccggcacccucgaguucaacaacgaguccuucaacuggaccggcgucacccagaacggcaccuccuccgccugcauccgccgcuccaacaacuccuucuucucccgccucaacuggcucacccaccucaacuucaaguaccccgcccucaacgucaccaugcccaacaacgagcaguucgacaagcucuacaucuggggcguccaccaccccggcaccgacaaggaccagaucuuccucuacgcccaggccuccggccgcaucaccgucuccaccaagcgcaaccagcaggccgucauccccaacaucggcucccgcccccgcguccgcaacauccccucccgcaucuccaucuacuggaccaucgucaagcccggcgacauccuccucaucaacuccaccggcaaccucaucgccccccgcggcuacuucaagauccgcuccggcaaguccuccaucaugcgcuccgacgcccccaucggcaagugcaacuccgagugcaucacccccaacggcuccauccccaacgacaagcccuuccagaacgucaaccgcaucaccuacggcgccugcccccgcuacgucaagcagaacacccucaagcucgccaccggcaugcgcaacguccccgagaagcagacccgcggcaucuucggcgccaucgccggcuucaucgagaacggcugggagggcauggucgacggcugguacggcuuccgccaccagaacuccgagggccgcggccaggccgccgaccucaaguccacccaggccgccaucgaccagaucaacggcaagcucaaccgccucaucggcaagaccaacgagaaguuccaccagaucgagaaggaguucuccgaggucgagggccgcauccaggaccucgagaaguacgucgaggacaccaagaucgaccucugguccuacaacgccgagcuccucgucgcccucgagaaccagcacaccaucgaccucaccgacuccgagaugaacaagcucuucgagaagaccaagaagcagcuccgcgagaacgccgaggacaugggcaacggcugcuucaagaucuaccacaagugcgacaacgccugcaucggcuccauccgcaacggcaccuacaaccacgacgucuaccgcgacgaggcccucaacaaccgcuuccagaucaagggcgucgagcucaaguccggcuacaaggacuggauccucuggaucuccuucgccaucuccugcuuccuccucugcgucgcccuccucggcuucaucaugugggccugccagaagggcaacauccgcugcaacaucugcaucuga

SEQ ID NO: 106931 - RNA, 1701 nt, Artificial Sequence; identical to SEQ ID NO: 102891
  derived and/or modified CDS sequence (opt2) from hemagglutinin__InfluenzaA__AHC62086

SEQ ID NO: 106932 - RNA, 1701 nt, Artificial Sequence; identical to SEQ ID NO: 103818
  derived and/or modified CDS sequence (opt2) from hemagglutinin__InfluenzaA__AHC62098

SEQ ID NO: 106933 - RNA, 1701 nt, Artificial Sequence; identical to SEQ ID NO: 102891
  derived and/or modified CDS sequence (opt2) from hemagglutinin__InfluenzaA__AHC62110

SEQ ID NO: 106934 - RNA, 1701 nt, Artificial Sequence
  derived and/or modified CDS sequence (opt2) from hemagglutinin__InfluenzaA__AHC62122
augaagaccaucaucgcccucuccuacauccucugccucgucuucgcccagaagcuccccggcaacgacaacuccaccgccacccucugccucggccaccacgccguccccaacggcaccaucgucaagaccaucaccaacgaccagaucgaggucaccaacgccaccgagaugguccaguccuccuccaccggcgagaucugcaacuccccccaccagauccucgacggcgagaacugcacccucaucgacgcccuccucggcgacccccagugcgacggcuuccagaacaagaagugggaccucuucgucgagcgcuccaaggcccacuccaacugcuaccccuacgacguccccgacuacgccucccuccgcucccucgucgccuccuccggcacccucgaguucaacaacgaguccuucaacuggaccggcgucacccagaacggcaccuccuccgccugcauccgcggcuccaacaacuccuucuucucccgccucaacuggcucacccacuccaacuucaaguaccccgcccucaacgucaccaugcccaacaacgagcaguucgacaagcucuacaucuggggcguccaccaccccggcaccgacaaggaccagaucuuccucuacgcccaggccuccggccgcaucaccgucuccaccaagcgcucccagcaggccgucauccccaacaucggcucccgcccccgcguccgcaacauccccucccgcgucuccaucuacuggaccaucgucaagcccggcgacauccuccucaucaacuccaccggcaaccucaucgccccccgcggcuacuucaagauccgcuccggcaaguccuccaucaugcgcuccgacgcccccaucggcaagugcaacuccgccugcaucacccccaacggcuccauccccaacgacaagcccuuccagaacgucaaccgcaucaccuacggcgccugcccccgcuacgucaagcagaacacccucaagcucgccaccggcaugcgcaacguccccgagaagcagacccgcggcaucuucggcgccaucgccggcuucaucgagaacggcugggagggcauggucgacggcugguacggcuuccgccaccagaacuccgagggccgcggccaggccgccgaccucaaguccacccaggccgccaucgaccagaucaacggcaagcucaaccgccucaucggcaagaccaacgagaaguuccaccagaucgagaaggaguucuccgaggucgagggccgcauccaggaccucgagaaguacgucgaggacaccaagaucgaccucugguccuacaacgccgagcuccucgucgcccucgagaaccagcacaccaucgaccucaccgacuccgagaugaacaagcucuucgagaagaccaagaagcagcuccgcgagaacgccgaggacaugggcaacggcugcuucaagaucuaccacaagugcgacaacgccugcaucggcuccauccgcaacggcaccuacgaccacgacgucuaccgcgacgaggcccucaacaaccgcuuccgcaucaagggcgucgagcucaaguccggcuacaaggacuggauccucuggaucuccuucgccaucuccugcuuccuccucugcgucgcccuccucggcuucaucaugugggccugccagaagggcaacauccgcugcaacaucugcaucuga

SEQ ID NO: 106935 - RNA, 1701 nt, Artificial Sequence; identical to SEQ ID NO: 102891
  derived and/or modified CDS sequence (opt2) from hemagglutinin__InfluenzaA__AHC62134

SEQ ID NO: 106936 - RNA, 1701 nt, Artificial Sequence
  derived and/or modified CDS sequence (opt2) from hemagglutinin__InfluenzaA__AHC62146
augaagaccaucaucgcccucuccuacauccucugccucgucuucgcccagaagcuccccggcaacgacaacuccaccgccacccucugccucggccaccacgccguccccaacggcaccaucgucaagaccaucaccaacgaccagaucgaggucaccaacgccaccgagcucguccaguccuccuccaccggcgagaucugcaacuccccccaccagauccucgacggcgagaacugcacccucaucgacgcccuccucggcgacccccagugcgacggcuuccagaacaagaagugggaccucuucgucgagcgcuccaaggccuacuccaacugcuaccccuacgacguccccgacuacgccucccuccgcucccucgucgccuccuccggcacccucgaguucaacaacgaguccuucaacuggaccggcgucacccagaacggcaccuccuccgccugcauccgccgcuccaacuccuccuucuucucccgccucaacuggcucacccaccucaacuucaaguaccccgcccucaacgucaccaugcccaacaacgagcaguucgacaagcucuacaucuggggcguccaccaccccggcaccgacaaggaccagaucuuccucuacgcccaguccuccggccgcaucaccgucuccaccaagcgcucccagcaggccgucauccccaacaucggcucccgcccccgcauccgcaacauccccucccgcaucuccaucuacuggaccaucgucaagcccggcgacauccuccucaucaacuccaccggcaaccucaucgccccccgcggcuacuucaagauccgcuccggcaaguccuccaucaugcgcuccgacgcccccaucggcaagugcaacuccgagugcaucacccccaacggcuccauccccaacgacaagcccuuccagaacgucaaccgcaucaccuacggcgccugcccccgcuacgucaagcaguccacccucaagcucgccaccggcaugcgcaacguccccgagaagcagacccgcggcaucuucggcgccaucgccggcuucaucgagaacggcugggagggcauggucgacggcugguacggcuuccgccaccagaacuacgagggccgcggccaggccgccgaccucaaguccacccaggccgccaucgaccagaucaacggcaagcucaaccgccucaucggcaagaccaacgagaaguuccaccagaucgagaaggaguucuccgaggucgagggccgcauccaggaccucgagaaguacgucgaggacaccaagaucgaccucugguccuacaacgccgagcuccucgucgcccucgagaaccagcacaccaucgaccucaccgacuccgagaugaacaagcucuucgagaagaccaagaagcagcuccgcgagaacgccgaggacaugggcaacggcugcuucaagaucuaccacaagugcgacaacgccugcaucggcuccauccgcaacggcaccuacaaccacgacgucuaccgcgacgaggcccucaacaaccgcuuccagaucaagggcgucgagcucaaguccggcuacaaggacuggauccucuggaucuccuucgccaucuccugcuuccuccucugcgucgcccuccucggcuucaucaugugggccugccagaagggcaacauccgcugcaacaucugcaucuga

SEQ ID NO: 106937 - RNA, 1701 nt, Artificial Sequence; identical to SEQ ID NO: 103018
  derived and/or modified CDS sequence (opt2) from hemagglutinin__InfluenzaA__AHC62158

SEQ ID NO: 106938 - RNA, 1701 nt, Artificial Sequence
  derived and/or modified CDS sequence (opt2) from hemagglutinin__InfluenzaA__AHC62170
augaagaccaucaucgcccucuccuacauccucugccucgucuucgcccagaagcuccccggcaacgacaacuccaccgccacccucugccucggccaccacgccguccccaacggcaccaucgucaagaccaucaccaacgaccagaucgaggucaccaacgccaccgagcucguccaguccuccuccaccggcgagaucugcaacuccccccaccagauccucgacggcgagaacugcacccucaucgacgcccuccucggcgacccccagugcgacggcuuccagaacaagaagugggaccucuucgucgagcgcuccaaggcccacuccaacugcuaccccuacgacguccccgacuacgccucccuccgcucccucgucgccuccuccggcacccucgaguucaacaacgaguccuucaacuggaccggcgucacccagaacggcaccuccuccgccugcauccgcggcuccaacaacuccuucuucucccgccucaacuggcucacccaccucaacuucaaguaccccgcccucaacgucaccaugcccaacaacgagcaguucgacaagcucuacaucuggggcguccaccaccccggcaccgacaaggaccagaucuuccucuacgcccaggccuccggccgcaucaccgucuccaccaagcgcucccagcaggccgucauccccaacaucggcucccgcccccgcguccgcaacauccccucccgcgucuccaucuacuggaccaucgucaagcccggcgacauccuccucaucaacuccaccggcaaccucaucgccccccgcggcuacuucaagauccgcuccggcaaguccuccaucaugcgcuccgacgcccccaucggcaagugcaacuccgccugcaucacccccaacggcuccauccccaacgacaagcccuuccagaacgucaaccgcaucaccuacggcgccugcccccgcuacgucaagcagaacacccucaagcucgccaccggcaugcgcaacguccccgagaagcagacccgcggcaucuucggcgccaucgccggcuucaucgagaacggcugggagggcaugauggacggcugguacggcuuccgccaccagaacuccgagggccgcggccaggccgccgaccucaaguccacccaggccgccaucgaccagaucaacggcaagcucaaccgccucaucggcaagaccaacgagaaguuccaccagaucgagaaggaguucuccgaggucgagggccgcauccaggaccucgagaaguacgucgaggacaccaagaucgaccucugguccuacaacgccgagcuccucgucgcccucgagaaccagcacaccaucgaccucaccgacuccgagaugaacaagcucuucgagaagaccaagaagcagcuccgcgagaacgccgaggacaugggcaacggcugcuucaagaucuaccacaagugcgacaacgccugcaucggcuccauccgcaacggcaccuacgaccacaacgucuaccgcgacgaggcccucaacaaccgcuuccagaucaagggcgucgagcucaaguccggcuacaaggacuggauccucuggaucuccuucgccaucuccugcuuccuccucugcgucgcccuccucggcuucaucaugugggccugccagaagggcaacauccgcugcaacaucugcaucuga

SEQ ID NO: 106939 - RNA, 1701 nt, Artificial Sequence; identical to SEQ ID NO: 102891
  derived and/or modified CDS sequence (opt2) from hemagglutinin__InfluenzaA__AHC62182

SEQ ID NO: 106940 - RNA, 1701 nt, Artificial Sequence; identical to SEQ ID NO: 105110
  derived and/or modified CDS sequence (opt2) from hemagglutinin__InfluenzaA__AHC62194

SEQ ID NO: 106941 - RNA, 1701 nt, Artificial Sequence
  derived and/or modified CDS sequence (opt2) from hemagglutinin__InfluenzaA__AHC62206
augaagaccaucaucgcccucuccuacauccucugccucgucuucgcccagaagcuccccggcaacgacaacuccaccgccacccucugccucggccaccacgccguccccaacggcaccaucgucaagaccaucaccaacgaccagaucgaggucaccaacgccaccgagcucguccaguccuccuccaccggcgagaucugcgacuccccccaccagauccucgacggcgagaacugcacccucaucgacgcccuccucggcgacccccagugcgacggcuuccagaacaagaagugggaccucuucgucgagcgcuccaaggccuacuccaacugcuaccccuacgacguccccgacuacgccucccuccgcucccucgucgccuccuccggcacccucgaguucaacaacgaguccuucaucuggaccggcgucacccagaacggcaccuccuccgccugcauccgccgcuccaacuccuccuucuucucccgccucaacuggcucacccaccucaacuucaaguaccccgcccucaacgucaccaugcccaacaacgagcaguucgacaagcucuacaucuggggcguccaccaccccggcaccgacaaggaccagaucuuccucuacgcccaguccuccggccgcaucaccgucuccaccaagcgcucccagcaggccgucauccccaacaucggcucccgcccccgcauccgcaacauccccucccgcaucuccaucuacuggaccaucgucaagcccggcgacauccuccucaucaacuccaccggcaaccucaucgccccccgcggcuacuucaagauccgcuccggcaaguccuccaucaugcgcuccgacgcccccaucggcaagugcaacuccgagugcaucacccccaacggcuccauccccaacgacaagcccuuccagaacgucaaccgcaucaccuacggcgccugcccccgcuacgucaagcaguccacccucaagcucgccaccggcaugcgcaacguccccgagaagcagacccgcggcaucuucggcgccaucgccggcuucaucgagaacggcugggagggcauggucgacggcugguacggcuuccgccaccagaacuccgagggccgcggccaggccgccgaccucaaguccacccaggccgccaucgaccagaucaacggcaagcucaaccgccucaucggcaagaccaacgagaaguuccaccagaucgagaaggaguucuccgaggucgagggccgcauccaggaccucgagaaguacgucgaggacaccaagaucgaccucugguccuacaacgccgagcuccucgucgcccucgagaaccagcacaccaucgaccucaccgacuccgagaugaacaagcucuucgagaagaccaagaagcagcuccgcgagaacgccgaggacaugggcaacggcugcuucaagaucuaccacaagugcgacaacgccugcaucggcuccauccgcaacggcaccuacaaccacgacgucuaccgcgacgaggcccucaacaaccgcuuccagaucaagggcgucgagcucaaguccggcuacaaggacuggauccucuggaucuccuucgccaucuccugcuuccuccucugcgucgcccuccucggcuucaucaugugggccugccagaagggcaacauccgcugcaacaucugcaucuga

SEQ ID NO: 106942 - RNA, 1701 nt, Artificial Sequence; identical to SEQ ID NO: 103018
  derived and/or modified CDS sequence (opt2) from hemagglutinin__InfluenzaA__AHC62218

SEQ ID NO: 106943 - RNA, 1701 nt, Artificial Sequence
  derived and/or modified CDS sequence (opt2) from hemagglutinin__InfluenzaA__AHC62242
augaagaccaucaucgcccucuccuacauccucugccucgucuucgcccagaagauccccggcaacgacaacuccaccgccacccucugccucggccaccacgccguccccaacggcaccaucgucaagaccaucaccaacgaccagaucgaggucaccaacgccaccgagcucguccagaacuccuccaccggcgagaucugcgacuccccccaccagauccucgacggcgagaacugcacccucaucgacgcccuccucggcgacccccagugcgacggcuuccagaacaagaagugggaccucuucgucgagcgcuccaaggccuacuccaacugcuaccccuacgacguccccgacuacgccucccuccgcucccucgucgccuccuccggcacccucgaguucaacaacgaguccuucaacuggaccggcgucacccagaacggcaccuccuccgccugcauccgccgcuccaacaacuccuucuucucccgccucaacuggcucacccaccucaacuucaaguaccccgcccucaacgucaccaugcccaacaacgagcaguucgacaagcucuacaucuggggcguccaccaccccggcaccgacaaggaccagaucuuccucuacgcccaggccuccggccgcaucaccgucuccaccaagcgcucccagcaggccgucauccccaacaucggcucccgcccccgcguccgcaacauccccucccgcaucuccaucuacuggaccaucgucaagcccggcgacauccuccucaucaacuccaccggcaaccucaucgccccccgcggcuacuucaagauccgcuccggcaaguccuccaucaugcgcuccgacgcccccaucggcaagugcaacuccgagugcaucacccccaacggcuccauccccaacgacaagcccuuccagaacgucaaccgcaucaccuacggcgccugcccccgcuacgucaagcagaacacccucaagcucgccaccggcaugcgcaacguccccgagaagcagacccgcggcaucuucggcgccaucgccggcuucaucgagaacggcugggagggcauggucgacggcugguacggcuuccgccaccagaacuccgagggccgcggccaggccgccgaccucaaguccacccaggccgccaucgaccagaucaacggcaagcucaaccgccucaucggcaagaccaacgagaaguuccaccagaucgagaaggaguucuccgaggucgagggccgcauccaggaccucgagaaguacgucgaggacaccaagaucgaccucugguccuacaacgccgagcuccucaucgcccucgagaaccagcacaccaucgaccucaccgacuccgagaugaacaagcucuucgagaagaccaagaagcagcuccgcgagaacgccgaggacaugggcaacggcugcuucaagaucuaccacaagugcgacaacgccugcaucggcuccauccgcaacggcaccuacgaccacgacgucuaccgcgacgaggcccucaacaaccgcuuccagaucaagggcgucgagcucaaguccggcuacaaggacuggauccucuggaucuccuucgccaucuccugcuuccuccucugcgucgcccuccucggcuucaucaugugggccugccagaagggcaacauccgcugcaacaucugcaucuga

SEQ ID NO: 106944 - RNA, 1701 nt, Artificial Sequence; identical to SEQ ID NO: 106653
  derived and/or modified CDS sequence (opt2) from hemagglutinin__InfluenzaA__AHC62254

SEQ ID NO: 106945 - RNA, 1701 nt, Artificial Sequence; identical to SEQ ID NO: 103018
  derived and/or modified CDS sequence (opt2) from hemagglutinin__InfluenzaA__AHC62266

SEQ ID NO: 106946 - RNA, 1701 nt, Artificial Sequence; identical to SEQ ID NO: 106817
  derived and/or modified CDS sequence (opt2) from hemagglutinin__InfluenzaA__AHC62278

SEQ ID NO: 106947 - RNA, 1701 nt, Artificial Sequence
  derived and/or modified CDS sequence (opt2) from hemagglutinin__InfluenzaA__AHC62290
augaagaccaucaucgcccucuccuacauccucugccucaucuucgcccagaagcuccccggcaacgacaacuccaccgccacccucugccucggccaccacgccguccccaacggcaccaucgucaagaccaucaccaacgaccagaucgaggucaccaacgccaccgagcucguccaguccuccuccaccggcgagaucugcaacuccccccaccagauccucgacggcgagaacugcacccucaucgacgcccuccucggcgacccccagugcgacggcuuccagaacaagaagugggaccucuucgucgagcgcuccaaggcccacuccaacugcuaccccuacgacguccccgacuacgccucccuccgcucccucgucgccuccuccggcacccucgaguucaacaacgaguccuucaacuggaccggcgucacccagaacggcaccuccuccgccugcauccgccgcuccaacaacuccuucuucucccgccucaacuggcucacccaccucaacuucaaguaccccgcccucaacgucaccaugcccaacaacgagcaguucgacaagcucuacaucuggggcguccaccaccccggcaccgacaaggaccagaucuuccucuacgcccaggccuccggccgcaucaccgucuccaccaagcgcucccagcaggccgucauccccaacaucggcucccgcccccgcguccgcaacauccccucccgcgucuccaucuacuggaccaucgucaagcccggcgacauccuccucaucaacuccaccggcaaccucaucgccccccgcggcuacuucaagauccgcuccggcaaguccuccaucaugcgcuccgacgcccccaucggcaagugcaacuccgccugcaucacccccaacggcuccauccccaacgacaagcccuuccagaacgucaaccgcaucaccuacggcgccugcccccgcuacgucaagcagaacacccucaagcucgccaccggcaugcgcaacguccccgagaagcagacccgcggcaucuucggcgccaucgccggcuucaucgagaacggcugggagggcauggucgacggcugguacggcuuccgccaccagaacuccgagggccgcggccaggccgccgaccucaaguccacccaggccgccaucgaccagaucaacggcaagcucaaccgccucaucggcaagaccaacgagaaguuccaccagaucgagaaggaguucuccgaggucgagggccgcauccaggaccucgagaaguacgucgaggacaccaagaucgaccucugguccuacaacgccgagcuccucgucgcccucgagaaccagcacaccaucgaccucaccgacuccgagaugaacaagcucuucgagaagaccaagaagcagcuccgcgagaacgccgaggacaugggcaacggcugcuucaagaucuaccacaagugcgacaacgccugcaucggcuccauccgcaacggcaccuacgaccacgacgucuaccgcgacgaggcccucaacaaccgcuuccagaucaagggcgucgagcucaaguccggcuacaaggacuggauccucuggaucuccuucgccaucuccugcuuccuccucugcgucgcccuccucggcuucaucaugugggccugccagaagggcaacauccgcugcaacaucugcaucuga

SEQ ID NO: 106948 - RNA, 1701 nt, Artificial Sequence
  derived and/or modified CDS sequence (opt2) from hemagglutinin__InfluenzaA__AHC62302
augaagaccaucaucgcccucuccuacauccucugccucgucuucgcccagaagcuccccggcaacgacaacuccaccgccacccucugccucggccaccacgccguccccaacggcaccaucgucaagaccaucaccaacgaccagaucgaggucaccaacgccaccgagcucguccaguccuccuccaccggcgagaucugcaacuccccccaccagauccucgacggcgagaacugcacccucaucgacgcccuccucggcgacccccagugcgacggcuuccagaacaagaagugggaccucuucgucgagcgcuccaaggcccacuccaacugcuaccccuacgacguccccgacuacgccucccuccgcucccucgucgccuccuccggcacccucgaguucaacaacgaguccuucaacuggaccggcgucacccagaacggcaccuccuccgccugcauccgccgcuccaacaacuccuucuucucccgccucaacuggcucacccaccucaacuucaaguaccccgcccucaacgucaccaugcccaacaacgagcaguucgacaagcucuacaucuggggcguccaccaccccggcaccgacaaggaccagaucuuccucuacgcccaggccgccggccgcaucaccgucuccaccaagcgcucccagcaggccgucauccccaacaucggcucccgcccccgcguccgcaacauccccucccgcgucuccaucuacuggaccaucgucaagcccggcgacauccuccucaucaacuccaccggcaaccucaucgccccccgcggcuacuucaagauccgcaacggcaaguccuccaucaugcgcuccgacgcccccaucggcaagugcaacuccgccugcaucacccccaacggcuccauccccaacgacaagcccuuccagaacgucaaccgcaucaccuacggcgccugcccccgcuacgucaagcagaacacccucaagcucgccaccggcaugcgcaacguccccgagaagcagacccgcggcaucuucggcgccaucgccggcuucaucgagaacggcugggagggcauggucgacggcugguacggcuuccgccaccagaacuccgagggccgcggccaggccgccgaccucaaguccacccaggccgccaucgaccagaucaacggcaagcucaaccgccucaucggcaagaccaacgagaaguuccaccagaucgagaaggaguucuccgaggucgagggccgcauccaggaccucgagaaguacgucgaggacaccaagaucgaccucugguccuacaacgccgagcuccucgucgcccucgagaaccagcacaccaucgaccucaccgacuccgagaugaacaagcucuucgagaagaccaagaagcagcuccgcgagaacgccgaggacaugggcaacggcugcuucaagaucuaccacaagugcgacaacgccugcaucggcuccauccgcaacggcaccuacgaccacgacgucuaccgcgacgaggcccucaacaaccgcuuccagaucaagggcgucgagcucaaguccggcuacaaggacuggauccucuggaucuccuucgccaucuccugcuuccuccucugcgucgcccuccucggcuucaucaugugggccugccagaagggcaacauccgcugcaacaucugcaucuga

SEQ ID NO: 106949 - RNA, 1701 nt, Artificial Sequence
  derived and/or modified CDS sequence (opt2) from hemagglutinin__InfluenzaA__AHC62314
augaagaccaucaucgcccucuccuacauccucugccucgucuucgcccagaagcuccccggcaacgacaacuccaccgccacccucugccucggccaccacgccguccccaacggcaccaucgucaagaccaucaccaacgaccagaucgaggucaccaacgccaccgagcucguccagaacuccuccaccggcgagaucugcgacuccccccaccagauccucgacggcgagaacugcacccucaucgacgcccuccucggcgacccccagugcgacggcuuccagaacaagaagugggaccucuucgucgagcgcuccaaggccuacuccaacugcuaccccuacgacguccccgacuacgccucccuccgcucccucgucgccuccuccggcacccucgaguucaacaacgaguccuucaacuggaccggcgucacccagaacggcaccuccuccgccugcauccgccgcuccaacaacuccuucuucucccgccucaacuggcucacccaccucaacuucaaguaccccgcccucaacgucaccaugcccaacaacgagcaguucgacaagcucuacaucuggggcguccaccaccccggcaccgacaaggaccagaucuuccucuacgcccaggccuccggccgcaucaccgucuccaccaagcgcucccagcaggccgucauccccaacaucggcucccgcccccgcguccgcaacauccccucccgcaucuccaucuacuggaccaucgucaagcccggcgacauccuccucaucaacuccaccggcaaccucaucgccccccgcggcuacuucaagauccgcuccggcaaguccuccaucaugcgcuccgacgcccccaucggcaagugcaacuccgagugcaucacccccaacggcuccauccccaacgacaagcccuuccagaacgucaaccgcaucaccuacggcgccugcccccgcuacgucaagcagaacacccucaagcucgccaccggcaugcgcaacguccccgagaagcagacccgcggcaucuucggcgccaucgccggcuucaucgagaacggcugggagggcauggucgacggcugguacggcuuccgccaccagaacuccgagggccgcggccaggccgccgaccucaaguccacccaggccgccaucgaccagaucaacggcaagcucaaccgccucaucggcaagaccaacgagaaguuccaccagaucgagaaggaguucuccgaggucgagggccgcauccaggaccucgagaaguacgucgaggacaccaagaucgaccucugguccuacaacgccgagcuccucgucgcccucgagaaccagcacaccaucgaccucaccgacuccgagaugaacaagcucuucgagaagaccaagaagcagcuccgcgagaacgccgaggacaugggcaacggcugcuucaagaucuaccacaagugcgacaacgccugcaucggcuccauccgcaacggcaccuacgaccacgacgucuaccgcgacgaggcccucaacaaccgcuuccagauccgcggcgucgagcucaaguccggcuacaaggacuggauccucuggaucuccuucgccaucuccugcuuccuccucugcgucgcccuccucggcuucaucaugugggccugccagaagggcaacauccgcugcaacaucugcaucuga

SEQ ID NO: 106950 - RNA, 1701 nt, Artificial Sequence; identical to SEQ ID NO: 106814
  derived and/or modified CDS sequence (opt2) from hemagglutinin__InfluenzaA__AHC62326

SEQ ID NO: 106951 - RNA, 1701 nt, Artificial Sequence; identical to SEQ ID NO: 103818
  derived and/or modified CDS sequence (opt2) from hemagglutinin__InfluenzaA__AHC62338

SEQ ID NO: 106952 - RNA, 1701 nt, Artificial Sequence; identical to SEQ ID NO: 102891
  derived and/or modified CDS sequence (opt2) from hemagglutinin__InfluenzaA__AHC62350

SEQ ID NO: 106953 - RNA, 1701 nt, Artificial Sequence; identical to SEQ ID NO: 103818
  derived and/or modified CDS sequence (opt2) from hemagglutinin__InfluenzaA__AHC62362

SEQ ID NO: 106954 - RNA, 1701 nt, Artificial Sequence; identical to SEQ ID NO: 103818
  derived and/or modified CDS sequence (opt2) from hemagglutinin__InfluenzaA__AHC62374

SEQ ID NO: 106955 - RNA, 1701 nt, Artificial Sequence; identical to SEQ ID NO: 106817
  derived and/or modified CDS sequence (opt2) from hemagglutinin__InfluenzaA__AHC62386

SEQ ID NO: 106956 - RNA, 1701 nt, Artificial Sequence; identical to SEQ ID NO: 102891
  derived and/or modified CDS sequence (opt2) from hemagglutinin__InfluenzaA__AHC62398

SEQ ID NO: 106957 - RNA, 1701 nt, Artificial Sequence
  derived and/or modified CDS sequence (opt2) from hemagglutinin__InfluenzaA__AHC62410
augaagaccaucaucgcccucuccuacauccucugccucgucuucgcccagaagcuccccggcaacgacaacuccaccgccacccucugccucggccaccacgccguccccaacggcaccaucgucaagaccaucaccaacgaccagaucgaggucaccaacgccaccgagcucguccaguccuccuccaccggcgagaucugcaacuccccccaccagauccucgacggcgagaacugcacccucaucgacgcccuccucggcgacccccagugcgacggcuuccagaacaagaagugggaccucuucgucgagcgcuccaaggcccacuccaacugcuaccccuacgacguccccgacuacgccucccuccgcucccucgucgccuccuccggcacccucgaguucaacaacgaguccuucaacuggaccggcgucacccagaacggcaccuccuccgccugcauccgccgcuccaacaacuccuucuucucccgccucaacuggcucacccaccucaacuucaaguaccccgcccucaacgucaccaugcccaacaacgagcaguucgacaagcucuacaucuggggcguccaccaccccggcaccgacaaggaccagaucuuccucuacgcccaggccuccggccgcaucaccgucuccaccaagcgcucccagcaggccgucauccccaacaucggcucccgcccccgcguccgcaacauccccucccgcgucuccaucuacuggaccaucgucaagcccggcgacauccuccucaucaacuccaccggcaaccucaucgccccccgcggcuacuucaagauccgcuccggcaaguccuccaucauccgcuccgacgcccccaucggcaagugcaacuccgccugcaucacccccaacggcuccauccccaacgacaagcccuuccagaacgucaaccgcaucaccuacggcgccugcccccgcuacgucaagcagaacacccucaagcucgccaccggcaugcgcaacguccccgagaagcagacccgcggcaucuucggcgccaucgccggcuucaucgagaacggcugggagggcauggucgacggcugguacggcuuccgccaccagaacuccgagggccgcggccaggccgccgaccucaaguccacccaggccgccaucgaccagaucaacggcaagcucaaccgccucaucggcaagaccaacgagaaguuccaccagaucgagaaggaguucuccgaggucgagggccgcauccaggaccucgagaaguacgucgaggacaccaagaucgaccucugguccuacaacgccgagcuccucgucgcccucgagaaccagcacaccaucgaccucaccgacuccgagaugaacaagcucuucgagaagaccaagaagcagcuccgcgagaacgccgaggacaugggcaacggcugcuucaagaucuaccacaagugcgacaacgccugcaucggcuccauccgcaacggcaccuacgaccacgacgucuaccgcgacgaggcccucaacaaccgcuuccagaucaagggcgucgagcucaaguccggcuacaaggacuggauccucuggaucuccuucgccaucuccugcuuccuccucugcgucgcccuccucggcuucaucaugugggccugccagaagggcaacauccgcugcaacaucugcaucuga

SEQ ID NO: 106958 - RNA, 1701 nt, Artificial Sequence; identical to SEQ ID NO: 106760
  derived and/or modified CDS sequence (opt2) from hemagglutinin__InfluenzaA__AHC62422

SEQ ID NO: 106959 - RNA, 1701 nt, Artificial Sequence
  derived and/or modified CDS sequence (opt2) from hemagglutinin__InfluenzaA__AHC62434
augaagaccaucaucgcccucuccuacauccucugccucgucuucgcccagaagcuccccggcaacgacaacuccaccgccacccucugccucggccaccacgccguccccaacggcaccaucgucaagaccaucaccaacgaccagaucgaggucaccaacgccaccgagcucguccaguccuccuccaccggcgagaucugcaacuccccccaccagauccucgacggcgagaacugcacccucaucgacgcccuccucggcgacccccagugcgacggcuuccagaacaagaagugggaccucuucgucgagcgcuccaaggcccacuccaacugcuaccccuacgacguccccgacuacgccucccuccgcucccucgucgccuccuccggcacccucgaguucaacaacgaguccuucaacuggaccggcgucacccagaacggcaccuccuccgccugcauccgccgcuccaacaacuccuucuucucccgccucaacuggcucacccaccucaacuucaaguaccccgcccucaacgucaccaugcccaacaacgagcaguucgacaagcucuacaucuggggcguccaccaccccggcaccgacaaggaccagaucuuccucuacgcccaggccgccggccgcaucaccgucuccaccaagcgcucccagcaggccgucauccccaacaucggcucccgcccccgcguccgcaacauccccucccgcgucuccaucuacuggaccaucgucaagcccggcgacauccuccucaucaacuccaccggcaaccucaucgccccccgcggcuacuucaagauccaguccggcaaguccuccaucaugcgcuccgacgcccccaucggcaagugcaacuccgccugcaucacccccaacggcuccauccccaacgacaagcccuuccagaacgucaaccgcaucaccuacggcgccugcccccgcuacgucaagcagaacacccucaagcucgccaccggcaugcgcaacguccccgagaagcagacccgcggcaucuucggcgccaucgccggcuucaucgagaacggcugggagggcauggucgacggcugguacggcuuccgccaccagaacuccgagggccgcggccaggccgccgaccucaaguccacccaggccgccaucgaccagaucaacggcaagcucaaccgccucaucggcaagaccaacgagaaguuccaccagaucgagaaggaguucuccgaggucgagggccgcauccaggaccucgagaaguacgucgaggacaccaagaucgaccucugguccuacaacgccgagcuccucgucgcccucgagaaccagcacaccaucgaccucaccgacuccgagaugaacaagcucuucgagaagaccaagaagcagcuccgcgagaacgccgaggacaugggcaacggcugcuucaagaucuaccacaagugcgacaacgccugcaucggcuccauccgcaacggcaccuacgaccacgacgucuaccgcgacgaggcccucaacaaccgcuuccagaucaagggcgucgagcucaaguccggcuacaaggacuggauccucuggaucuccuucgccaucuccugcuuccuccucugcgucgcccuccucggcuucaucaugugggccugccagaagggcaacauccgcugcaacaucugcaucuga

SEQ ID NO: 106960 - RNA, 1701 nt, Artificial Sequence; identical to SEQ ID NO: 102891
  derived and/or modified CDS sequence (opt2) from hemagglutinin__InfluenzaA__AHC62446

SEQ ID NO: 106961 - RNA, 1701 nt, Artificial Sequence; identical to SEQ ID NO: 103018
  derived and/or modified CDS sequence (opt2) from hemagglutinin__InfluenzaA__AHC62458

SEQ ID NO: 106962 - RNA, 1701 nt, Artificial Sequence
  derived and/or modified CDS sequence (opt2) from hemagglutinin__InfluenzaA__AHC62470
augaagaccaucaucgcccucuccuacauccucugccucgucuucgcccagaagcuccccggcaacgacaacuccaccgccacccucugccucggccaccacgccguccccaacggcaccaucgucaagaccaucaccaacgaccagaucgaggucaccaacgccaccgagcucguccagaacuccuccaccggcgagaucugcgacuccccccaccagauccucgacggcgagaacugcacccucaucgacgcccuccucggcgacccccagugcgacggcuuccagaacaagaagugggaccucuucgucgagcgcuccaaggccuacuccaacugcuaccccuacgacguccccgacuacgccucccuccgcucccucgucgccuccuccggcacccucgaguucaacaacgaguccuucaacuggaccggcgucacccagaacggcaccuccuccgccugcauccgccgcuccaacaacuccuucuucucccgccucaacuggcucacccaccucaacuucaaguaccccgcccucaacgucaccaugcccaacaacgagcaguucgacaagcucuacaucuggggcguccaccaccccggcaccgacaaggaccagaucuuccucuacgcccaggccuccggccgcaucaccgucuccaccaagcgcucccagcaggccgucauccccaacaucggcucccgcccccgcguccgcaacauccccucccgcaucuccaucuacuggaccaucgucaagcccggcgacauccuccucaucaacuccaccggcaaccucaucgccccccgcggcuacuucaagauccgcuccggcaaguccuccaucaugcgcuccgacgcccccaucggcaagugcaacuccgagugcaucacccccaacggcuccauccccaacggcaagcccuuccagaacgucaaccgcaucaccuacggcgccugcccccgcuacgucaagcagaacacccucaagcucgccaccggcaugcgcaacguccccgagaagcagacccgcggcaucuucggcgccaucgccggcuucaucgagaacggcugggagggcauggucgacggcugguacggcuuccgccaccagaacuccgagggccgcggccaggccgccgaccucaaguccacccaggccgccaucgaccagaucaacggcaagcucaaccgccucaucggcaagaccaacgagaaguuccaccagaucgagaaggaguucuccgaggucgagggccgcauccaggaccucgagaaguacgucgaggacaccaagaucgaccucugguccuacaacgccgagcuccucgucgcccucgagaaccagcacaccaucgaccucaccgacuccgagaugaacaagcucuucgagaagaccaagaagcagcuccgcgagaacgccgaggacaugggcaacggcugcuucaagaucuaccacaagugcgacaacgccugcaucggcuccauccgcaacggcaccuacgaccacgacgucuaccgcgacgaggcccucaacaaccgcuuccagaucaagggcgucgagcucaaguccggcuacaaggacuggauccucuggaucuccuucgccaucuccugcuuccuccucugcgucgcccuccucggcuucaucaugugggccugccagaagggcaacauccgcugcaacaucugcaucuga

SEQ ID NO: 106963 - RNA, 1701 nt, Artificial Sequence; identical to SEQ ID NO: 106715
  derived and/or modified CDS sequence (opt2) from hemagglutinin__InfluenzaA__AHC62482

SEQ ID NO: 106964 - RNA, 1701 nt, Artificial Sequence; identical to SEQ ID NO: 102891
  derived and/or modified CDS sequence (opt2) from hemagglutinin__InfluenzaA__AHC62506

SEQ ID NO: 106965 - RNA, 1701 nt, Artificial Sequence; identical to SEQ ID NO: 103018
  derived and/or modified CDS sequence (opt2) from hemagglutinin__InfluenzaA__AHC62518

SEQ ID NO: 106966 - RNA, 1701 nt, Artificial Sequence
  derived and/or modified CDS sequence (opt2) from hemagglutinin__InfluenzaA__AHC62530
augaagaccaucaucgcccucuccuacauccucugccucgucuucgcccagaagauccccggcaacgacaacuccaccgccacccucugccucggccaccacgccguccccaacggcaccaucgucaagaccaucaccaacgaccagaucgaggucaccaacgccaccgagcucguccaguccuccuccaccggcgagaucugcaacuccccccaccagauccucgacggcgagaacugcacccucaucgacgcccuccucggcgacccccagugcgacggcuuccagaacaagaagugggaccucuucgucgagcgcuccaaggcccacuccaacugcuaccccuacgacguccccgacuacgccucccuccgcucccucgucgccuccuccggcacccucgaguucaacaacgaguccuucaacuggaccggcgucacccagaacggcaccuccuccgccugcauccgccgcuccaacaacuccuucuucucccgccucaacuggcucacccaccucaacuucaaguaccccgcccucaacgucaccaugcccaacaacgagcaguucgacaagcucuacaucuggggcguccaccaccccggcaccgacaaggaccagaucuuccucuacgcccaggccuccggccgcaucaccgucuccaccaagcgcucccagcaggccgucauccccaacaucggcucccgcccccgcguccgcaacauccccucccgcgucuccaucuacuggaccaucgucaagcccggcgacauccuccucaucaacuccaccggcaaccucaucgccccccgcggcuacuucaagauccgcuccggcaaguccuccaucaugcgcuccgacgcccccaucggcaagugcaacuccgccugcaucacccccaacggcuccauccccaacgacaagcccuuccagaacgucaaccgcaucaccuacggcgccugcccccgcuacgucaagcagaacacccucaagcucgccaccggcaugcgcaacguccccgagaagcagacccgcggcaucuucggcgccaucgccggcuucaucgagaacggcugggagggcauggucgacggcugguacggcuuccgccaccagaacuccgagggccgcggccaggccgccgaccucaaguccacccaggccgccaucgaccagaucaacggcaagcucaaccgccucaucggcaagaccaacgagaaguuccaccagaucgagaaggaguucuccgaggucgagggccgcauccaggaccucgagaaguacgucgaggacaccaagaucgaccucugguccuacaacgccgagcuccucgucgcccucgagaaccagcacaccaucgaccucaccgacuccgagaugaacaagcucuucgagaagaccaagaagcagcuccgcgagaacgccgaggacaugggcaacggcugcuucaagaucuaccacaagugcgacaacgccugcaucggcuccauccgcaacggcaccuacgaccacgacgucuaccgcgacgaggcccucaacaaccgcuuccagaucaagggcgucgagcucaaguccggcuacaaggacuggauccucuggaucuccuucgccaucuccugcuuccuccucugcgucgcccuccucggcuucaucaugugggccugccagaagggcaacauccgcugcaacaucugcaucuga

SEQ ID NO: 106967 - RNA, 1701 nt, Artificial Sequence; identical to SEQ ID NO: 106687
  derived and/or modified CDS sequence (opt2) from hemagglutinin__InfluenzaA__AHC62542

SEQ ID NO: 106968 - RNA, 1701 nt, Artificial Sequence; identical to SEQ ID NO: 102891
  derived and/or modified CDS sequence (opt2) from hemagglutinin__InfluenzaA__AHC62554

SEQ ID NO: 106969 - RNA, 1701 nt, Artificial Sequence
  derived and/or modified CDS sequence (opt2) from hemagglutinin__InfluenzaA__AHC62566
augaagaccaucaucgcccucuccuacauccucugccucgucuucgcccagaagcuccccggcaacgacaacuccaccgccacccucugccucggccaccacgccguccccaacggcaccauggucaagaccaucaccaacgaccagaucgaggucaccaacgccaccgagcucguccagaacuccuccaccggcgagaucugcgacuccccccaccagauccucgacggcgagaacugcacccucaucgacgcccuccucggcgacccccagugcgacggcuuccagaacaagaagugggaccucuucgucgagcgcuccaaggccuacuccaacugcuaccccuacgacguccccgacuacgccucccuccgcucccucgucgccuccuccggcacccucgaguucaacaacgaguccuucaacuggaccggcgucacccagaacggcaccuccuccgccugcauccgccgcuccaacaacuccuucuucucccgccucaacuggcucacccaccucaacuucaaguaccccgcccucaacgucaccaugcccaacaacgagcaguucgacaagcucuacaucuggggcguccaccaccccggcaccgacaaggaccagaucuuccucuacgcccaggccuccggccgcaucaccgucuccaccaagcgcucccagcaggccgucauccccaacaucggcucccgcccccgcguccgcaacauccccucccgcaucuccaucuacuggaccaucgucaagcccggcgacauccuccucaucaacuccaccggcaaccucaucgccccccgcggcuacuucaagauccgcuccggcaaguccuccaucaugcgcuccgacgcccccaucggcaagugcaacuccgagugcaucacccccaacggcuccauccccaacgacaagcccuuccagaacgucaaccgcaucaccuacggcgccugcccccgcuacgucaagcagaacacccucaagcucgccaccggcaugcgcaacguccccgagaagcagacccgcggcaucuucggcgccaucgccggcuucaucgagaacggcugggagggcauggucgacggcugguacggcuuccgccaccagaacuccgagggccgcggccaggccgccgaccucaaguccacccaggccgccaucgaccagaucaacggcaagcucaaccgccucaucggcaagaccaacgagaaguuccaccagaucgagaaggaguucuccgaggucgagggccgcauccaggaccucgagaaguacgucgaggacaccaagaucgaccucugguccuacaacgccgagcuccucgucgcccucgagaaccagcacaccaucgaccucaccgacuccgagaugaacaagcucuucgagaagaccaagaagcagcuccgcgagaacgccgaggacaugggcaacggcugcuucaagaucuaccacaagugcgacaacgccugcaucggcuccauccgcaacggcaccuacgaccacgacgucuaccgcgacgaggcccucaacaaccgcuuccagaucaagggcgucgagcucaaguccggcuacaaggacuggauccucuggaucuccuucgccaucuccugcuuccuccucugcgucgcccuccucggcuucaucaugugggccugccagaagggcaacauccgcugcaacaucugcaucuga

SEQ ID NO: 106970 - RNA, 1701 nt, Artificial Sequence; identical to SEQ ID NO: 102891
  derived and/or modified CDS sequence (opt2) from hemagglutinin__InfluenzaA__AHC62578

SEQ ID NO: 106971 - RNA, 1701 nt, Artificial Sequence; identical to SEQ ID NO: 102891
  derived and/or modified CDS sequence (opt2) from hemagglutinin__InfluenzaA__AHC62590

SEQ ID NO: 106972 - RNA, 1701 nt, Artificial Sequence; identical to SEQ ID NO: 103018
  derived and/or modified CDS sequence (opt2) from hemagglutinin__InfluenzaA__AHC62602

SEQ ID NO: 106973 - RNA, 1701 nt, Artificial Sequence
  derived and/or modified CDS sequence (opt2) from hemagglutinin__InfluenzaA__AHC62614
augaagaccaucaucgcccucuccuacauccucugccucgucuucgcccagaagcuccccggcaacgacaacuccaccgccacccucugccucggccaccacgccguccccaacggcaccaucgucaagaccaucaccaacgaccagaucgaggucaccaacgccaccgagcucguccaguccuccuccaccggcgagaucugcaacuccccccaccagaucaucgacggcgagaacugcacccucaucgacgcccuccucggcgacccccagugcgacggcuuccagaacaagaagugggaccucuucgucgagcgcuccaaggcccacuccaacugcuaccccuacgacguccccgacuacgccucccuccgcucccucgucgccuccuccggcacccucgaguucaacaacgaguccuucaacuggaccggcgucacccagaacggcaccuccuccgccugcauccgcggcuccaacaacuccuucuucucccgccucaacuggcucacccaccucaacuucaaguaccccgcccucaacgucaccaugcccaacaacgagcaguucgacaagcucuacaucuggggcguccaccaccccggcaccgacaaggaccagaucuuccucuacgcccaggccuccggccgcaucaccgucuccaccaagcgcucccagcaggccgucauccccaacaucggcucccgcccccgcguccgcaacauccccucccgcgucuccaucuacuggaccaucgucaagcccggcgacauccuccucaucaacuccaccggcaaccucaucgccccccgcggcuacuucaagauccgcuccggcaaguccuccaucaugcgcuccgacgcccccaucggcaagugcaacuccgccugcaucacccccaacggcuccauccccaacgacaagcccuuccagaacgucaaccgcaucaccuacggcgccugcccccgcuacgucaagcagaacacccucaagcucgccaccggcaugcgcaacguccccgagaagcagacccgcggcaucuucggcgccaucgccggcuucaucgagaacggcugggagggcauggucgacggcugguacggcuuccgccaccagaacuccgagggccgcggccaggccgccgaccucaaguccacccaggccgccaucgaccagaucaacggcaagcucaaccgccucaucggcaagaccaacgagaaguuccaccagaucgagaaggaguucuccgaggucgagggccgcauccaggaccucgagaaguacgucgaggacaccaagaucgaccucugguccuacaacgccgagcuccucgucgcccucgagaaccagcacaccaucgaccucaccgacuccgagaugaacaagcucuucgagaagaccaagaagcagcuccgcgagaacgccgaggacaugggcaacggcugcuucaagaucuaccacaagugcgacaacgccugcaucggcuccauccgcaacggcaccuacgaccacgacgucuaccgcgacgaggcccucaacaaccgcuuccagaucaagggcgucgagcucaaguccggcuacaaggacuggauccucuggaucuccuucgccaucuccugcuuccuccucugcgucgcccuccucggcuucaucaugugggccugccagaagggcaacauccgcugcaacaucugcaucuga

SEQ ID NO: 106974 - RNA, 1701 nt, Artificial Sequence; identical to SEQ ID NO: 106654
  derived and/or modified CDS sequence (opt2) from hemagglutinin__InfluenzaA__AHC62626

SEQ ID NO: 106975 - RNA, 1701 nt, Artificial Sequence; identical to SEQ ID NO: 103018
  derived and/or modified CDS sequence (opt2) from hemagglutinin__InfluenzaA__AHC62638

SEQ ID NO: 106976 - RNA, 1701 nt, Artificial Sequence; identical to SEQ ID NO: 106818
  derived and/or modified CDS sequence (opt2) from hemagglutinin__InfluenzaA__AHC62650

SEQ ID NO: 106977 - RNA, 1701 nt, Artificial Sequence
  derived and/or modified CDS sequence (opt2) from hemagglutinin__InfluenzaA__AHC62662
augaagaccaucaucgcccucuccuacauccucugccucgucuucgcccagaagcuccccggcaacgacaacuccaccgccacccucugccucggccaccacgccguccccaacggcaccaucgucaagaccaucaccaacgaccagaucgaggucaccaacgccaccgagcucguccaguccuccuccaccggcgagaucugcaacuccccccaccagauccucgacggcgagaacugcacccucaucgacgcccuccucggcgacccccagugcgacggcuuccagaacaagaagugggaccucuucgucgagcgcuccaaggcccacuccuccugcuaccccuacgacguccccgacuacgccucccuccgcucccucgucgccuccuccggcacccucgaguucaacaacgaguccuucaacuggaccggcgucacccagaacggcaccuccuccgccugcauccgcggcuccaacaacuccuucuucucccgccucaacuggcucacccaccucaacuucaaguaccccgcccucaacgucaccaugcccaacaacgagcaguucgacaagcucuacaucuggggcguccaccaccccggcaccgacaaggaccagaucuuccucuacgcccaggccuccggccgcaucaccgucuccaccaagcgcucccagcaggccgucauccccaacaucggcucccgcccccgcguccgcaacauccccucccgcgucuccaucuacuggaccaucgucaagcccggcgacauccuccucaucaacuccaccggcaaccucaucgccccccgcggcuacuucaagauccgcuccggcaaguccuccaucaugcgcuccgacgcccccaucggcaagugcaacuccgccugcaucacccccaacggcuccauccccaacgacaagcccuuccagaacgucaaccgcaucaccuacggcgccugcccccgcuacgucaagcagaacacccucaagcucgccaccggcaugcgcaacguccccgagaagcagacccgcggcaucuucggcgccaucgccggcuucaucgagaacggcugggagggcauggucgacggcugguacggcuuccgccaccagaacuccgagggccgcggccaggccgccgaccucaaguccacccaggccgccaucgaccagaucaacggcaagcucaaccgccucaucggcaagaccaacgagaaguuccaccagaucgagaaggaguucuccgaggucgagggccgcauccaggaccucgagaaguacgucgaggacaccaagaucgaccucugguccuacaacgccgagcuccucgucgcccucgagaaccagcacaccaucgaccucaccgacuccgagaugaacaagcucuucgagaagaccaagaagcagcuccgcgagaacgccgaggacaugggcaacggcugcuucaagaucuaccacaagugcgacaacgccugcaucggcuccauccgcaacggcaccuacgaccacgacgucuaccgcgacgaggcccucaacaaccgcuuccagaucaagggcgucgagcucaaguccggcuacaaggacuggauccucuggaucuccuucgccaucuccugcuuccuccucugcgucgcccuccucggcuucaucaugugggccugccagaagggcaacauccgcugcaacaucugcaucuga

SEQ ID NO: 106978 - RNA, 1701 nt, Artificial Sequence
  derived and/or modified CDS sequence (opt2) from hemagglutinin__InfluenzaA__AHC62674
augaagaccaucaucgcccucuccuacauccucugccucgucuucgcccagaagcuccccggcaacgacaacuccaccgccacccucugccucggccaccacgccguccccaacggcaccaucgucaagaccaucaccaacgaccagaucgaggucaccaacgccaccgagcucguccaguccuccuccaccggcgagaucugcaacuccccccaccagauccucgacggcgagaacugcacccucaucgacgcccuccucggcgacccccagugcgacggcuuccagaacaagaagugggaccucuucgucgagcgcuccaaggcccacuccaacugcuaccccuacgacguccccgacuacgccucccuccgcucccucaucgccuccuccggcacccucgaguucaacaacgaguccuucaacuggaccggcgucacccagaacggcaccuccuccgccugcauccgcggcuccaacaacuccuucuucucccgccucaacuggcucacccaccucaacuucaaguaccccgcccucaacgucaccaugcccaacaacgagcaguucgacaagcucuacaucuggggcguccaccaccccggcaccgacaaggaccagaucuuccucuacgcccaggccuccggccgcaucaccgucuccaccaagcgcucccagcaggccgucauccccaacaucggcucccgcccccgcguccgcaacauccccucccgcgucuccaucuacuggaccaucgucaagcccggcgacauccuccucaucaacuccaccggcaaccucaucgccccccgcggcuacuucaagauccgcuccggcaaguccuccaucaugcgcuccgacgcccccaucggcaagugcaacuccgccugcaucacccccaacggcuccauccccaacgacaagcccuuccagaacgucaaccgcaucaccuacggcgccugcccccgcuacgucaagcagaacacccucaagcucgccaccggcaugcgcaacguccccgagaagcagacccgcggcaucuucggcgccaucgccggcuucaucgagaacggcugggagggcauggucgacggcugguacggcuuccgccaccagaacuccgagggccgcggccaggccgccgaccucaaguccacccaggccgccaucgaccagaucaacggcaagcucaaccgccucaucggcaagaccaacgagaaguuccaccagaucgagaaggaguucuccgaggucgagggccgcauccaggaccucgagaaguacgucgaggacaccaagaucgaccucugguccuacaacgccgagcuccucgucgcccucgagaaccagcacaccaucgaccucaccgacuccgagaugaacaagcucuucgagaagaccaagaagcagcuccgcgagaacgccgaggacaugggcaacggcugcuucaagaucuaccacaagugcgacaacaccugcaucgaguccauccgcaacggcaccuacgaccacgacgucuaccgcgacgaggcccucaacaaccgcuuccagaucaagggcgucgagcucaaguccggcuacaaggacuggauccucuggaucuccuucgccaucuccugcuuccuccucugcgucgcccuccucggcuucaucaugugggccugccagaagggcaacauccgcugcaacaucugcaucuga

SEQ ID NO: 106979 - RNA, 1701 nt, Artificial Sequence; identical to SEQ ID NO: 106096
  derived and/or modified CDS sequence (opt2) from hemagglutinin__InfluenzaA__AHE37972

SEQ ID NO: 106980 - RNA, 1701 nt, Artificial Sequence
  derived and/or modified CDS sequence (opt2) from hemagglutinin__InfluenzaA__AHE37973
augaaggccauccucgucguccuccucuacaccuucgccaccgccaacgccgacacccucugcaucggcuaccacgccaacaacuccaccgacaccgucgacaccguccucgagaagaacgucaccgucacccacuccgucaaccuccucgaggacaagcacaacggcaagcucugcaagcuccgcggcgucgccccccuccaccucggcaagugcaacaucgccggcuggauccucggcaaccccgagugcgagucccucuccaccgccuccuccugguccuacaucgucgagaccuccuccuccgacaacggcaccugcuaccccggcgacuucaucaacuacgaggagcuccgcgagcagcucuccuccgucuccuccuucgagcgcuucgagaucuuccccaagaccuccuccuggcccaaccacgacuccaacaagggcgucaccgccgccugcccccacgccggcaccaaguccuucuacaagaaccucaucuggcucgucaagaagggcaacuccuaccccaagcucuccaaguccuacaucaacgacaagggcaaggagguccucguccucuggggcauccaccaccccuccaccaccgccgaccagcagucccucuaccagaacgccgacgccuacgucuucgucggcaccucccgcuacuccaagaaguucaagcccgagaucgccauccgccccaagguccgcgaccaggagggccgcaucaacuacuacuggacccucaucgagcccggcgacaagaucaccuucgaggccaccggcaaccucgucgucccccgcuacgccuucgccauggagcgcaacgccggcuccggcaucaucaucuccgacacccccguccacgacugcaacaccaccugccagacccccgagggcgccaucaacaccucccuccccuuccagaacauccaccccaucaccaucggcaagugccccaaguacgucaaguccaccaagcuccgccucgccaccggccuccgcaacguccccuccauccagucccgcggccucuucggcgccaucgccggcuucaucgagggcggcuggaccggcauggucgacggcugguacggcuaccaccaccagaacgagcagggcuccggcuacgccgccgaccucaaguccacccagaacgccaucgacaagaucaccaacaaggucaacuccgucaucgagaagaugaacacccaguucaccgccgucggcaaggaguucaaccaccucgagaagcgcaucgagaaccucaacaagaaggucgacgacggcuuccucgacaucuggaccuacaacgccgagcuccucguccuccucgagaacgagcgcacccucgacuaccacgacuccaacgucaagaaccucuacgagaagguccgcaaccagcucaagaacaacgccaaggagaucggcaacggcugcuucgaguucuaccacaagugcgacaacaccugcauggaguccgucaagaacggcaccuacgacuaccccaaguacuccgaggaggccaagcucaaccgcgagaagaucgacggcgucaagcucgaguccacccgcaucuaccagauccucgccaucuacuccaccgucgccuccucccucguccucgucgucucccucggcgccaucuccuucuggaugugcuccaacggcucccuccagugccgcaucugcaucuga

SEQ ID NO: 106981 - RNA, 1701 nt, Artificial Sequence
  derived and/or modified CDS sequence (opt2) from hemagglutinin__InfluenzaA__AHE37974
augaaggccauccucgucguccuccucuacaccuucgccaccgccaacgccgacacccucugcaucggcuaccacgccaacaacuccaccgacaccgucgacaccguccucgagaagaacgucaccgucacccacuccgucaaccuccucgaggacaagcacaacggcaagcucugcaagcuccgcggcgucgccccccuccaccucggcaagugcaacaucgccggcuggauccucggcaaccccgagugcgagucccucuccaccgccuccuccugguccuacaucgucgagaccuccuccuccgacaacggcaccugcuaccccggcgacuucaucaacuacgaggagcuccgcgagcagcucuccuccgucuccuccuucgagcgcuucgagauguuccccaagaccuccuccuggcccaaccacgacuccaacaagggcgucaccgccgccugcccccacgccggcgccaaguccuucuacaagaaccucaucuggcucgucaagaagggcaacuccuaccccaagcucuccaaguccuacaucaacgacaagggcaaggagguccucguccucuggggcauccaccaccccuccaccaccgccgaccagcagucccucuaccagaacgccgacgccuacgucuucgucggcaccuccaaguacuccaagaaguucaagcccgagaucgccauccgccccaagguccgcgaccaggagggccgcaugaacuacuacuggacccucaucgagcccggcgacaagaucaccuucgaggccaccggcaaccucgucgucccccgcuacgccuucgccauggagcgcaacgccggcuccggcaucaucaucuccgacacccccguccacgacugcaacaccaccugccagacccccgagggcgccaucaacaccucccuccccuuccagaacauccaccccaucaccaucggcaagugccccaaguacgucaaguccaccaagcuccgccucgccaccggccuccgcaacguccccuccauccagucccgcggccucuucggcgccaucgccggcuucaucgagggcggcuggaccggcauggucgacggcugguacggcuaccaccaccagaacgagcagggcuccggcuacgccgccgaccucaaguccacccagaacgccaucgacaagaucaccaacaaggucaacuccgucaucgagaagaugaacacccaguucaccgccgucggcaaggaguucaaccaccucgagaagcgcaucgagaaccucaacaagaaggucgacgacggcuuccucgacaucuggaccuacaacgccgagcuccucguccuccucgagaacgagcgcacccucgacuaccacgacuccaacgucaagaaccucuacgagaagguccgcaaccagcucaagaacaacgccaaggagaucggcaacggcugcuucgaguucuaccacaagugcgacaacaccugcauggaguccgucaagaacggcaccuacgacuaccccaaguacuccgaggaggccaagcucaaccgcgagaagaucgacggcgucaagcucgaguccacccgcaucuaccagauccucgccaucuacuccaccgucgccuccucccucguccucgucgucucccucggcgccaucuccuucuggaugugcuccaacggcucccuccagugccgcaucugcaucuga

SEQ ID NO: 106982 - RNA, 1701 nt, Artificial Sequence; identical to SEQ ID NO: 106076
  derived and/or modified CDS sequence (opt2) from hemagglutinin__InfluenzaA__AHE37975

SEQ ID NO: 106983 - RNA, 1701 nt, Artificial Sequence
  derived and/or modified CDS sequence (opt2) from hemagglutinin__InfluenzaA__AHE37976
augaaggccauccucgucguccuccucuacaccuucgccaccgccaacgccgacacccucugcaucggcuaccacgccaacaacuccaccgacaccgucgacaccguccucgagaagaacgucaccgucacccacuccgucaaccuccucgaggacaagcacaacggcaagcucugcaagcuccgcggcgucgccccccuccaccucggcaagugcaacaucgccggcuggauccucggcaaccccgagugcgagucccucuccgccgccuccuccugguccuacaucgucgagaccuccuccuccaacaacggcaccugcuaccccggcgacuucaucaacuacgaggagcuccgcgagcagcucuccuccgucuccuccuucgagcgcuucgagaucuuccccaagaccuccuccuggcccaaccacgacuccaacaagggcgucaccgccgccugcccccacgccggcgccaaguccuucuacaagaaccucaucuggcucgucaagaagggcaacuccuaccccaagcucuccaaguccuacaucaacgacaagggcaaggagauccucguccucuggggcauccaccaccccuccaccaccaccgaccagcagucccucuaccagaacgccgacgccuacgucuucgucggcaccucccgcuacuccaagaaguucaagcccgagaucgccauccgccccaagguccgcgaccaggagggccgcaugaacuacuacuggacccucaucgagcccggcgacaagaucaccuucgaggccaccggcaaccucgucgucccccgcuacgccuucgccauggagcgcaacgccggcuccggcaucaucaucuccgacacccccguccacgacugcaacaccaccugccagacccccgagggcgccaucaacaccucccuccccuuccagaacauccaccccaucaccaucggcaagugccccaaguacgucaaguccaccaagcuccgccucgccaccggccuccgcaacguccccuccauccagucccgcggccucuucggcgccaucgccggcuucaucgagggcggcuggaccggcauggucgacggcugguacggcuaccaccaccagaacgagcagggcuccggcuacgccgccgaccucaaguccacccagaacgccaucgacaagaucaccaacaaggucaacuccgucaucgagaagaugaacacccaguucaccgccgucggcaaggaguucaaccaccucgagaagcgcaucgagaaccucaacaagaaggucgacgacggcuuccucgacaucuggaccuacaacgccgagcuccucguccuccucgagaacgagcgcacccucgacuaccacgacuccaacgucaagaaccucuacgagaagguccgcaaccagcucaagaacaacgccaaggagaucggcaacggcugcuucgaguucuaccacaagugcgacaacaccugcauggaguccgucaagaacggcaccuacgacuaccccaaguacuccgaggaggccaagcucaaccgcggcaagaucgacggcgucaagcucgaguccacccgcaucuaccagauccucgccaucuacuccaccgucgccuccucccucguccucgucgucucccucggcgccaucuccuucuggaugugcuccaacggcucccuccagugccgcaucugcaucuga

SEQ ID NO: 106984 - RNA, 1701 nt, Artificial Sequence; identical to SEQ ID NO: 106076
  derived and/or modified CDS sequence (opt2) from hemagglutinin__InfluenzaA__AHE37977

SEQ ID NO: 106985 - RNA, 1701 nt, Artificial Sequence; identical to SEQ ID NO: 106096
  derived and/or modified CDS sequence (opt2) from hemagglutinin__InfluenzaA__AHE37978

SEQ ID NO: 106986 - RNA, 1701 nt, Artificial Sequence; identical to SEQ ID NO: 106076
  derived and/or modified CDS sequence (opt2) from hemagglutinin__InfluenzaA__AHE37979

SEQ ID NO: 106987 - RNA, 1701 nt, Artificial Sequence
  derived and/or modified CDS sequence (opt2) from hemagglutinin__InfluenzaA__AHE37980
augaaggccauccucgucguccuccucuacaccuucgccaccgccaacgccgacacccucugcaucggcuaccacgccaacaacuccaccgacaccgucgacaccguccucgagaagaacgucaccgucacccacuccgucaaccuccucgaggacaagcacaacggcaagcucugcaagcuccgcggcgucaccccccuccaccucggcaagugcaacaucgccggcuggauccucggcaaccccgagugcgagucccucuccaccgccuccuccugguccuacaucgucgagaccuccuccuccgacaacggcaccugcuaccccggcgacuucaucaacuacgaggagcuccgcgagcagcucuccuccgucuccuccuucgagcgcuucgagaucuuccccaagaccuccuccuggcccaaccacgacuccaacaagggcgucaccgccgccugcccccacgccggcgccaaguccuucuacaagaaccucaucuggcucgucaagaagggcaacuccuaccccaagcucuccaaguccuacaucaacgacaagggcaaggagguccucguccucuggggcauccaccaccccuccaccaccgccgaccagcagucccucuaccagaacgccgacgccuacgucuucgucggcaccucccgcuacuccaagaaguucaagcccgagaucgccauccgccccaagguccgcgaccaggagggccgcaugaacuacuacuggacccucaucgagcccggcgacaagaucaccuucgaggccaccggcaaccucgucgucccccgcuacgccuucgccauggagcgcaacgccggcuccggcaucaucaucuccgacacccccguccacgacugcaacaccaccugccagacccccgagggcgccaucaacaccucccuccccuuccagaacauccaccccaucaccaucggcaagugccccaaguacgucaaguccaccaagcuccgccucgccaccggccuccgcaacguccccuccauccagucccgcggccucuucggcgccaucgccggcuucaucgagggcggcuggaccggcauggucgacggcugguacggcuaccaccaccagaacgagcagggcuccggcuacgccgccgaccucaaguccacccagaacgccaucgacaagaucaccaacaaggucaacuccgucaucgagaagaugaacacccaguucaccgccgucggcaaggaguucaaccaccucgagaagcgcaucgagaaccucaacaagaaggucgacgacggcuuccucgacaucuggaccuacaacgccgagcuccucguccuccucgagaacgagcgcacccucgacuaccacgacuccaacgucaagaaccucuacgagaagguccgcaaccagcucaagaacaacgccaaggagaucggcaacggcugcuucgaguucuaccacaagugcgacaacaccugcauggaguccgucaagaacggcaccuacgacuaccccaaguacuccgaggaggccaagcucaaccgcgagaagaucgacggcgucaagcucgaguccacccgcaucuaccagauccucgccaucuacuccaccgucgccuccucccucguccucgucgucucccucggcgccaucuccuucuggaugugcuccaacggcucccuccagugccgcaucugcaucuga

SEQ ID NO: 106988 - RNA, 1701 nt, Artificial Sequence
  derived and/or modified CDS sequence (opt2) from hemagglutinin__InfluenzaA__AHE37981
augaaggccauccucgucguccuccucuacaccuucgccaccgccaacgccgacacccucugcaucggcuaccacgccaacaacuccaccgacaccgucgacaccguccucgagaagaacgucaccgucacccacuccgucaaccuccucgaggacaagcacaacggcaagcucugcaagcuccgcggcgucgccccccuccaccucggcaagugcaacaucgccggcuggauccucggcaaccccgagugcgagucccucuccaccgccuccuccugguccuacaucgucgagaccuccuccuccgacaacggcaccugcuaccccggcgacuucaucaacuacgaggagcuccgcgagcagcucuccuccgucuccuccuucgagcgcuucgagauguuccccaagaccuccuccuggcccaaccacgacuccaacaagggcgucaccgccgccugcccccacgccggcgccaaguccuucuacaagaaccucaucuggcucgucaagaagggcaacuccuaccccaagcucuccaaguccuacaucaacgacaagggcaaggagguccucguccucuggggcauccaccaccccuccaccaccgccgaccagcagucccucuaccagaacgccgacgccuacgucuucgucggcaccuccaaguacuccaagaaguucaagcccgagaucgccauccgccccaagguccgcgaccaggagggccgcaugaacuacuacuggacccucaucgagcccggcgacaagaucaccuucgaggccaccggcaaccucgucgucccccgcuacgccuucgccauggagcgcaacgccggcuccggcaucaucaucuccgacacccccguccacgacugcaacaccaccugccagacccccgagggcgccaucaacaccucccuccccuuccagaacauccaccccaucaccaucggcaagugccccaaguacgucaaguccaccaagcuccgccucgccaccggccuccgcaacguccccuccauccagucccgcggccucuucggcgccaucgccggcuucaucgagggcggcuggaccggcauggucgacggcugguacggcuaccaccaccagaacgagcagggcuccggcuacgccgccgaccucaaguccacccagaacgccaucgacaagaucaccaacaaggucaacuccgucaucgagaagaugaacauccaguucaccgccgucggcaaggaguucaaccaccucgagaagcgcaucgagaaccucaacaagaaggucgacgacggcuuccucgacaucuggaccuacaacgccgagcuccucguccuccucgagaacgagcgcacccucgacuaccacgacuccaacgucaagaaccucuacgagaagguccgcaaccagcucaagaacaacgccaaggagaucggcaacggcugcuucgaguucuaccacaagugcgacaacaccugcauggaguccgucaagaacggcaccuacgacuaccccaaguacuccgaggaggccaagcucaaccgcgagaagaucgacggcgucaagcucgaguccacccgcaucuaccagauccucgccaucuacuccaccgucgccuccucccucguccucgucgucucccucggcgccaucuccuucuggaugugcuccaacggcucccuccagugccgcaucugcaucuga

SEQ ID NO: 106989 - RNA, 1701 nt, Artificial Sequence; identical to SEQ ID NO: 106076
  derived and/or modified CDS sequence (opt2) from hemagglutinin__InfluenzaA__AHE37982

SEQ ID NO: 106990 - RNA, 1701 nt, Artificial Sequence
  derived and/or modified CDS sequence (opt2) from hemagglutinin__InfluenzaA__AHE37983
augaaggccauccucgucguccuccucuacaccuucgccaccgccaacgccgacacccucugcaucggcuaccacgccaacaacuccaccgacaccgucgacaccguccucgagaagaacgucaccgucacccacuccgucaaccuccucgaggacaagcacaacggcaagcucugcaagcuccgcggcgucgccccccuccaccucggcaagugcaacaucgccggcuggauccucggcaaccccgagugcgagucccucuccaccgccuccuccugguccuacaucgucgagaccuccuccuccgacaacggcaccugcuaccccggcgacuucaucaacuacgaggagcuccgcgagcagcucuccuccgucuccuccuucgagcgcuucgagaucuuccccaagaccuccuccuggcccaaccacgacuccaacaagggcgucaccgccgccugcccccacgccggcgccaaguccuucuacaagaaccucaucuggcucgucaagaagggcaacuccuaccccaagcucuccgaguccuacaucaacgacaagggcaaggagguccucguccucuggggcauccaccaccccuccaccaccgccgaccagcagucccucuaccagaacgccgacgccuacgucuucgucggcaccucccgcuacuccaagaaguucaagcccgagaucgccauccgccccaagguccgcgaccaggagggccgcaugaacuacuacuggacccucaucgagcccggcgacaagaucaccuucgaggccaccggcaaccucgucgucccccgcuacgccuucgccauggagcgcaacgccggcuccggcaucaucaucuccgacacccccguccacgacugcaacaccaccugccagacccccgagggcgccaucaacaccucccuccccuuccagaacauccaccccaucaccaucggcaagugccccaaguacgucaaguccaccaagcuccgccucgccaccggccuccgcaacguccccuccauccagucccgcggccucuucggcgccaucgccggcuucaucgagggcggcuggaccggcauggucgacggcugguacggcuaccaccaccagaacgagcagggcuccggcuacgccgccgaccucaaguccacccagaacgccaucgacaagaucaccaacaaggucaacuccgucaucgagaagaugaacacccaguucaccgccgucggcaaggaguucaaccaccucgagaagcgcaucgagaaccucaacaagaaggucgacgacggcuuccucgacaucuggaccuacaacgccgagcuccucguccuccucgagaacgagcgcacccucgacuaccacgacuccaacgucaagaaccucuacgagaagguccgcaaccagcucaagaacaacgccaaggagaucggcaacggcugcuucgaguucuaccacaagugcgacaacaccugcauggaguccgucaagaacggcaccuacgacuaccccaaguacuccgaggaggccaagcucaaccgcgagaagaucgacggcgucaagcucgaguccacccgcaucuaccagauccucgccaucuacuccaccgucgccuccucccucguccucgucgucucccucggcgccaucuccuucuggaugugcuccaacggcucccuccagugccgcaucugcaucuga

SEQ ID NO: 106991 - RNA, 1701 nt, Artificial Sequence
  derived and/or modified CDS sequence (opt2) from hemagglutinin__InfluenzaA__AHE37984
auggaggccauccucgucguccuccucuacaccuucgccaccgccaacgccgacacccucugcaucggcuaccacgccaacaacuccaccgacaccgucgacaccguccucgagaagaacgucaccgucacccacuccgucaaccuccucgaggacaagcacaacggcaagcucugcaagcuccgcggcgucgccccccuccaccucggcaagugcaacaucgccggcuggauccucggcaaccccgagugcgagucccucuccaccgccuccuccugguccuacaucgucgagaccuccuccuccgacaacggcaccugcuaccccggcgacuucaucaacuacgaggagcuccgcgagcagcucuccuccgucuccuccuucgagcgcuucgagaucuuccccaagaccuccuccuggcccaaccacgacuccaacaagggcgucaccgccgccugcccccacgccggcgccaaguccuucuacaagaaccucaucuggcucgucaagaagggcaacuccuaccccaagcucuccaaguccuacaucaacgacaagggcaaggagguccucguccucuggggcauccaccaccccuccaccaccgccgaccagcagucccucuaccagaacgccgacgccuacgucuucgucggcaccucccgcuacuccaagaaguucaagcccgagaucgccauccgccccaagguccgcgaccaggagggccgcaugaacuacuacuggacccucaucgagcccggcgacaagaucaccuucgaggccaccggcaaccucgucgucccccgcuacgccuucgccauggagcgcaacgccggcuccggcaucaucaucuccgacacccccguccacgacugcaacaccaccugccagacccccgagggcgccaucaacaccucccuccccuuccagaacauccaccccaucaccaucggcaagugccccaaguacgucaaguccaccaagcuccgccucgccaccggccuccgcaacguccccuccauccagucccgcggccucuucggcgccaucgccggcuucaucgagggcggcuggaccggcauggucgacggcugguacggcuaccaccaccagaacgagcagggcuccggcuacgccgccgaccucaaguccacccagaacgccaucgacaagaucaccaacaaggucaacuccgucaucgagaagaugaacacccaguucaccgccgucggcaaggaguucaaccaccucgagaagcgcaucgagaaccucaacaagaaggucgacgacggcuuccucgacaucuggaccuacaacgccgagcuccucguccuccucgagaacgagcgcacccucgacuaccacgacuccaacgucaagaaccucuacgagaagguccgcaaccagcucaagaacaacgccaaggagaucggcaacggcugcuucgaguucuaccacaagugcgacaacaccugcauggaguccgucaagaacggcaccuacgacuaccccaaguacuccgaggaggccaagcucaaccgcgagaagaucgacggcgucaagcucgaguccacccgcaucuaccagauccucgccaucuacuccaccgucgccuccucccucguccucgucgucucccucggcgccaucuccuucuggaugugcuccaacggcucccuccagugccgcaucugcaucuga

SEQ ID NO: 106992 - RNA, 1701 nt, Artificial Sequence
  derived and/or modified CDS sequence (opt2) from hemagglutinin__InfluenzaA__AHE37985
augaagaccaucaucgcccucuccuacauccucugccucgucuucgcccaggagcuccccggcaacgacgacuccaccgccacccucugccucggccaccacgccguccccaacggcaccaucgucaagaccaucaccaacgaccagaucgaggucaccaacgccaccgagcucguccaguccuccuccaccggcgagaucugcaacuccccccaccagauccucgacggcgagaacugcacccucaucgacgcccuccucggcgacccccagugcgacggcuuccagaacaagaagugggaccucuucgucgagcgcuccaaggcccacuccaacugcuaccccuacgacguccccgacuacgccucccuccgcucccucgucgccuccuccggcacccucgaguucaacaacgaguccuucaacuggaccggcgucacccagaacggcaccuccuccgccugcauccgccgcuccaacaacuccuucuucucccgccucaacuggcucacccaccucaacuucaaguaccccgcccucaacgucaccaugcccaacaacgagcaguucgacaagcucuacaucuggggcguccaccaccccggcaccgacaaggaccagaucuuccucuacgcccaggccuccggccgcaucaccgucuccaccaagcgcucccagcaggccgucauccccaacaucggcucccgcccccgcguccgcaacauccccucccgcgucuccaucuacuggaccaucgucaagcccggcgacauccuccucaucaacuccaccggcaaccucaucgccccccgcggcuacuucaagauccgcuccggcaaguccuccaucaugaaguccgacgcccccaucggcaagugcaacuccgccugcaucacccccaacggcuccauccccaacgacaagcccuuccagaacgucaaccgcaucaccuacggcgccugcccccgcuacgucaagcagaacacccucaagcucgccaccggcaugcgcaacguccccgagaagcagacccgcggcaucuucggcgccaucgccggcuucaucgagaacggcugggagggcauggucgacggcugguacggcuuccgccaccagaacuccgagggccgcggccaggccgccgaccucaaguccacccaggccgccaucgaccagaucaacggcaagcucaaccgccucaucggcaagaccaacgagaaguuccaccagaucgagaaggaguucuccgaggucgagggccgcauccaggaccucgagaaguacgucgaggacaccaagaucgaccucugguccuacaacgccgagcuccucgucgcccucgagaaccagcacaccaucgaccucaccgacuccgagaugaacaagcucuucgagaagaccaagaagcagcuccgcgagaacgccgaggacaugggcaacggcugcuucaagaucuaccacaagugcgacaacgccugcaucggcuccauccgcaacggcaccuacgaccacgacgucuaccgcgacgaggcccucaacaaccgcuuccagaucaagggcgucgagcucaaguccggcuacaaggacuggauccucuggaucuccuucgccaucuccugcuuccuccucugcgucgcccuccucggcuucaucaugugggccugccagaagggcaacauccgcugcaacaucugcaucuga

SEQ ID NO: 106993 - RNA, 1701 nt, Artificial Sequence; identical to SEQ ID NO: 105958
  derived and/or modified CDS sequence (opt2) from hemagglutinin__InfluenzaA__AHE37986

SEQ ID NO: 106994 - RNA, 1701 nt, Artificial Sequence; identical to SEQ ID NO: 105894
  derived and/or modified CDS sequence (opt2) from hemagglutinin__InfluenzaA__AHE37987

SEQ ID NO: 106995 - RNA, 1701 nt, Artificial Sequence
  derived and/or modified CDS sequence (opt2) from hemagglutinin__InfluenzaA__AHE37988
augaagaccaucaucgcccucuccuacauccucugccucgucuucgcccagaagcuccccggcaacgacaacuccaccgccacccucugccucggccaccacgccguccccaacggcaccaucgucaagaccaucaccaacgaccgcaucgaggucaccaacgccaccgagcucguccagaacuccuccaucggcgagaucugcgacuccccccaccagauccucgacggcgagaacugcacccucaucgacgcccuccucggcgacccccagugcgacggcuuccagaacaagaagugggaccucuucgucgagcgcuccaaggccuacuccaacugcuaccccuacgacguccccgacuacgccucccuccgcucccucgucgccuccuccggcacccucgaguucaacaacgaguccuucaacuggaccggcgucacccagaacggcaccuccuccgccugcauccgccgcuccaacuccuccuucuucucccgccucaacuggcucacccaccucaacuucaaguaccccgcccucaacgucaccaugcccaacaacgagcaguucgacaagcucuacaucuggggcguccaccaccccggcaccgacaaggaccagaucuuccucuacgcccaguccuccggccgcaucaccgucuccaccaagcgcucccagcaggccgucauccccaacaucggcucccgcccccgcauccgcaacauccccucccgcaucuccaucuacuggaccaucgucaagcccggcgacauccuccucaucaacuccaccggcaaccucaucgccccccgcggcuacuucaagauccgcuccggcaaguccuccaucaugcgcuccgacgcccccaucggcaagugcaaguccgagugcaucacccccaacggcuccauccccaacgacaagcccuuccagaacgucaaccgcaucaccuacggcgccugcccccgcuacgucaagcaguccacccucaagcucgccaccggcaugcgcaacguccccgagaagcagacccgcggcaucuucggcgccaucgccggcuucaucgagaacggcugggagggcaugauggacggcugguacggcuuccgccaccagaacuccgagggccgcggccaggccgccgaccucaaguccacccaggccgccaucgaccagaucaacggcaagcucaaccgccucaucggcaagaccaacgagaaguuccaccagaucgagaaggaguucuccgaggucgagggccgcauccagaaccucgagaaguacgucgaggacaccaagaucgaccucugguccuacaacgccgagcuccucgucgcccucgagaaccagcacaccaucgaccucaccgacuccgagaugaacaagcucuucgagaagaccaagaagcagcuccgcgagaacgccgaggacaugggcaacggcugcuucaagaucuaccacaagugcgacaacgccugcaucggcuccauccgcaacggcaccuacgaccacaacgucuaccgcgacgaggcccucaacaaccgcuuccagaucaagggcgucgagcucaaguccggcuacaaggacuggauccucuggaucuccuucgccaucuccugcuuccuccucugcgucgcccuccucggcuucaucaugugggccugccagaagggcaacauccgcugcaacaucugcaucuga

SEQ ID NO: 106996 - RNA, 1701 nt, Artificial Sequence; identical to SEQ ID NO: 106030
  derived and/or modified CDS sequence (opt2) from hemagglutinin__InfluenzaA__AHE37989

SEQ ID NO: 106997 - RNA, 1701 nt, Artificial Sequence; identical to SEQ ID NO: 105894
  derived and/or modified CDS sequence (opt2) from hemagglutinin__InfluenzaA__AHE37990

SEQ ID NO: 106998 - RNA, 1701 nt, Artificial Sequence; identical to SEQ ID NO: 105894
  derived and/or modified CDS sequence (opt2) from hemagglutinin__InfluenzaA__AHE37991

SEQ ID NO: 106999 - RNA, 1701 nt, Artificial Sequence
  derived and/or modified CDS sequence (opt2) from hemagglutinin__InfluenzaA__AHE37992
augaagaccaucaucgcccucuccuacauccucugccucgucuucgcccaggagcuccccggcaacgacgacuccaccgccacccucugccucggccaccacgccguccccaacggcaccaucgucaagaccaucaccaacgaccagaucgaggucaccaacgccaccgagcucguccaguccuccuccaccggcgagaucugcaacuccccccaccagauccucgacggcgagaacugcacccucaucgacgcccuccucggcgacccccagugcgacggcuuccagaacaagaagugggaccucuucgucgagcgcuccaaggcccacuccaacugcuaccccuacgacguccccgacuacgccucccuccgcucccucgucgccuccuccggcacccucgaguucgacaacgaguccuucaacuggaccggcgucacccagaacggcaccuccuccgccugcauccgccgcuccaacaacuccuucuucucccgccucaacuggcucacccaccucaacuucaaguaccccgcccucaacgucaccaugcccaacaacgagcaguucgacaagcucuacaucuggggcguccaccaccccggcaccgacaaggaccagaucuuccucuacgcccaggccuccggccgcaucaccgucuccaccaagcgcucccagcaggccgucauccccaacaucggcucccgcccccgcguccgcaacauccccucccgcgucuccaucuacuggaccaucgucaagcccggcgacauccuccucaucaacuccaccggcaaccucaucgccccccgcggcuacuucaagauccgcuccggcaaguccuccaucaugcgcuccgacgcccccaucggcaagugcaacuccgccugcaucacccccaacggcuccauccccaacgacaagcccuuccagaacgucaaccgcaucaccuacggcgccugcccccgcuacgucaagcagaacacccucaagcucgccaccggcaugcgcaacguccccgagaagcagacccgcggcaucuucggcgccaucgccggcuucaucgagaacggcugggagggcauggucgacggcugguacggcuuccgccaccagaacuccgagggccgcggccaggccgccgaccucaaguccacccaggccgccaucgaccagaucaacggcaagcucaaccgccucaucggcaagaccaacgagaaguuccaccagaucgagaaggaguucuccgaggucgagggccgcauccaggaccucgagaaguacgucgaggacaccaagaucgaccucugguccuacaacgccgagcuccucgucgcccucgagaaccagcacaccaucgaccucaccgacuccgagaugaacaagcucuucgagaagaccaagaagcagcuccgcgagaacgccgaggacaugggcaacggcugcuucaagaucuaccacaagugcgacaacgccugcaucggcuccauccgcaacggcaccuacgaccacgacgucuaccgcgacgaggcccucaacaaccgcuuccagaucaagggcgucgagcucaaguccggcuacaaggacuggauccucuggaucuccuucgccaucuccugcuuccuccucugcgucgcccuccucggcuucaucaugugggccugccagaagggcaacauccgcugcaacaucugcaucuga

SEQ ID NO: 107000 - RNA, 1701 nt, Artificial Sequence; identical to SEQ ID NO: 106076
  derived and/or modified CDS sequence (opt2) from hemagglutinin__InfluenzaA__AHE38023

SEQ ID NO: 107001 - RNA, 1701 nt, Artificial Sequence
  derived and/or modified CDS sequence (opt2) from hemagglutinin__InfluenzaA__AHE38024
augaaggccauccucgucguccuccucuacaccuucgccaccgccaacgccgacacccucugcaucggcuaccacgccaacaacuccaccgacaccgucgacaccguccucgagaagaacgucaccgucacccacuccgucaaccuccucgaggacaagcacaacggcaagcucugcaagcuccgcggcgucgccccccuccaccucggcaagugcaacaucgccggcuggauccucggcaaccccgagugcgagucccucuccaccgccuccuccugguccuacaucgucgagaccuccuccuccgacaacggcaccugcuaccccggcgacuucaucaacuacgaggagcuccgcgagcagcucuccuccgucuccuccuucgagcgcuucgagaucuuccccaagaccuccuccuggcccaaccacgacuccaacaagggcgucaccgccgccugcccccacgccggcgccaaguccuucuacaagaaccucaucuggcucgucaagaagggcaacuccuaccccaagcucucccaguccuacaucaacgacaagggcaaggagguccucguccucuggggcauccaccaccccuccaccaccgccgaccagcagucccucuaccagaacgccgacgccuacgucuucgucggcaccucccgcuacuccaagaaguucaagcccgagaucgccacccgccccaagguccgcgaccaggagggccgcaugaacuacuacuggacccucgucgagcccggcgacaagaucaccuucgaggccaccggcaaccucgucgucccccgcuacgccuucaccauggagcgcaacgccggcuccggcaucaucaucuccgacacccccguccacgacugcaacaccaccugccagacccccgagggcgccaucaacaccucccuccccuuccagaacauccaccccaucaccaucggcaagugccccaaguacgucaaguccaccaagcuccgccucgccaccggccuccgcaacguccccuccauccagucccgcggccucuucggcgccaucgccggcuucaucgagggcggcuggaccggcauggucgacggcugguacggcuaccaccaccagaacgagcagggcuccggcuacgccgccgaccucaaguccacccagaacgccaucgacaagaucaccaacaaggucaacuccgucaucgagaagaugaacacccaguucaccgccgucggcaaggaguucaaccaccucgagaagcgcaucgagaaccucaacaagaaggucgacgacggcuuccucgacaucuggaccuacaacgccgagcuccucguccuccucgagaacgagcgcacccucgacuaccacgacuccaacgucaagaaccucuacgagaagguccgcaaccagcucaagaacaacgccaaggagaucggcaacggcugcuucgaguucuaccacaagugcgacaacaccugcauggaguccgucaagaacggcaccuacgacuaccccaaguacuccgaggaggccaagcucaaccgcgagaagaucgacggcgucaagcucgaguccacccgcaucuaccagauccucgccaucuacuccaccgucgccuccucccucguccucgucgucucccucggcgccaucuccuucuggaugugcuccaacggcucccuccagugccgcaucugcaucuga

SEQ ID NO: 107002 - RNA, 1701 nt, Artificial Sequence
  derived and/or modified CDS sequence (opt2) from hemagglutinin__InfluenzaA__AHE38026
augaaggccauccucgucguccuccucuacaccuucgccaccgccaacgccgacacccucugcaucggcuaccacgccaacaacuccaccgacaccgucgacaccguccucgagaagaacgucaccgucacccacuccgucaaccuccucgaggacaagcacaacggcaagcucugcaagcuccgcggcgucgccccccuccaccucggcaagugcaacaucgccggcuggauccucggcaaccccgagugcgagucccucuccaccgccuccuccugguccuacaucgucgagaccuccuccuccgacaacggcaccugcuaccccggcgacuucaucaacuacgaggagcuccgcgagcagcucuccuccgucuccuccuucgagcgcuucgagaucuuccccaagaccuccuccuggcccaaccacgacuccaacaagggcgucaccgccgccugcccccacgccggcgccaaguccuucuacaagaaccucaucuggcucgucaagaagggcaacuccuaccccaagcucucccaguccuacaucaacgagaagggcaaggagguccucguccucuggggcauccaccaccccuccaccaccgccgaccagcagucccucuaccagaacgccgacgccuacgucuucgucggcaccucccgcuacuccaagaaguucaagcccgagaucgccauccgccccaagguccgcgaccaggagggccgcaugaacuacuacuggacccucgucgagcccggcgacaagaucaccuucgaggccaccggcaaccucgucgucccccgcuacgccuucaccauggagcgcaacgccggcuccggcaucaucaucuccgacacccccguccacgacugcaacaccaccugccagacccccgagggcgccaucaacaccucccuccccuuccagaacauccaccccaucaccaucggcaagugccccaaguacgucaaguccaccaagcuccgccucgccaccggccuccgcaacguccccuccauccagucccgcggccucuucggcgccaucgccggcuucaucgagggcggcuggaccggcauggucgacggcugguacggcuaccaccaccagaacgagcagggcuccggcuacgccgccgaccucaaguccacccagaacgccaucgacaagaucaccaacaaggucaacuccgucaucgagaagaugaacacccaguucaccgccgucggcaaggaguucaaccaccucgagaagcgcaucgagaaccucaacaagaaggucgacgacggcuuccucgacaucuggaccuacaacgccgagcuccucguccuccucgagaacgagcgcacccucgacuaccacgacuccaacgucaagaaccucuacgagaagguccgcaaccagcucaagaacaacgccaaggagaucggcaacggcugcuucgaguucuaccacaagugcgacaacaccugcauggaguccgucaagaacggcaccuacgacuaccccaaguacuccgaggaggccaagcucaaccgcgagaagaucgacggcgucaagcucgaguccacccgcaucuaccagauccucgccaucuacuccaccgucgccuccucccucguccucgucgucucccucggcgccaucuccuucuggaugugcuccaacggcucccuccagugccgcaucugcaucuga

SEQ ID NO: 107003 - RNA, 1701 nt, Artificial Sequence; identical to SEQ ID NO: 105919
  derived and/or modified CDS sequence (opt2) from hemagglutinin__InfluenzaA__AHE38027

SEQ ID NO: 107004 - RNA, 1683 nt, Artificial Sequence
  derived and/or modified CDS sequence (opt2) from hemagglutinin__InfluenzaA__AHF20558
augaacacccagauccucgucuucgcccucaucgccaucauccccaccaacgccgacaagaucugccucggccaccacgccgucuccaacggcaccaaggucaacacccucaccgagcgcggcgucgaggucgucaacgccaccgagaccgucgagcgcaccaacaucccccgcaucugcuccaagggcaagcgcaccgucgaccucggccagugcggccuccucggcaccaucaccggccccccccagugcgaccaguuccucgaguucuccgccgaccucaucaucgagcgccgcgagggcuccgacgucugcuaccccggcaaguucgucaacgaggaggcccuccgccagauccuccgcgaguccggcggcaucgacaaggaggccaugggcuucaccuacuccggcauccgcaccaacggcgccaccuccgccugccgccgcuccggcuccuccuucuacgccgagaugaaguggcuccucuccaacaccgacaacgccgccuucccccagaugaccaaguccuacaagaacacccgcaagucccccgcccucaucgucuggggcauccaccacuccgucuccaccgccgagcagaccaagcucuacggcuccggcaacaagcucgucaccgucggcuccuccaacuaccagcaguccuucguccccucccccggcgcccgcccccaggucaacggccucuccggccgcaucgacuuccacuggcucaugcucaaccccaacgacaccgucaccuucuccuucaacggcgccuucaucgcccccgaccgcgccuccuuccuccgcggcaaguccaugggcauccaguccggcguccaggucgacgccaacugcgagggcgacugcuaccacuccggcggcaccaucaucuccaaccuccccuuccagaacaucgacucccgcgccgucggcaagugcccccgcuacgucaagcagcgcucccuccuccucgccaccggcaugaagaacguccccgagauccccaagggccgcggccucuucggcgccaucgccggcuucaucgagaacggcugggagggccucaucgacggcugguacggcuuccgccaccagaacgcccagggcgagggcaccgccgccgacuacaaguccacccaguccgccaucgaccagaucaccggcaagcucaaccgccucaucgagaagaccaaccagcaguucgagcucaucgacaacgaguucaacgaggucgagaagcagaucggcaacgucaucaacuggacccgcgacuccaucaccgaggucugguccuacaacgccgagcuccucgucgccauggagaaccagcacaccaucgaccucgccgacuccgagauggacaagcucuacgagcgcgucaagcgccagcuccgcgagaacgccgaggaggacggcaccggcugcuucgagaucuuccacaagugcgacgacgacugcauggccuccauccgcaacaacaccuacgaccacuccaaguaccgcgaggaggccaugcagaaccgcauccagaucgaccccgucaagcucuccuccggcuacaaggacgucauccucugguucuccuucggcgccuccugcuucauccuccucgccaucgucaugggccucgucuucaucugcguccagaacggcaacaugcgcugcaccaucggcaucuga

SEQ ID NO: 107005 - RNA, 1683 nt, Artificial Sequence
  derived and/or modified CDS sequence (opt2) from hemagglutinin__InfluenzaA__AHF20568
augaacacccagauccucgucuucgcccucaucgccaucauccccaccaacgccgacaagaucugccucggccaccacgccgucuccaacggcaccaaggucaacacccucaccgagcgcggcgucgaggucgucaacgccaccgagaccgucgagcgcaccaacaucccccgcaucugcuccaagggcaagcgcaccgucgaccucggccagugcggccuccucggcaccaucaccggccccccccagugcgaccaguuccucgaguucuccgccgaccucaucaucgagcgccgcgagggcuccgacgucugcuaccccggcaaguucgucaacgaggaggcccuccgccagauccuccgcgaguccggcggcaucgacaaggaggccaugggcuucaccuacuccggcauccgcaccaacggcgccaccuccgccugccgccgcuccggcuccuccuucuacgccgagaugaaguggcuccucuccaacaccgacaacgccgccuucccccagaugaccaaguccuacaagaacacccgcaagucccccgcccucaucgucuggggcauccaccacuccgucuccaccgccgagcagaccaagcucuacggcuccggcaacaagcucgucaccgucggcuccuccaacuaccagcaguccuucguccccucccccggcgcccgcccccaggucaacggccucuccggccgcaucgacuuccacuggcucaugcucaaccccaacgacaccgucaccuucuccuucaacggcgccuucaucgcccccgaccgcgccuccuuccuccgcggcaaguccaugggcauccaguccggcguccaggucgacgccaacugcgagggcgacugcuaccacuccggcggcaccaucauguccaaccuccccuuccagaacaucgacucccgcgccgucggcaagugcccccgcuacgucaagcagcgcucccuccuccucgccaccggcaugaagaacguccccgagauccccaagggccgcggccucuucggcgccaucgccggcuucaucgagaacggcugggagggccucaucgacggcugguacggcuuccgccaccagaacgcccagggcgagggcaccgccgccgacuacaaguccacccaguccgccaucgaccagaucaccggcaagcucaaccgccucaucgagaagaccaaccagcaguucgagcucaucgacaacgaguucaacgaggucgagaagcagaucggcaacgucaucaacuggacccgcgacuccaucaccgaggucugguccuacaacgccgagcuccucgucgccauggagaaccagcacaccaucgaccucgccgacuccgagauggacaagcucuacgagcgcgucaagcgccagcuccgcgagaacgccgaggaggacggcaccggcugcuucgagaucuuccacaagugcgacgacgacugcauggccuccauccgcaacaacaccuacgaccacuccaaguaccgcgaggaggccaugcagaaccgcauccagaucgaccccgucaagcucuccuccggcuacaaggacgucauccucugguucuccuucggcgccuccugcuucauccuccucgccaucgucaugggccucgucuucaucugcgucaagaacggcaacaugcgcugcaccaucugcaucuga

SEQ ID NO: 107006 - RNA, 1698 nt, Artificial Sequence; identical to SEQ ID NO: 103829
  derived and/or modified CDS sequence (opt2) from hemagglutinin__InfluenzaA__AHG96108

SEQ ID NO: 107007 - RNA, 1698 nt, Artificial Sequence; identical to SEQ ID NO: 103829
  derived and/or modified CDS sequence (opt2) from hemagglutinin__InfluenzaA__AHG96120

SEQ ID NO: 107008 - RNA, 1698 nt, Artificial Sequence; identical to SEQ ID NO: 103829
  derived and/or modified CDS sequence (opt2) from hemagglutinin__InfluenzaA__AHG96132

SEQ ID NO: 107009 - RNA, 1698 nt, Artificial Sequence
  derived and/or modified CDS sequence (opt2) from hemagglutinin__InfluenzaA__AHG96144
augaaggucaagcuccucguccuccucugcaccuucaccgccaccuacgccgacaccaucugcaucggcuaccacgccaacaacuccaccgacaccgucgacaccguccucgagaagaacgucaccgucacccacuccgucaaccuccucgagaacucccacaacggcaagcucugccuccucaagggcaucgccccccuccagcucggcaacugcuccgucgccggcuggauccucggcaaccccgagugcgagcuccucaucuccaaggaguccugguccuacaucgucgagaagcccaaccccgagaacggcaccugcuaccccggccacuucgccgacuacgaggagcuccgcgagcagcucuccuccgucuccuccuucgagcgcuucgagaucuuccccaaggaguccuccuggcccaaccacaccgucaccggcgucuccgccuccugcucccacaacggcgaguccuccuucuaccgcaaccuccucuggcucaccggcaagaacggccucuaccccaaccucuccaaguccuacgccaacaacaaggagaaggagguccucguccucuggggcguccaccacccccccaacaucggcguccagaaggcccucuaccacaccgagaacgccuacgucuccgucgucuccucccacuacucccgcaaguucacccccgagaucgccaagcgccccaagguccgcgaccaggagggccgcaucaacuacuacuggacccuccucgagcccggcgacaccaucaucuucgaggccaacggcaaccucaucgccccccgcuacgccuucgcccucucccgcggcuucggcuccggcaucaucaacuccaacgcccccauggacaagugcgacgccaagugccagaccccccagggcgccaucaacuccucccuccccuuccagaacguccaccccgucaccaucggcgagugccccaaguacguccgcuccgccaagcuccgcauggucaccggccuccgcaacauccccuccauccagucccgcggccucuucggcgccaucgccggcuucaucgagggcggcuggaccggcauggucgacggcugguacggcuaccaccaccagaacgagcagggcuccggcuacgccgccgaccagaaguccacccagaacgccaucaacggcaucaccaacaaggucaacuccgucaucgagaagaugaacacccaguucaccgccgucggcaaggaguucaacaagcucgagcgccgcauggagaaccucaacaagaaggucgacgacggcuucaucgacaucuggaccuacaacgccgagcuccucguccuccucgagaacgagcgcacccucgacuuccacgacuccaacgucaagaaccucuacgagaaggucaagucccagcucaagaacaacgccaaggagaucggcaacggcugcuucgaguucuaccacaagugcaacgacgagugcauggaguccgucaagaacggcaccuacgacuaccccaaguacuccgaggaguccaagcucaaccgcgagaagaucgacggcgucaagcucgaguccaugggcgucuaccagauccucgccaucuacuccaccgucgccuccucccucguccuccucgucucccucggcgccaucuccuucuggaugugcuccaacggcucccuccagugccgcaucugcaucuga

SEQ ID NO: 107010 - RNA, 1698 nt, Artificial Sequence; identical to SEQ ID NO: 103829
  derived and/or modified CDS sequence (opt2) from hemagglutinin__InfluenzaA__AHG96156

SEQ ID NO: 107011 - RNA, 1698 nt, Artificial Sequence; identical to SEQ ID NO: 103829
  derived and/or modified CDS sequence (opt2) from hemagglutinin__InfluenzaA__AHG96168

SEQ ID NO: 107012 - RNA, 1698 nt, Artificial Sequence; identical to SEQ ID NO: 103829
  derived and/or modified CDS sequence (opt2) from hemagglutinin__InfluenzaA__AHG96180

SEQ ID NO: 107013 - RNA, 1698 nt, Artificial Sequence; identical to SEQ ID NO: 103829
  derived and/or modified CDS sequence (opt2) from hemagglutinin__InfluenzaA__AHG96192

SEQ ID NO: 107014 - RNA, 1698 nt, Artificial Sequence; identical to SEQ ID NO: 103829
  derived and/or modified CDS sequence (opt2) from hemagglutinin__InfluenzaA__AHG96204

SEQ ID NO: 107015 - RNA, 1698 nt, Artificial Sequence; identical to SEQ ID NO: 103829
  derived and/or modified CDS sequence (opt2) from hemagglutinin__InfluenzaA__AHG96216

SEQ ID NO: 107016 - RNA, 1698 nt, Artificial Sequence; identical to SEQ ID NO: 103829
  derived and/or modified CDS sequence (opt2) from hemagglutinin__InfluenzaA__AHG96228

SEQ ID NO: 107017 - RNA, 1698 nt, Artificial Sequence; identical to SEQ ID NO: 107009
  derived and/or modified CDS sequence (opt2) from hemagglutinin__InfluenzaA__AHG96240

SEQ ID NO: 107018 - RNA, 1698 nt, Artificial Sequence; identical to SEQ ID NO: 103829
  derived and/or modified CDS sequence (opt2) from hemagglutinin__InfluenzaA__AHG96252

SEQ ID NO: 107019 - RNA, 1698 nt, Artificial Sequence; identical to SEQ ID NO: 103829
  derived and/or modified CDS sequence (opt2) from hemagglutinin__InfluenzaA__AHG96264

SEQ ID NO: 107020 - RNA, 1698 nt, Artificial Sequence; identical to SEQ ID NO: 103829
  derived and/or modified CDS sequence (opt2) from hemagglutinin__InfluenzaA__AHG96276

SEQ ID NO: 107021 - RNA, 1698 nt, Artificial Sequence; identical to SEQ ID NO: 103829
  derived and/or modified CDS sequence (opt2) from hemagglutinin__InfluenzaA__AHG96288

SEQ ID NO: 107022 - RNA, 1698 nt, Artificial Sequence; identical to SEQ ID NO: 103829
  derived and/or modified CDS sequence (opt2) from hemagglutinin__InfluenzaA__AHG96300

SEQ ID NO: 107023 - RNA, 1701 nt, Artificial Sequence
  derived and/or modified CDS sequence (opt2) from hemagglutinin__InfluenzaA__AHG96312
augaaggccauccucgucguccuccucuacaccuucgccaccgccaacgccgacacccucugcaucggcuaccacgccaacaacuccaccgacaccgucgacaccguccucgagaagaacgucaccgucacccacuccgucaaccuccucgaggacaagcacaacggcaagcucugcaagcuccgcggcgucgucccccuccaccucggcaagugcaacaucgccggcuggauccucggcaaccccgagugcgagucccucuccaccgccuccuccugguccuacaucgucgagaccuccuccuccgacaacggcaccugcuaccccggcgacuucaucaacuacgaggagcuccgcgagcagcucuccuccgucuccuccuucgagcgcuucgagaucuuccccaagaccuccuccuggcccaaccacgacuccaacaagggcgucaccgccgccugcccccacgccggcgccaaguccuucuacaagaaccucaucuggcucgucaagaagggcaacuccuaccccaagcucucccaguccuacaucaacgacaagggcaaggagguccucguccucuggggcauccaccaccccuccaccaccgccgaccagcagucccucuaccagaacgccgacgccuacgucuucgucggcaccucccgcuacuccaagaaguucaagcccgagaucgccauccgccccaagguccgcgaccaggagggccgcaugaacuacuacuggacccucgucgagcccggcgacaagaucaccuucgaggccaccggcaaccucgucgucccccgcuacgccuucaccauggagcgcaacgccggcuccggcaucaucaucuccgacacccccguccacgacugcaacaccaccugccagacccccgagggcgccaucaacaccucccuccccuuccagaacauccaccccaucaccaucggcaagugccccaaguacgucaaguccaccaagcuccgccucgccaccggccuccgcaacguccccuccauccagucccgcggccucuucggcgccaucgccggcuucaucgagggcggcuggaccggcauggucgacggcugguacggcuaccaccaccagaacgagcagggcuccggcuacgccgccgaccucaaguccacccagaacgccaucgacaagaucaccaacaaggucaacuccgucaucgagaagaugaacacccaguucaccgccgucggcaaggaguucaaccaccucgagaagcgcaucgagaaccucaacaagaaggucgacgacggcuuccucgacaucuggaccuacaacgccgagcuccucguccuccucgagaacgagcgcacccucgacuaccacgacuccaacgucaagaaccucuacgagaagguccgcaaccagcucaagaacaacgccaaggagaucggcaacggcugcuucgaguucuaccacaagugcgacaacaccugcauggaguccgucaagaacggcaccuacgacuaccccaaguacuccgaggaggccaagcucaaccgcgagaagaucgacggcgucaagcucgaguccacccgcaucuaccagauccucgccaucuacuccaccgucgccuccucccucguccucgucgucucccucggcgccaucuccuucuggaugugcuccaacggcucccuccagugccgcaucugcaucuga

SEQ ID NO: 107024 - RNA, 1701 nt, Artificial Sequence; identical to SEQ ID NO: 106076
  derived and/or modified CDS sequence (opt2) from hemagglutinin__InfluenzaA__AHG96313

SEQ ID NO: 107025 - RNA, 1701 nt, Artificial Sequence
  derived and/or modified CDS sequence (opt2) from hemagglutinin__InfluenzaA__AHG96314
augaaggccauccucgucguccuccucuacaccuucgccaccgccaacgccgacacccucugcaucggcuaccacgccaacaacuccaccgacaccgucgacaccguccucgagaagaacgucaccgucacccacuccgucaaccuccucgaggacaagcacaacggcaagcucugcaagcuccgcggcgucgccccccuccaccucggcaagugcaacaucgccggcuggauccucggcaaccccgagugcgagucccucuccaccgccuccuccugguccuacaucgucgagaccuccuccuccgacaacggcaccugcuaccccggcgacuucaucaacuacgaggagcuccgcgagcagcucuccuccgucuccuccuucgagcgcuucgagaucuuccccaagaccuccuccuggcccaaccacgacuccaacaagggcgucaccgccgccugcccccacgccggcgccaaguccuucuacaagaaccucaucuggcucgucaagaagggcaacuccuaccccaagcucucccaguccuacaucaacgacaagggcaaggagguccucguccucuggggcauccaccaccccuccaccaccgccgaccagcagucccucuaccagaacgccgacgccuacgucuucgucggcaccucccgcuacuccaagaaguucaagcccgagaucgccauccgccccaagguccgcgaccaggagggccgcaugaacuacuacuggacccucgucgagcccggcgacaagaucaccuucgaggccaccggcaaccucgucgucccccgcuacgccuucaccauggagcgcaacgccggcuccggcaucaucaucuccgacacccccguccacgacugcaacaccaccugccagacccccgagggcgccaucaacaccucccuccccuuccagaacauccaccccaucaccaucggcaagugccccaaguacgucaaguccaccaagcuccgccucgccaccggccuccgcaacguccccuccauccagucccgcggccucuucggcgccaucgccggcuucaucgagggcggcuggaccggcauggucgacggcugguacggcuaccaccaccagaacgagcagggcuccggcuacgccgccgaccucaaguccacccagaacgccaucgacaagaucaccaacaaggucaacuccgucaucgagaagaugaacacccaguacaccgccgucggcaaggaguucaaccaccucgagaagcgcaucgagaaccucaacaagaaggucgacgacggcuuccucgacaucuggaccuacaacgccgagcuccucguccuccucgagaacgagcgcacccucgacuaccacgacuccaacgucaagaaccucuacgagaagguccgcaaccagcucaagaacaacgccaaggagaucggcaacggcugcuucgaguucuaccacaagugcgacaacaccugcauggaguccgucaagaacggcaccuacgacuaccccaaguacuccgaggaggccaagcucaaccgcgagaagaucgacggcgucaagcucgaguccacccgcaucuaccagauccucgccaucuacuccaccgucgccuccucccucguccucgucgucucccucggcgccaucuccuucuggaugugcuccaacggcucccuccagugccgcaucugcaucuga

SEQ ID NO: 107026 - RNA, 1701 nt, Artificial Sequence; identical to SEQ ID NO: 106076
  derived and/or modified CDS sequence (opt2) from hemagglutinin__InfluenzaA__AHG96315

SEQ ID NO: 107027 - RNA, 1701 nt, Artificial Sequence; identical to SEQ ID NO: 106076
  derived and/or modified CDS sequence (opt2) from hemagglutinin__InfluenzaA__AHG96316

SEQ ID NO: 107028 - RNA, 1701 nt, Artificial Sequence; identical to SEQ ID NO: 106076
  derived and/or modified CDS sequence (opt2) from hemagglutinin__InfluenzaA__AHG96317

SEQ ID NO: 107029 - RNA, 1701 nt, Artificial Sequence; identical to SEQ ID NO: 106076
  derived and/or modified CDS sequence (opt2) from hemagglutinin__InfluenzaA__AHG96320

SEQ ID NO: 107030 - RNA, 1701 nt, Artificial Sequence; identical to SEQ ID NO: 106076
  derived and/or modified CDS sequence (opt2) from hemagglutinin__InfluenzaA__AHG96321

SEQ ID NO: 107031 - RNA, 1701 nt, Artificial Sequence; identical to SEQ ID NO: 106076
  derived and/or modified CDS sequence (opt2) from hemagglutinin__InfluenzaA__AHG96322

SEQ ID NO: 107032 - RNA, 1701 nt, Artificial Sequence; identical to SEQ ID NO: 106076
  derived and/or modified CDS sequence (opt2) from hemagglutinin__InfluenzaA__AHG96324

SEQ ID NO: 107033 - RNA, 1701 nt, Artificial Sequence; identical to SEQ ID NO: 106076
  derived and/or modified CDS sequence (opt2) from hemagglutinin__InfluenzaA__AHG96325

SEQ ID NO: 107034 - RNA, 1701 nt, Artificial Sequence
  derived and/or modified CDS sequence (opt2) from hemagglutinin__InfluenzaA__AHG96326
augaaggccauccucgucguccuccucuacaccuucgccaccgccaacgccgacacccucugcaucggcuaccacgccaacaacuccaccgacaccgucgacaccguccucgagaagaacgucaccgucacccacuccgucaaccuccucgaggacaagcacaacggcaagcucugcaagcuccgcggcgucgccccccuccaccucggcaagugcaacaucgccggcuggauccucggcaaccccgagugcgagucccucuccaccgccuccuccugguccuacaucgucgagaccuccaacuccgacaacggcaccugcuaccccggcgacuucaucaacuacgaggagcuccgcgagcagcucuccuccgucuccuccuucgagcgcuucgagaucuuccccaagaccuccuccuggcccaaccacgacuccaacaagggcgucaccgccgccugcccccacgccggcgccaaguccuucuacaagaaccucaucuggcucgucaagaagggcaacuccuaccccaagcucucccaguccuacaucaacgacaagggcaaggagguccucguccucuggggcauccaccaccccuccaccaccgccgaccagcagucccucuaccagaacgccgacgccuacgucuucgucggcaccucccgcuacuccaagaaguucaagcccgagaucgccauccgccccaagguccgcgaccaggagggccgcaugaacuacuacuggacccucgucgagcccggcgacaagaucaccuucgaggccaccggcaaccucgucgucccccgcuacgccuucaccauggagcgcaacgccggcuccggcaucaucaucuccgacacccccguccacgacugcaacaccaccugccagacccccgagggcgccaucaacaccucccuccccuuccagaacauccaccccaucaccaucggcaagugccccaaguacgucaaguccaccaagcuccgccucgccaccggccuccgcaacguccccuccauccagucccgcggccucuucggcgccaucgccggcuucaucgagggcggcuggaccggcauggucgacggcugguacggcuaccaccaccagaacgagcagggcuccggcuacgccgccgaccucaaguccacccagaacgccaucgacaagaucaccaacaaggucaacuccgucaucgagaagaugaacacccaguucaccgccgucggcaaggaguucaaccaccucgagaagcgcaucgagaaccucaacaagaaggucgacgacggcuuccucgacaucuggaccuacaacgccgagcuccucguccuccucgagaacgagcgcacccucgacuaccacgacuccaacgucaagaaccucuacgagaagguccgcaaccagcucaagaacaacgccaaggagaucggcaacggcugcuucgaguucuaccacaagugcgacaacaccugcauggaguccgucaagaacggcaccuacgacuaccccaaguacuccgaggaggccaagcucaaccgcgagaagaucgacggcgucaagcucgaguccacccgcaucuaccagauccucgccaucuacuccaccgucgccuccucccucguccucgucgucucccucggcgccaucuccuucuggaugugcuccaacggcucccuccagugccgcaucugcaucuga

SEQ ID NO: 107035 - RNA, 1701 nt, Artificial Sequence; identical to SEQ ID NO: 106076
  derived and/or modified CDS sequence (opt2) from hemagglutinin__InfluenzaA__AHG96327

SEQ ID NO: 107036 - RNA, 1701 nt, Artificial Sequence
  derived and/or modified CDS sequence (opt2) from hemagglutinin__InfluenzaA__AHG96329
augaaggccauccucgucguccuccucuacaccuucaccaccgccaacgccgacacccucugcaucggcuaccacgccaacaacuccaccgacaccgucgacaccguccucgagaagaacgucaccgucacccacuccgucaaccuccucgaggacaagcacaacggcaagcucugcaagcuccgcggcgucgccccccuccaccucggcaagugcaacaucgccggcuggauccucggcaaccccgagugcgagucccucuccaccgccuccuccugguccuacaucgucgagaccuccuccuccgacaacggcaccugcuaccccggcgacuucaucaacuacgaggagcuccgcgagcagcucuccuccgucuccuccuucgagcgcuucgagaucuuccccaagaccuccuccuggcccaaccacgacuccaacaagggcgucaccgccgccugcccccacgccggcgccaaguccuucuacaagaaccucaucuggcucgucaagaagggcaacuccuaccccaagcucucccaguccuacaucaacgacaagggcaaggagguccucguccucuggggcauccaccaccccuccaccaccgccgaccagcagucccucuaccagaacgccgacgccuacgucuucgucggcaccucccgcuacuccaagaaguucaagcccgagaucgccauccgccccaagguccgcgaccaggagggccgcaugaacuacuacuggacccucgucgagcccggcgacaagaucaccuucgaggccaccggcaaccucgucgucccccgcuacgccuucaccauggagcgcaacgccggcuccggcaucaucaucuccgacacccccguccacgacugcaacaccaccugccagacccccgagggcgccaucaacaccucccuccccuuccagaacauccaccccaucaccaucggcaagugccccaaguacgucaaguccaccaagcuccgccucgccaccggccuccgcaacguccccuccauccagucccgcggccucuucggcgccaucgccggcuucaucgagggcggcuggaccggcauggucgacggcugguacggcuaccaccaccagaacgagcagggcuccggcuacgccgccgaccucaaguccacccagaacgccaucgacaagaucaccaacaaggucaacuccgucaucgagaagaugaacacccaguucaccgccgucggcaaggaguucaaccaccucgagaagcgcaucgagaaccucaacaagaaggucgacgacggcuuccucgacaucuggaccuacaacgccgagcuccucguccuccucgagaacgagcgcacccucgacuaccacgacuccaacgucaagaaccucuacgagaagauccgcaaccagcucaagaacaacgccaaggagaucggcaacggcugcuucgaguucuaccacaagugcgacaacaccugcauggaguccgucaagaacggcaccuacgaguaccccaaguacuccgaggaggccaagcucaaccgcgagaagaucgacggcgucaagcucgaguccaccaagaucuaccagauccucgccaucuacuccaccgucgccuccucccucguccucgucgucucccucggcgccaucuccuucuggaugugcuccaacggcucccuccagugccgcaucugcaucuga

SEQ ID NO: 107037 - RNA, 1701 nt, Artificial Sequence
  derived and/or modified CDS sequence (opt2) from hemagglutinin__InfluenzaA__AHG96330
augaaggccauccucgucguccuccucuacaccuucgccaccgccaccgccgacacccucugcaucggcuaccacgccaacaacuccaccgacaccgucgacaccguccucgagaagaacgucaccgucacccacuccgucaaccuccucgaggacaagcacaacggcaagcucugcaagcuccgcggcgucgccccccuccaccucggcaagugcaacaucgccggcuggauccucggcaaccccgagugcgagucccucuccaccgccuccuccugguccuacaucgucgagaccuccuccuccgacaacggcaccugcuaccccggcgacuucaucaacuacgaggagcuccgcgagcagcucuccuccgucuccuccuucgagcgcuucgagaucuuccccaagaccuccuccuggcccaaccacgacuccaacaagggcgucaccgccgccugcccccacgccggcgccaaguccuucuacaagaaccucaucuggcucgucaagaagggcaacuccuaccccaagcucucccaguccuacaucaacgacaagggcaaggagguccucguccucuggggcauccaccaccccuccaccaccgccgaccagcagucccucuaccagaacgccgacgccuacgucuucgucggcaccucccgcuacuccaagaaguucaagcccgagaucgccauccgccccaagguccgcgaccaggagggccgcaugaacuacuacuggacccucgucgagcccggcgacaagaucaccuucgaggccaccggcaaccucgucgucccccgcuacgccuucaccauggagcgcaacgccggcuccggcaucaucaucuccgacacccccguccacgacugcaacaccaccugccagacccccgagggcgccaucaacaccucccuccccuuccagaacauccaccccaucaccaucggcaagugccccaaguacgucaaguccaccaagcucucccucgccaccggccuccgcaacguccccuccauccagucccgcggccucuucggcgccaucgccggcuucaucgagggcggcuggaccggcauggucgacggcugguacggcuaccaccaccagaacgagcagggcuccggcuacgccgccgaccucaaguccacccagaacgccaucgacaagaucaccaacaaggucaacuccgucaucgagaagaugaacacccaguucaccgccgucggcaaggaguucaaccaccucgagaagcgcaucgagaaccucaacaagaaggucgacgacggcuuccucgacaucuggaccuacaacgccgagcuccucguccuccucgagaacgagcgcacccucgacuaccacgacuccaacgucaagaaccucuacgagaagauccgcaaccagcucaagaacaacgccaaggagaucggcaacggcugcuucgaguucuaccacaagugcgacaacaccugcauggaguccgucaagaacggcaccuacgacuaccccaaguacuccgaggaggccaagcucaaccgcgagaagaucgacggcgucaagcucgaguccacccgcaucuaccagauccucgccaucuacuccaccgucgccuccucccucguccucgucgucucccucggcgccaucuccuucuggaugugcuccaacggcucccuccagugccgcaucugcaucuga

SEQ ID NO: 107038 - RNA, 1701 nt, Artificial Sequence; identical to SEQ ID NO: 106076
  derived and/or modified CDS sequence (opt2) from hemagglutinin__InfluenzaA__AHG96332

SEQ ID NO: 107039 - RNA, 1701 nt, Artificial Sequence
  derived and/or modified CDS sequence (opt2) from hemagglutinin__InfluenzaA__AHG96334
augaaggccauccucgucguccuccucuacacccucgccaccgccaacgccgacacccucugcaucggcuaccacgccaacaacuccaccgacaccgucgacaccguccucgagaagaacgucaccgucacccacuccgucaaccuccucgaggacaagcacaacggcaagcucugcaagcuccgcggcgucgccccccuccaccucggcaagugcaacaucgccggcuggauccucggcaaccccgagugcgagucccucuccaccgccuccuccugguccuacaucgucgagaccuccuccuccgacaacggcaccugcuaccccggcgacuucaucaacuacgaggagcuccgcgagcagcucuccuccgucuccuccuucgagcgcuucgagaucuuccccaagaccuccuccuggcccaaccacgacuccaacaagggcgucaccgccgccugcccccacgccggcgccaaguccuucuacaagaaccucaucuggcucgucaagaagggcaacuccuaccccaagcucucccaguccuacaucaacgacaagggcaaggagguccucguccucuggggcauccaccaccccuccaccaccgccgaccagcagucccucuaccagaacgccgacgccuacgucuucgucggcaccucccgcuacuccaagaaguucaagcccgagaucgccauccgccccaagguccgcgaccaggagggccgcaugaacuacuacuggacccucgucgagcccggcgacaagaucaccuucgaggccaccggcaaccucgucgucccccgcuacgccuucaccauggagcgcaacgccggcuccggcaucaucaucuccgacacccccguccacgacugcaacaccaccugccagacccccgagggcgccaucaacaccucccuccccuuccagaacauccaccccaucaccaucggcaagugccccaaguacgucaaguccaccaagcuccgccucgccaccggccuccgcaacguccccuccauccagucccgcggccucuucggcgccaucgccggcuucaucgagggcggcuggaccggcauggucgacggcugguacggcuaccaccaccagaacgagcagggcuccggcuacgccgccgaccucaaguccacccagaacgccaucgacaagaucaccaacaaggucaacuccgucaucgagaagaugaacacccaguucaccgccgucggcaaggaguucaaccaccucgagaagcgcaucgagaaccucaacaagaaggucgacgacggcuuccucgacaucuggaccuacaacgccgagcuccucguccuccucgagaacgagcgcacccucgacuaccacgacuccaacgucaagaaccucuacgagaagguccgcaaccagcucaagaacaacgccaaggagaucggcaacggcugcuucgaguucuaccacaagugcgacaacaccugcauggaguccgucaagaacggcaccuacgacuaccccaaguacuccgaggaggccaagcucaaccgcgagaagaucgacggcgucaagcucgaguccacccgcaucuaccagauccucgccaucuacuccaccgucgccuccucccucguccucgucgucucccucggcgccaucuccuucuggaugugcuccaacggcucccuccagugccgcaucugcaucuga

SEQ ID NO: 107040 - RNA, 1701 nt, Artificial Sequence
  derived and/or modified CDS sequence (opt2) from hemagglutinin__InfluenzaA__AHG96335
augaaggccauccucgucguccuccucuacaccuucgagaccgccaacgccgacacccucugcaucggcuaccacgccaacaacuccaccgacaccgucgacaccguccucgagaagaacgucaccgucacccacuccgucaaccuccucgaggacaagcacaacggcaagcucugcaagcucaagggcgucgccccccuccaccucggcaagugcaacaucgccggcuggauccucggcaaccccgagugcgagucccucuccaccgccuccuccugguccuacaucgucgagaccuccuccuccgacaacggcaccugcuaccccggcgacuucaucaacuacgaggagcuccgcgagcagcucuccuccgucuccuccuucgagcgcuucgagaucuuccccaagaccuccuccuggcccaaccacgacuccaacaagggcgucaccgccgccugcccccacgccggcgccaaguccuucuacaagaaccucaucuggcucgucaagaagggcaacuccuaccccaagcucucccaguccuacaucaacgacaagggcaaggagguccucguccucuggggcauccaccaccccuccaccaccgccgaccagcagucccucuaccagaacgccgacgccuacgucuucgucggcaccucccgcuacuccaagaaguucaagcccgagaucgccauccgccccaagguccgcgaccaggagggccgcaugaacuacuacuggacccucgucgagcccggcgacaagaucaccuucgaggccaccggcaaccucgucgucccccgcuacgccuucaccauggagcgcaacgccggcuccggcaucaucaucuccgacacccccguccacgacugcaacaccaccugccagacccccgagggcgccaucaacaccucccuccccuuccagaacauccaccccaucaccaucggcaagugccccaaguacgucaaguccaccaagcuccgccucgccaccggccuccgcaacguccccuccauccagucccgcggccucuucggcgccaucgccggcuucaucgagggcggcuggaccggcauggucgacggcugguacggcuaccaccaccagaacgagcagggcuccggcuacgccgccgaccucaaguccacccagaacgccaucgacaagaucaccaacaaggucaacuccgucaucgagaagaugaacacccaguucaccgccgucggcaaggaguucaaccaccucgagaagcgcaucgagaaccucaacaagaaggucgacgacggcuuccucgacaucuggaccuacaacgccgagcuccucguccuccucgagaacgagcgcacccucgacuaccacgacuccaacgucaagaaccucuacgagaagguccgcaaccagcucaagaacaacgccaaggagaucggcaacggcugcuucgaguucuaccacaagugcgacaacaccugcauggaguccgucaagaacggcaccuacgacuaccccaaguacuccgaggaggccaagcucaaccgcgagaagaucgacggcgucaagcucgaguccacccgcaucuaccagauccucgccaucuacuccaccgucgccuccucccucguccucgucgucucccucggcgccaucuccuucuggaugugcuccaacggcucccuccagugccgcaucugcaucuga

SEQ ID NO: 107041 - RNA, 1701 nt, Artificial Sequence
  derived and/or modified CDS sequence (opt2) from hemagglutinin__InfluenzaA__AHG96336
augaaggccauccucgucguccuccucuacaccuucgccaccgccaacgccgacacccucugcaucggcuaccacgccaacaacuccaccgacaccgucgacaccguccucgagaagaacgucaccgucacccacuccgucaaccuccucgaggacaagcacaacggcaagcucugcaagcuccgcggcgucgccccccuccaccucggcaagugcaacaucgccggcuggauccucggcaaccccgagugcgagucccucuccaccgccuccuccugguccuacaucgucgagaccuccuccuccgacaacggcaccugcuaccccggcgacuucaucaacuacgaggagcuccgcgagcagcucuccuccgucuccuccuucgagcgcuucgagaucuuccccaagaccuccuccuggcccaaccacgacuccaacaagggcgucaccgccgccugcccccacgccggcgccaaguccuucuacaagaaccucaucuggcucgucaagaagggcaacuccuaccccaagcucucccaguccuacaucaacgacaagggcaaggagguccucguccucuggggcauccaccaccccuccaccaccgccgaccagcagucccucuaccagaacgccgacgccuacgucuucgucggcaccucccgcuacuccaagaaguucaagcccgagaucgccauccgccccaagguccgcgaccaggagggccgcaugaacuacuacuggacccucgucgagcccggcgacaagaucaccuucgaggccaccggcaaccucgucgucccccgcuacgccuucaccauggagcgcaacgccggcuccggcaucaucaucuccgacacccccguccgcgacugcaacaccaccugccagacccccgagggcgccaucaacaccucccuccccuuccagaacauccaccccaucaccaucggcaagugccccaaguacgucaaguccaccaagcuccgccucgccaccggccuccgcaacguccccuccauccagucccgcggccucuucggcgccaucgccggcuucaucgagggcggcuggaccggcauggucgacggcugguacggcuaccaccaccagaacgagcagggcuccggcuacgccgccgaccucaaguccacccagaacgccaucgacaagaucaccaacaaggucaacuccgucaucgagaagaugaacacccaguucaccgccgucggcaaggaguucaaccaccucgagaagcgcaucgagaaccucaacaagaaggucgacgacggcuuccucgacaucuggaccuacaacgccgagcuccucguccuccucgagaacgagcgcacccucgacuaccacgacuccaacgucaagaaccucuacgagaagguccgcaaccagcucaagaacaacgccaaggagaucggcaacggcugcuucgaguucuaccacaagugcgacaacaccugcauggaguccgucaagaacggcaccuacgacuaccccaaguacuccgaggaggccaagcucaaccgcgagaagaucgacggcgucaagcucgaguccacccgcaucuaccagauccucgccaucuacuccaccgucgccuccucccucguccucgucgucucccucggcgccaucuccuucuggaugugcuccaacggcucccuccagugccgcaucugcaucuga

SEQ ID NO: 107042 - RNA, 1701 nt, Artificial Sequence
  derived and/or modified CDS sequence (opt2) from hemagglutinin__InfluenzaA__AHG96338
augaaggccauccucgucguccuccucuacaccuucgccaccgccaacgccgacacccucugcaucggcuaccacgccaacaacuccaccgacaccgucgacaccguccucgagaagaacgucaccgucacccacuccgucaaccuccucgaggacaagcacaacggcaagcucugcaagcuccgcggcgucgccccccuccaccucggcaagugcaacaucgccggcuggauccucggcaaccccgagugcgagucccucuccaccgccuccuccugguccuacaucgucgagaccuccuccuccgacaacggcaccugcuaccccggcgacuucaucaacuacgaggagcuccgcgagcagcucuccuccgucuccuccuucgagcgcuucgagaucuuccccaagaccuccuccuggcccaaccacgacuccaacaagggcgucaccgccgccugcucccacgccggcgccaaguccuucuacaagaaccucaucuggcucgucaagaagggcaacuccuaccccaagcucucccaguccuacaucaacgacaagggcaaggagguccucguccucuggggcauccaccaccccuccaccaccgccgaccagcagucccucuaccagaacgccgacgccuacgucuucgucggcaccucccgcuacuccaagaaguucaagcccgagaucgccauccgccccaagguccgcgaccaggagggccgcaugaacuacuacuggacccucgucgagcccggcgacaagaucaccuucgaggccaccggcaaccucgucgucccccgcuacgccuucaccauggagcgcaacgccggcuccggcaucaucaucuccgacacccccguccacgacugcaacaccaccugccagacccccgagggcgccaucaacaccucccuccccuuccagaacauccaccccaucaccaucggcaagugccccaaguacgucaaguccaccaagcuccgccucgccaccggccuccgcaacguccccuccauccagucccgcggccucuucggcgccaucgccggcuucaucgagggcggcuggaccggcauggucgacggcugguacggcuaccaccaccagaacgagcagggcuccggcuacgccgccgaccucaaguccacccagaacgccaucgacaagaucaccaacaaggucaacuccgucaucgagaagaugaacacccaguucaccgccgucggcaaggaguucaaccaccucgagaagcgcaucgagaaccucaacaagaaggucgacgacggcuuccucgacaucuggaccuacaacgccgagcuccucguccuccucgagaacgagcgcacccucgacuaccacgacuccaacgucaagaaccucuacgagaagguccgcaaccagcucaagaacaacgccaaggagaucggcaacggcugcuucgaguucuaccacaagugcgacaacaccugcauggaguccgucaagaacggcaccuacgacuaccccaaguacuccgaggaggccaagcucaaccgcgagaagaucgacggcgucaagcucgaguccacccgcaucuaccagauccucgccaucuacuccaccgucgccuccucccucguccucgucgucucccucggcgccaucuccuucuggaugugcuccaacggcucccuccagugccgcaucugcaucuga

SEQ ID NO: 107043 - RNA, 1701 nt, Artificial Sequence
  derived and/or modified CDS sequence (opt2) from hemagglutinin__InfluenzaA__AHG96339
augaaggccauccucgucguccuccucuacaccuucgccaccgccaacgccgacacccucugcaucggcuaccacgccaacaacuccaccgacaccgucgacaccguccucgagaagaacgucaccgucacccacuccgucaaccuccucgaggacaagcacaacggcaagcucugcaagcuccgcggcgucgccccccuccaccucggcaagugcaacaucgccggcuggauccucggcaaccccgagugcgagucccucuccaccgccuccuccugguccuacaucgucgagaccuccuccuccgacaacggcaccugcuaccccggcgacuucaucaacuacgaggagcuccgcgagcagcucuccuccgucuccuccuucgagcgcuucgagaucuuccccaagaccuccuccuggcccaaccacgacuccaacaagggcgucaccgccgccugcccccacgccggcgccaaguccuucuacaagaaccucaucuggcucgucaagaagggcaacuccuaccccaagcucucccaguccuacaucaacgacaagggcaaggagauccucguccucuggggcauccaccaccccuccaccaccgccgaccagcagucccucuaccagaacgccgacgccuacgucuucgucggcaccucccgcuacuccaagaaguucaagcccgagaucgccauccgccccaagguccgcgaccaggagggccgcaugaacuacuacuggacccucgucgagcccggcgacaagaucaccuucgaggccaccggcaaccucgucgucccccgcuacgccuucaccauggagcgcaacgccggcuccggcaucaucaucuccgacacccccguccacgacugcaacaccaccugccagacccccgagggcgccaucaacaccucccuccccuuccagaacauccaccccaucaccaucggcaagugccccaaguacgucaaguccaccaagcuccgccucgccaccggccuccgcaacguccccuccauccagucccgcggccucuucggcgccaucgccggcuucaucgagggcggcuggaccggcauggucgacggcugguacggcuaccaccaccagaacgagcagggcuccggcuacgccgccgaccucaaguccacccagaacgccaucgacaagaucaccaacaaggucaacuccgucaucgagaagaugaacacccaguucaccgccgucggcaaggaguucaaccaccucgagaagcgcaucgagaaccucaacaagaaggucgacgacggcuuccucgacaucuggaccuacaacgccgagcuccucguccuccucgagaacgagcgcacccucgacuaccacgacuccaacgucaagaaccucuacgagaagguccgcaaccagcucaagaacaacgccaaggagaucggcaacggcugcuucgaguucuaccacaagugcgacaacaccugcauggaguccgucaagaacggcaccuacgacuaccccaaguacuccgaggaggccaagcucaaccgcgagaagaucgacggcgucaagcucgaguccacccgcaucuaccagauccucgccaucuacuccaccgucgccuccucccucguccucgucgucucccucggcgccaucuccuucuggaugugcuccaacggcucccuccagugccgcaucugcaucuga

SEQ ID NO: 107044 - RNA, 1701 nt, Artificial Sequence; identical to SEQ ID NO: 106076
  derived and/or modified CDS sequence (opt2) from hemagglutinin__InfluenzaA__AHG96340

SEQ ID NO: 107045 - RNA, 1701 nt, Artificial Sequence
  derived and/or modified CDS sequence (opt2) from hemagglutinin__InfluenzaA__AHG96341
augaaggccauccucgucguccuccucuacaccuucgccaccgccaacgccgacacccucugcaucggcuaccacgccaacaacuccaccgacaccgucgacaccguccucgagaagaacgucaccgucacccacuccgucaaccuccucgaggacaagcacaacggcaagcucugcaagcuccgcggcgucgccccccuccaccucggcaagugcaacaucgccggcuggauccucggcaaccccgagugcgagucccucuccaccgccuccuccugguccuacaucgucgagaccuccuccuccgacaacggcaccugcuaccccggcgacuucaucaacuacgaggagcuccgcgagcagcucuccuccgucuccuccuucgagcgcuucgagaucuuccccaagaccuccuccuggcccaaccacgacuccaacaagggcgucaccgccgccugcccccacgccggcgccaaguccuucuacaagaaccucaucuggcucgucaagaagggcaacuccuaccccaagcucucccaguccuacaucaacgacaagggcaaggagguccucguccucuggggcauccaccaccccuccaccaccgccgaccagcagucccucuaccagaacgccgacgccuacgucuucgucggcaccuccaaguacuccaagaaguucaagcccgagaucgccauccgccccaagguccgcgaccaggagggccgcaugaacuacuacuggacccucgucgagcccggcgacaagaucaccuucgaggccaccggcaaccucgucgucccccgcuacgccuucaccauggagcgcaacgccggcuccggcaucaucaucuccgacacccccguccacgacugcaacaccaccugccagacccccgagggcgccaucaacaccucccuccccuuccagaacauccaccccaucaccaucggcaagugccccaaguacgucaaguccaccaagcuccgccucgccaccggccuccgcaacauccccuccauccagucccgcggccucuucggcgccaucgccggcuucaucgagggcggcuggaccggcauggucgacggcugguacggcuaccaccaccagaacgagcagggcuccggcuacgccgccgaccucaaguccacccagaacgccaucgacaagaucaccaacaaggucaacuccgucaucgagaagaugaacacccaguucaccgccgucggcaaggaguucaaccaccucgagaagcgcaucgagaaccucaacaagaaggucgacgacggcuuccucgacaucuggaccuacaacgccgagcuccucguccuccucgagaacgagcgcacccucgacuaccacgacuccaacgucaagaaccucuacgagaagguccgcaaccagcucaagaacaacgccaaggagaucggcaacggcugcuucgaguucuaccacaagugcgacaacaccugcauggaguccgucaagaacggcaccuacgacuaccccaaguacuccgaggaggccaagcucaaccgcgagaagaucgacggcgucaagcucgaguccacccgcaucuaccagauccucgccaucuacuccaccgucgccuccucccucguccucgucgucucccucggcgccaucuccuucuggaugugcuccaacggcucccuccagugccgcaucugcaucuga

SEQ ID NO: 107046 - RNA, 1701 nt, Artificial Sequence
  derived and/or modified CDS sequence (opt2) from hemagglutinin__InfluenzaA__AHG96342
augaaggccauccucgucguccuccucuacaccuucgccaccgccaacgccgacacccucugcaucggcuaccacgccaacaacuccaccgacaccgucgacaccguccucgagaagaacgucaccgucacccacuccgucaaccuccucgaggacaagcacaacggcaagcucugcaagcuccgcggcgucgccccccuccaccucggcaagugcaacaucgccggcuggauccucggcaaccccgagugcgagucccucuccaccgccuccuccugguccuacaucgucgagaccuccuccuccgacaacggcaccugcuaccccggcgacuucaucaacuacgaggagcuccgcgagcagcucuccuccgucuccuccuucgagcgcuucgagaucuuccccaagaccuccuccuggcccaaccacgacuccaacaagggcgucaccgccgccugcccccacgccggcgccaaguccuucuacaagaaccucaucuggcucgucaagaagggcaacuccuaccccaagcucucccaguccuacaucaacgacaagggcaaggagguccucguccucuggggcauccaccaccccuccaccaccgccgaccagcagucccucuaccagaacgccgacgccuacgucuucgucggcaccucccgcuacuccaagaaguucaagcccgagaucgccauccgccccaagguccgcgaccaggagggccgcaugaacuacuacuggacccucgucgagcccggcgacaagaucaccuucgaggccaccggcaaccucgucgucccccgcuacgccuucaccauggagcgcaacgccggcuccggcaucaucaucuccgacacccccguccacgacugcaacaccaccugccagacccccgagggcgccaucaacaccucccuccccuuccagaacauccaccccaucaccaucggcaagugccccaaguacgucaaguccaccaagcuccgccucgccaccggccuccgcaacauccccuccauccagucccgcggccucuucggcgccaucgccggcuucaucgagggcggcuggaccggcauggucgacggcugguacggcuaccaccaccagaacgagcagggcuccggcuacgccgccgaccucaaguccacccagaacgccaucgacaagaucaccaacaaggucaacuccgucaucgagaagaugaacacccaguucaccgccgucggcaaggaguucaaccaccucgagaagcgcaucgagaaccucaacaagaaggucgacgacggcuuccucgacaucuggaccuacaacgccgagcuccucguccuccucgagaacgagcgcacccucgacuaccacgacuccaacgucaagaaccucuacgagaagguccgcaaccagcucaagaacaacgccaaggagaucggcaacggcugcuucgaguucuaccacaagugcgacaacaugugcauggaguccgucaagaacggcaccuacgacuaccccaaguacuccgaggaggccaagcucaaccgcgagaagaucgacggcgucaagcucgaguccacccgcaucuaccagauccucgccaucuacuccaccgucgccuccucccucguccucgucgucucccucggcgccaucuccuucuggaugugcuccaacggcucccuccagugccgcaucugcaucuga

SEQ ID NO: 107047 - RNA, 1701 nt, Artificial Sequence
  derived and/or modified CDS sequence (opt2) from hemagglutinin__InfluenzaA__AHG96343
augaaggccauccucgucguccuccucuacaccuucgccaccgccaccgccgacacccucugcaucggcuaccacgccaacaacuccaccgacaccgucgacaccguccucgagaagaacgucaccgucacccacuccgucaaccuccucgaggacaagcacaacggcaagcucugcaagcuccgcggcgucgccccccuccaccucggcaagugcaacaucgccggcuggauccucggcaaccccgagugcgagucccucuccaccgccuccuccugguccuacaucgucgagaccuccaacuccgacaacggcaccugcuaccccggcgacuucaucaacuacgaggagcuccgcgagcagcucuccuccgucuccuccuucgagcgcuucgagaucuuccccaagaccuccuccuggcccaaccacgacuccaacaagggcgucaccgccgccugcccccacgccggcgccaaguccuucuacaagaaccucaucuggcucgucaagaagggcaacuccuaccccaagcucucccaguccuacaucaacgacaagggcaaggagguccucguccucuggggcauccaccaccccuccaccaccgccgaccagcagucccucuaccagaacgccgacgccuacgucuucgucggcaccucccgcuacuccaagaaguucaagcccgagaucgccauccgccccaagguccgcgaccaggagggccgcaugaacuacuacuggacccucgucgagcccggcgacaagaucaccuucgaggccaccggcaaccucgucgucccccgcuacgccuucaccauggagcgcaacgccggcuccggcaucaucaucuccgacacccccguccacgacugcaacaccaccugccagacccccgagggcgccaucaacaccucccuccccuuccagaacauccaccccaucaccaucggcaagugccccaaguacgucaaguccaccaagcuccgccucgccaccggccuccgcaacguccccuccauccagucccgcggccucuucggcgccaucgccggcuucaucgagggcggcuggaccggcauggucgacggcugguacggcuaccaccaccagaacgagcagggcuccggcuacgccgccgaccucaaguccacccagaacgccaucgacaagaucaccaacaaggucaacuccgucaucgagaagaugaacacccaguucaccgccgucggcaaggaguucaaccaccucgagaagcgcaucgagaaccucaacaagaaggucgacgacggcuuccucgacaucuggaccuacaacgccgagcuccucguccuccucgagaacgagcgcacccucgacuaccacgacuccaacgucaagaaccucuacgagaagguccgcaaccagcucaagaacaacgccaaggagaucggcaacggcugcuucgaguucuaccacaagugcgacaacaccugcauggaguccgucaagaacggcaccuacgacuaccccaaguacuccgaggaggccaagcucaaccgcgagaagaucgacggcgucaagcucgaguccacccgcaucuaccagauccucgccaucuacuccaccgucgccuccucccucguccucgucgucucccucggcgccaucuccuucuggaugugcuccaacggcucccuccagugccgcaucugcaucuga

SEQ ID NO: 107048 - RNA, 1701 nt, Artificial Sequence; identical to SEQ ID NO: 106076
  derived and/or modified CDS sequence (opt2) from hemagglutinin__InfluenzaA__AHG96344

SEQ ID NO: 107049 - RNA, 1701 nt, Artificial Sequence; identical to SEQ ID NO: 107039
  derived and/or modified CDS sequence (opt2) from hemagglutinin__InfluenzaA__AHG96345

SEQ ID NO: 107050 - RNA, 1701 nt, Artificial Sequence; identical to SEQ ID NO: 106076
  derived and/or modified CDS sequence (opt2) from hemagglutinin__InfluenzaA__AHG96346

SEQ ID NO: 107051 - RNA, 1701 nt, Artificial Sequence; identical to SEQ ID NO: 106076
  derived and/or modified CDS sequence (opt2) from hemagglutinin__InfluenzaA__AHG96347

SEQ ID NO: 107052 - RNA, 1701 nt, Artificial Sequence; identical to SEQ ID NO: 106076
  derived and/or modified CDS sequence (opt2) from hemagglutinin__InfluenzaA__AHG96348

SEQ ID NO: 107053 - RNA, 1701 nt, Artificial Sequence; identical to SEQ ID NO: 106076
  derived and/or modified CDS sequence (opt2) from hemagglutinin__InfluenzaA__AHG96349

SEQ ID NO: 107054 - RNA, 1701 nt, Artificial Sequence; identical to SEQ ID NO: 106076
  derived and/or modified CDS sequence (opt2) from hemagglutinin__InfluenzaA__AHG96350

SEQ ID NO: 107055 - RNA, 1701 nt, Artificial Sequence; identical to SEQ ID NO: 106076
  derived and/or modified CDS sequence (opt2) from hemagglutinin__InfluenzaA__AHG96351

SEQ ID NO: 107056 - RNA, 1701 nt, Artificial Sequence; identical to SEQ ID NO: 106076
  derived and/or modified CDS sequence (opt2) from hemagglutinin__InfluenzaA__AHG96352

SEQ ID NO: 107057 - RNA, 1701 nt, Artificial Sequence
  derived and/or modified CDS sequence (opt2) from hemagglutinin__InfluenzaA__AHG96353
augaaggccauccucgucguccuccucuacaccuucgccaccaccaacgccgacacccucugcaucggcuaccacgccaacaacuccaccgacaccgucgacaccguccucgagaagaacgucaccgucacccacuccgucaaccuccucgaggacaagcacaacggcaagcucugcaagcuccgcggcgucgccccccuccaccucggcaagugcaacaucgccggcuggauccucggcaaccccgagugcgagucccucuccaccgccuccuccugguccuacaucgucgagaccuccuccuccgacaacggcaccugcuaccccggcgacuucaucaacuacgaggagcuccgcgagcagcucuccuccgucuccuccuucgagcgcuucgagaucuuccccaagaccuccuccuggcccaaccacgacuccaacaagggcgucaccgccgccugcccccacgccggcgccaaguccuucuacaagaaccucaucuggcucgucaagaagggcaacuccuaccccaagcucucccaguccuacaucaacgacaagggcaaggagguccucguccucuggggcauccaccaccccuccaccaccgccgaccagcagucccucuaccagaacgccgacgccuacgucuucgucggcaccucccgcuacuccaagaaguucaagcccgagaucgccauccgccccaagguccgcgaccaggagggccgcaugaacuacuacuggacccucgucgagcccggcgacaagaucaccuucgaggccaccggcaaccucgucgucccccgcuacgccuucaccauggagcgcaacgccggcuccggcaucaucaucuccgacacccccguccacgacugcaacaccaccugccagacccccgagggcgccaucaacaccucccuccccuuccagaacauccaccccaucaccaucggcaagugccccaaguacgucaaguccaccaagcuccgccucgccaccggccuccgcaacguccccuccauccagucccgcggccucuucggcgccaucgccggcuucaucgagggcggcuggaccggcauggucgacggcugguacggcuaccaccaccagaacgagcagggcuccggcuacgccgccgaccucaaguccacccagaacgccaucgacaagaucaccaacaaggucaacuccgucaucgagaagaugaacacccaguucaccgccgucggcaaggaguucaaccaccucgagaagcgcaucgagaaccucaacaagaaggucgacgacggcuuccucgacaucuggaccuacaacgccgagcuccucguccuccucgagaacgagcgcacccucgacuaccacgacuccaacgucaagaaccucuacgagaagguccgcaaccagcucaagaacaacgccaaggagaucggcaacggcugcuucgaguucuaccacaagugcgacaacaccugcauggaguccgucaagaacggcaccuacgacuaccccaaguacuccgaggaggccaagcucaaccgcgagaagaucgacggcgucaagcucgaguccacccgcaucuaccagauccucgccaucuacuccaccgucgccuccucccucguccucgucgucucccucggcgccaucuccuucuggaugugcuccaacggcucccuccagugccgcaucugcaucuga

SEQ ID NO: 107058 - RNA, 1701 nt, Artificial Sequence; identical to SEQ ID NO: 106076
  derived and/or modified CDS sequence (opt2) from hemagglutinin__InfluenzaA__AHG96354

SEQ ID NO: 107059 - RNA, 1701 nt, Artificial Sequence
  derived and/or modified CDS sequence (opt2) from hemagglutinin__InfluenzaA__AHG96355
augaaggccauccucgucguccuccucuacacccucgccaccgccaacgccgacacccucugcaucggcuaccacgccaacaacuccaccgacaccgucgacaccguccucgagaagaacgucaccgucacccacuccgucaaccuccucgaggacaagcacaacggcaagcucugcaagcuccgcggcgucgccccccuccaccucggcaagugcaacaucgccggcuggauccucggcaaccccgagugcgagucccucuccaccgccuccuccugguccuacaucgucgagaccuccuccuccgacaacggcaccugcuaccccggcgacuucaucaacuacgaggagcuccgcgagcagcucuccuccgucuccuccuucgagcgcuucgagaucuuccccaagaccuccuccuggcccaaccacgacuccaacaagggcgucaccgccgccugcccccacgccggcgccaaguccuucuacaagaaccucaucuggcucgucaagaagggcaacuccuaccccaagcucucccaguccuacaucaacgacaagggcaaggagguccucguccucuggggcauccaccaccccuccaccaccgccgaccagcagucccucuaccagaacgccgacgccuacgucuucgucggcaccucccgcuacuccaagaaguucaagcccgagaucgccauccgccccaagguccgcgaccaggagggccgcaugaacuacuacuggacccucgucgagcccggcgacaagaucaccuucgaggccaccggcaaccucgucgucccccgcuacgccuucaccauggagcgcaacgccggcuccggcaucaucaucuccgacacccccguccacgacugcaacaccaccugccagacccccgagggcgccaucaacaccucccuccccuuccagaacauccaccccaucaccaucggcaagugccccaaguacgucaaguccaccaagcuccgccucgccaccggccuccgcaacguccccuccauccagucccgcggccucuucggcgccaucgccggcuucaucgagggcggcuggaccggcauggucgacggcugguacggcuaccaccaccagaacgagcagggcuccggcuacgccgccgaccucaaguccacccagaacgccaucgacaagaucaccaacaaggucaacuccgucaucgagaagaugaacacccaguucaccgccgucggcaaggaguucaaccagcucgagaagcgcaucgagaaccucaacaagaaggucgacgacggcuuccucgacaucuggaccuacaacgccgagcuccucguccuccucgagaacgagcgcacccucgacuaccacgacuccaacgucaagaaccucuacgagaagguccgcaaccagcucaagaacaacgccaaggagaucggcaacggcugcuucgaguucuaccacaagugcgacaacaccugcauggaguccgucaagaacggcaccuacgacuaccccaaguacuccgaggaggccaagcucaaccgcgagaagaucgacggcgucaagcucgaguccacccgcaucuaccagauccucgccaucuacuccaccgucgccuccucccucguccucgucgucucccucggcgccaucuccuucuggaugugcuccaacggcucccuccagugccgcaucugcaucuga

SEQ ID NO: 107060 - RNA, 1701 nt, Artificial Sequence; identical to SEQ ID NO: 105894
  derived and/or modified CDS sequence (opt2) from hemagglutinin__InfluenzaA__AHG96356

SEQ ID NO: 107061 - RNA, 1701 nt, Artificial Sequence
  derived and/or modified CDS sequence (opt2) from hemagglutinin__InfluenzaA__AHG96359
augaagaccaucaucgcccucuccuacauccucugccucgucuucgcccagaagcuccccggcaacgacaacuccaccgccacccucugccucggccaccacgccguccccaacggcaccaucgucaagaccaucaccaacgaccagaucgaggucaccaacgccaccgagcucguccaguccuccuccaccggcggcaucugcgacuccccccaccagauccucgacggcgagaacugcacccucaucgacgcccuccucggcgacccccagugcgacggcuuccagaacaagaagugggaccucuucgucgagcgcuccaaggccuacuccaacugcuaccccuacgacguccccgacuacgccucccuccgcucccucgucgccuccuccggcacccucgaguucaacgacgaguccuucaacuggaccggcgucacccagaacggcaccuccuccuccugcaagcgccgcuccaacaacuccuucuucucccgccucaacuggcucacccaccucaaguucaaguaccccgcccucaacgucaccaugcccaacaacgagaaguucgacaagcucuacaucuggggcguccaccaccccgucaccgacaacgaccagaucuuccucuacgcccaggccuccggccgcaucaccgucuccaccaagcgcucccagcagaccgucauccccaacaucggcucccgcccccgcauccgcaacauccccucccgcaucuccaucuacuggaccaucgucaagcccggcgacauccuccucaucaacuccaccggcaaccucaucgccccccgcggcuacuucaagauccgcuccggcaaguccuccaucaugcgcuccgacgcccccaucggcaagugcaacuccgagugcaucacccccaacggcuccauccccaacgacaagcccuuccagaacgucaaccgcaucaccuacggcgccugcccccgcuacgucaagcagaacacccucaagcucgccaccggcaugcgcaacguccccgagaagcagacccgcggcaucuucggcgccaucgccggcuucaucgagaacggcugggagggcauggucgacggcugguacggcuuccgccaccagaacuccgagggcaucggccaggccgccgaccucaaguccacccaggccgccaucaaccagaucaacggcaagcucaaccgccucaucggcaagaccaacgagaaguuccaccagaucgagaaggaguucuccgaggucgagggccgcauccaggaccucgagaaguacgucgaggacaccaagaucgaccucugguccuacaacgccgagcuccucgucgcccucgagaaccagcacaccaucgaccucaccgacuccgagaugaacaagcucuucgagcgcaccaagaagcagcuccgcgagaacgccgaggacaugggcaacggcugcuucaagaucuaccacaagugcgacaacgccugcaucggcuccauccgcaacggcaccuacgaccacgacgucuaccgcgacgaggcccucaacaaccgcuuccagaucaagggcgucgagcucaaguccggcuacaaggacuggauccucuggaucuccuucgccaucuccugcuuccuccucugcgucgcccuccucggcuucaucaugugggccugccagaagggcaacauccgcugcaacaucugcaucuga

SEQ ID NO: 107062 - RNA, 1701 nt, Artificial Sequence; identical to SEQ ID NO: 107061
  derived and/or modified CDS sequence (opt2) from hemagglutinin__InfluenzaA__AHG96371

SEQ ID NO: 107063 - RNA, 1701 nt, Artificial Sequence; identical to SEQ ID NO: 107061
  derived and/or modified CDS sequence (opt2) from hemagglutinin__InfluenzaA__AHG96383

SEQ ID NO: 107064 - RNA, 1698 nt, Artificial Sequence; identical to SEQ ID NO: 103829
  derived and/or modified CDS sequence (opt2) from hemagglutinin__InfluenzaA__AHG96395

SEQ ID NO: 107065 - RNA, 1701 nt, Artificial Sequence; identical to SEQ ID NO: 107061
  derived and/or modified CDS sequence (opt2) from hemagglutinin__InfluenzaA__AHG96407

SEQ ID NO: 107066 - RNA, 1701 nt, Artificial Sequence; identical to SEQ ID NO: 107061
  derived and/or modified CDS sequence (opt2) from hemagglutinin__InfluenzaA__AHG96419

SEQ ID NO: 107067 - RNA, 1701 nt, Artificial Sequence; identical to SEQ ID NO: 107061
  derived and/or modified CDS sequence (opt2) from hemagglutinin__InfluenzaA__AHG96431

SEQ ID NO: 107068 - RNA, 1701 nt, Artificial Sequence; identical to SEQ ID NO: 107061
  derived and/or modified CDS sequence (opt2) from hemagglutinin__InfluenzaA__AHG96443

SEQ ID NO: 107069 - RNA, 1701 nt, Artificial Sequence; identical to SEQ ID NO: 107061
  derived and/or modified CDS sequence (opt2) from hemagglutinin__InfluenzaA__AHG96455

SEQ ID NO: 107070 - RNA, 1701 nt, Artificial Sequence; identical to SEQ ID NO: 107061
  derived and/or modified CDS sequence (opt2) from hemagglutinin__InfluenzaA__AHG96467

SEQ ID NO: 107071 - RNA, 1701 nt, Artificial Sequence; identical to SEQ ID NO: 107061
  derived and/or modified CDS sequence (opt2) from hemagglutinin__InfluenzaA__AHG96479

SEQ ID NO: 107072 - RNA, 1701 nt, Artificial Sequence; identical to SEQ ID NO: 107061
  derived and/or modified CDS sequence (opt2) from hemagglutinin__InfluenzaA__AHG96491

SEQ ID NO: 107073 - RNA, 1701 nt, Artificial Sequence; identical to SEQ ID NO: 98392
  derived and/or modified CDS sequence (opt2) from hemagglutinin__InfluenzaA__AHG96503

SEQ ID NO: 107074 - RNA, 1698 nt, Artificial Sequence; identical to SEQ ID NO: 103829
  derived and/or modified CDS sequence (opt2) from hemagglutinin__InfluenzaA__AHG96515

SEQ ID NO: 107075 - RNA, 1698 nt, Artificial Sequence; identical to SEQ ID NO: 103829
  derived and/or modified CDS sequence (opt2) from hemagglutinin__InfluenzaA__AHG96527

SEQ ID NO: 107076 - RNA, 1698 nt, Artificial Sequence; identical to SEQ ID NO: 103829
  derived and/or modified CDS sequence (opt2) from hemagglutinin__InfluenzaA__AHG96539

SEQ ID NO: 107077 - RNA, 1698 nt, Artificial Sequence; identical to SEQ ID NO: 103829
  derived and/or modified CDS sequence (opt2) from hemagglutinin__InfluenzaA__AHG96551

SEQ ID NO: 107078 - RNA, 1698 nt, Artificial Sequence; identical to SEQ ID NO: 107009
  derived and/or modified CDS sequence (opt2) from hemagglutinin__InfluenzaA__AHG96563

SEQ ID NO: 107079 - RNA, 1698 nt, Artificial Sequence; identical to SEQ ID NO: 103829
  derived and/or modified CDS sequence (opt2) from hemagglutinin__InfluenzaA__AHG96575

SEQ ID NO: 107080 - RNA, 1698 nt, Artificial Sequence; identical to SEQ ID NO: 103829
  derived and/or modified CDS sequence (opt2) from hemagglutinin__InfluenzaA__AHG96587

SEQ ID NO: 107081 - RNA, 1698 nt, Artificial Sequence; identical to SEQ ID NO: 103829
  derived and/or modified CDS sequence (opt2) from hemagglutinin__InfluenzaA__AHG96599

SEQ ID NO: 107082 - RNA, 1698 nt, Artificial Sequence; identical to SEQ ID NO: 103829
  derived and/or modified CDS sequence (opt2) from hemagglutinin__InfluenzaA__AHG96611

SEQ ID NO: 107083 - RNA, 1698 nt, Artificial Sequence; identical to SEQ ID NO: 103829
  derived and/or modified CDS sequence (opt2) from hemagglutinin__InfluenzaA__AHG96623

SEQ ID NO: 107084 - RNA, 1698 nt, Artificial Sequence; identical to SEQ ID NO: 103829
  derived and/or modified CDS sequence (opt2) from hemagglutinin__InfluenzaA__AHG96635

SEQ ID NO: 107085 - RNA, 1698 nt, Artificial Sequence; identical to SEQ ID NO: 103829
  derived and/or modified CDS sequence (opt2) from hemagglutinin__InfluenzaA__AHG96647

SEQ ID NO: 107086 - RNA, 1698 nt, Artificial Sequence; identical to SEQ ID NO: 103829
  derived and/or modified CDS sequence (opt2) from hemagglutinin__InfluenzaA__AHG96659

SEQ ID NO: 107087 - RNA, 1698 nt, Artificial Sequence; identical to SEQ ID NO: 103829
  derived and/or modified CDS sequence (opt2) from hemagglutinin__InfluenzaA__AHG96671

SEQ ID NO: 107088 - RNA, 1698 nt, Artificial Sequence; identical to SEQ ID NO: 103829
  derived and/or modified CDS sequence (opt2) from hemagglutinin__InfluenzaA__AHG96683

SEQ ID NO: 107089 - RNA, 1701 nt, Artificial Sequence; identical to SEQ ID NO: 107061
  derived and/or modified CDS sequence (opt2) from hemagglutinin__InfluenzaA__AHG96695

SEQ ID NO: 107090 - RNA, 1701 nt, Artificial Sequence; identical to SEQ ID NO: 107061
  derived and/or modified CDS sequence (opt2) from hemagglutinin__InfluenzaA__AHG96707

SEQ ID NO: 107091 - RNA, 1701 nt, Artificial Sequence; identical to SEQ ID NO: 107061
  derived and/or modified CDS sequence (opt2) from hemagglutinin__InfluenzaA__AHG96719

SEQ ID NO: 107092 - RNA, 1701 nt, Artificial Sequence; identical to SEQ ID NO: 107061
  derived and/or modified CDS sequence (opt2) from hemagglutinin__InfluenzaA__AHG96731

SEQ ID NO: 107093 - RNA, 1701 nt, Artificial Sequence; identical to SEQ ID NO: 107061
  derived and/or modified CDS sequence (opt2) from hemagglutinin__InfluenzaA__AHG96743

SEQ ID NO: 107094 - RNA, 1701 nt, Artificial Sequence; identical to SEQ ID NO: 107061
  derived and/or modified CDS sequence (opt2) from hemagglutinin__InfluenzaA__AHG96755

SEQ ID NO: 107095 - RNA, 1701 nt, Artificial Sequence; identical to SEQ ID NO: 107061
  derived and/or modified CDS sequence (opt2) from hemagglutinin__InfluenzaA__AHG96767

SEQ ID NO: 107096 - RNA, 1701 nt, Artificial Sequence; identical to SEQ ID NO: 107061
  derived and/or modified CDS sequence (opt2) from hemagglutinin__InfluenzaA__AHG96779

SEQ ID NO: 107097 - RNA, 1701 nt, Artificial Sequence
  derived and/or modified CDS sequence (opt2) from hemagglutinin__InfluenzaA__AHG96791
augaagaccaucaucgcccucuccuacauccucugccucgucuucgcccagaagcuccccggcaacgacaacuccaccgccacccucugccucggccaccacgccguccccaacggcaccaucgucaagaccaucaccaacgaccagaucgaggucaccaacgccaccgagcucguccaguccuccuccaccggcggcaucugcgacuccccccaccagauccucgacggcgagaacugcacccucaucgacgcccuccucggcgacccccagugcgacggcuuccagaacaagaagugggaccucuucgucgagcgcuccaaggccuacuccaacugcuaccccuacgacguccccgacuacgccucccuccgcucccucgucgccuccuccggcacccucgaguucaacgacgaguccuucaacuggaccggcgucacccagaacggcaccuccuccuccugcaagcgccgcuccaacaacuccuucuucucccgccucaacuggcucacccagcucaaguucaaguaccccgcccucaacgucaccaugcccaacaacgagaaguucgacaagcucuacaucuggggcguccaccaccccgucaccgacaacgaccagaucuuccucuacgcccaggccuccggccgcaucaccgucuccaccaagcgcucccagcagaccgucauccccaacaucggcucccgcccccgcauccgcaacauccccucccgcaucuccaucuacuggaccaucgucaagcccggcgacauccuccucaucaacuccaccggcaaccucaucgccccccgcggcuacuucaagauccgcuccggcaaguccuccaucaugcgcuccgacgcccccaucggcaagugcaacuccgagugcaucacccccaacggcuccauccccaacgacaagcccuuccagaacgucaaccgcaucaccuacggcgccugcccccgcuacgucaagcagaacacccucaagcucgccaccggcaugcgcaacguccccgagaagcagacccgcggcaucuucggcgccaucgccggcuucaucgagaacggcugggagggcauggucgacggcugguacggcuuccgccaccagaacuccgagggcaucggccaggccgccgaccucaaguccacccaggccgccaucaaccagaucaacggcaagcucaaccgccucaucggcaagaccaacgagaaguuccaccagaucgagaaggaguucuccgaggucgagcgccgcauccaggaccucgagaaguacgucgaggacaccaagaucgaccucugguccuacaacgccgagcuccucgucgcccucgagaaccagcacaccaucgaccucaccgacuccgagaugaacaagcucuucgagcgcaccaagaagcagcuccgcgagaacgccgaggacaugggcaacggcugcuucaagaucuaccacaagugcgacaacgccugcaucggcuccauccgcaacggcaccuacgaccacgacgucuaccgcgacgaggcccucaacaaccgcuuccagaucaagggcgucgagcucaaguccggcuacaaggacuggauccucuggaucuccuucgccaucuccugcuuccuccucugcgucgcccuccucggcuucaucaugugggccugccagaagggcaacauccgcugcaacaucugcaucuga

SEQ ID NO: 107098 - RNA, 1701 nt, Artificial Sequence; identical to SEQ ID NO: 107061
  derived and/or modified CDS sequence (opt2) from hemagglutinin__InfluenzaA__AHG96803

SEQ ID NO: 107099 - RNA, 1701 nt, Artificial Sequence; identical to SEQ ID NO: 107061
  derived and/or modified CDS sequence (opt2) from hemagglutinin__InfluenzaA__AHG96815

SEQ ID NO: 107100 - RNA, 1701 nt, Artificial Sequence; identical to SEQ ID NO: 107061
  derived and/or modified CDS sequence (opt2) from hemagglutinin__InfluenzaA__AHG96827

SEQ ID NO: 107101 - RNA, 1701 nt, Artificial Sequence; identical to SEQ ID NO: 107061
  derived and/or modified CDS sequence (opt2) from hemagglutinin__InfluenzaA__AHG96839

SEQ ID NO: 107102 - RNA, 1701 nt, Artificial Sequence; identical to SEQ ID NO: 107061
  derived and/or modified CDS sequence (opt2) from hemagglutinin__InfluenzaA__AHG96851

SEQ ID NO: 107103 - RNA, 1701 nt, Artificial Sequence; identical to SEQ ID NO: 107061
  derived and/or modified CDS sequence (opt2) from hemagglutinin__InfluenzaA__AHG96863

SEQ ID NO: 107104 - RNA, 1701 nt, Artificial Sequence; identical to SEQ ID NO: 107061
  derived and/or modified CDS sequence (opt2) from hemagglutinin__InfluenzaA__AHG96875

SEQ ID NO: 107105 - RNA, 1701 nt, Artificial Sequence; identical to SEQ ID NO: 107061
  derived and/or modified CDS sequence (opt2) from hemagglutinin__InfluenzaA__AHG96887

SEQ ID NO: 107106 - RNA, 1701 nt, Artificial Sequence; identical to SEQ ID NO: 107061
  derived and/or modified CDS sequence (opt2) from hemagglutinin__InfluenzaA__AHG96899

SEQ ID NO: 107107 - RNA, 1701 nt, Artificial Sequence; identical to SEQ ID NO: 107061
  derived and/or modified CDS sequence (opt2) from hemagglutinin__InfluenzaA__AHG96911

SEQ ID NO: 107108 - RNA, 1701 nt, Artificial Sequence; identical to SEQ ID NO: 107061
  derived and/or modified CDS sequence (opt2) from hemagglutinin__InfluenzaA__AHG96923

SEQ ID NO: 107109 - RNA, 1701 nt, Artificial Sequence; identical to SEQ ID NO: 107061
  derived and/or modified CDS sequence (opt2) from hemagglutinin__InfluenzaA__AHG96935

SEQ ID NO: 107110 - RNA, 1701 nt, Artificial Sequence; identical to SEQ ID NO: 107061
  derived and/or modified CDS sequence (opt2) from hemagglutinin__InfluenzaA__AHG96947

SEQ ID NO: 107111 - RNA, 1701 nt, Artificial Sequence; identical to SEQ ID NO: 107061
  derived and/or modified CDS sequence (opt2) from hemagglutinin__InfluenzaA__AHG96959

SEQ ID NO: 107112 - RNA, 1701 nt, Artificial Sequence; identical to SEQ ID NO: 107061
  derived and/or modified CDS sequence (opt2) from hemagglutinin__InfluenzaA__AHG96971

SEQ ID NO: 107113 - RNA, 1701 nt, Artificial Sequence; identical to SEQ ID NO: 107061
  derived and/or modified CDS sequence (opt2) from hemagglutinin__InfluenzaA__AHG96983

SEQ ID NO: 107114 - RNA, 1701 nt, Artificial Sequence; identical to SEQ ID NO: 107061
  derived and/or modified CDS sequence (opt2) from hemagglutinin__InfluenzaA__AHG96995

SEQ ID NO: 107115 - RNA, 1701 nt, Artificial Sequence; identical to SEQ ID NO: 107061
  derived and/or modified CDS sequence (opt2) from hemagglutinin__InfluenzaA__AHG97007

SEQ ID NO: 107116 - RNA, 1701 nt, Artificial Sequence; identical to SEQ ID NO: 107061
  derived and/or modified CDS sequence (opt2) from hemagglutinin__InfluenzaA__AHG97019

SEQ ID NO: 107117 - RNA, 1701 nt, Artificial Sequence; identical to SEQ ID NO: 107061
  derived and/or modified CDS sequence (opt2) from hemagglutinin__InfluenzaA__AHG97031

SEQ ID NO: 107118 - RNA, 1701 nt, Artificial Sequence; identical to SEQ ID NO: 107061
  derived and/or modified CDS sequence (opt2) from hemagglutinin__InfluenzaA__AHG97043

SEQ ID NO: 107119 - RNA, 1701 nt, Artificial Sequence
  derived and/or modified CDS sequence (opt2) from hemagglutinin__InfluenzaA__AHH00866
augaagaccaucaucgcccucuccuacauccucugccucgccuucgcccagaagcuccccggcaacgacaacuccaccgccacccucugccucggccaccacgccguccccaacggcacccucgucaagaccaucaccaacgaccagaucgaggucaccaacgccaccgagcucguccaguccuccuccaccggccgcaucugcgacuccccccaccagauccucgacggcgagaacugcacccucaucgacgcccuccucggcgacccccacugcgacggcuuccagaacaaggagugggaccucuucgucgagcgcuccaaggccuacuccaacugcuaccccuacgacguccccgacuacgccucccuccgcucccucgucgccuccuccggcacccucgaguucaacaacgaguccuucaacuggaccggcgucgcccagaacggcaccuccuccgccugcaagcgccgcuccaucaaguccuucuucucccgccucaacuggcuccaccagcucgagaaccgcuaccccgcccucaacgucaccaugcccaacaacgacaaguucgacaagcucuacaucuggggcguccaccaccccuccaccgacuccgaccagaucuccgucuacgcccaggccuccggccgcgucaccgucuccaccaagcgcucccagcagaccgucauccccaacaucggcucccgccccuggguccgcggcaucuccucccgcaucuccaucuacuggaccaucgucaaccccggcgacauccuccucaucaacuccaccggcaaccucaucgccccccgcggcuacuucaagauccgcuccggcaaguccuccaucaugcgcuccgacgcccccaucggcaagugcaacuccgagugcaucacccccaacggcuccauccccaacgacaagcccuuccagaacgucaaccgcaucaccuacggcgccugcccccgcuacgucaagcagaacacccucaagcucgccaccggcaugcgcaacguccccgagaagcagacccgcggcaucuucggcgccaucgccggcuucaucgagaacggcugggagggcaugauggacggcugguacggcuuccgccaccagaacuccgagggcaccggccaggccgccgaccucaaguccacccaggccgccaucaaccagaucaacggcaagcucaacaagcucaucgagaagaccaacgagaaguuccaccagaucgagaaggaguucuccgaggucgagggccgcauccaggaccucgagaaguacgucgaggacaccaagaucgaccucugguccuacaacgccgagcuccucgucgcccucgagaaccagcacaccaucgaccucaccgacuccgagaugaacaagcucuucgagcgcacccgcaagcagcuccgcgagaacgccgaggacaugggcaacggcugcuucaagaucuaccacaagugcgacaacgccugcaucggcuccauccgcaacggcaccuacgaccacgacgucuaccgcgacgaggcccucaacaaccgcuuccagaucaagggcgucgagcucaaguccggcuacaaggacuggauccucuggaucuccuucgccaucuccugcuuccuccucugcgucguccuccucggcuucaucaugugggccugccagaagggcaacauccgcugcaacaucugcaucuga

SEQ ID NO: 107120 - RNA, 1701 nt, Artificial Sequence
  derived and/or modified CDS sequence (opt2) from hemagglutinin__InfluenzaA__AHH00870
augaagaccaucaucgcccucuccuacauccucugccucgccuucgcccagaagcuccccggcaacgacaacuccaccgccacccucugccucggccaccacgccguccccaacggcacccucgucaagaccaucaccaacgaccagaucgaggucaccaacgccaccgagcucguccaguccuccuccaccggccgcaucugcgacuccccccaccagauccucgacggcgagaacugcacccucaucgacgcccuccucggcgacccccacugcgacggcuuccagaacaaggagugggaccucuucgucgagcgcuccaaggccuacuccaacugcuaccccuacgacguccccgacuacgccucccuccgcucccucgucgccuccuccggcacccucgaguucaacaacgaguccuucaacuggaccggcgucgcccagaacggcaccuccuccgccugcaagcgccgcuccaucaaguccuucuucucccgccucaacuggcuccaccagcucgagaaccgcuaccccgcccucaacgucaccaugcccaacaacgacaaguucgacaagcucuacaucuggggcguccaccaccccuccaccgacuccgaccagaucuccgucuacgcccaggccuccggccgcgucaccgucuccaccaagcgcucccagcagaccgucauccccaacaucggcucccgccccuggguccgcggcaucuccucccgcaucuccaucuacuggaccaucgucaagcccggcgacauccuccucaucaacuccaccggcaaccucaucgccccccgcggcuacuucaagauccgcuccggcaaguccuccaucaugcgcuccgacgcccccaucggcaagugcaacuccgagugcaucacccccaacggcuccauccccaacgacaagcccuuccagaacgucaaccgcaucaccuacggcgccugcccccgcuacgucaagcagaacacccucaagcucgccaccggcaugcgcaacguccccgagaagcagacccgcggcaucuucggcgccaucgccggcuucaucgagaacggcugggagggcaugauggacggcugguacggcuuccgccaccagaacuccgagggcaccggccaggccgccgaccucaaguccacccaggccgccaucaaccagaucaacggcaagcucaacaagcucaucgagaagaccaacgagaaguuccaccagaucgagaaggaguucuccgaggucgagggccgcauccaggaccucgagaaguacgucgaggacaccaagaucgaccucugguccuacaacgccgagcuccucgucgcccucgagaaccagcacaccaucgaccucaccgacuccgagaugaacaagcucuucgagcgcacccgcaagcagcuccgcgagaacgccgaggacaugggcaacggcugcuucaagaucuaccacaagugcgacaacgccugcaucggcuccauccgcaacggcaccuacgaccacgacgucuaccgcgacgaggcccucaacaaccgcuuccagaucaagggcgucgagcucaaguccggcuacaaggacuggauccucuggaucuccuucgccaucuccugcuuccuccucugcgucguccuccucggcuucaucaugugggccugccagaagggcaacauccgcugcaacaucugcaucuga

SEQ ID NO: 107121 - RNA, 1701 nt, Artificial Sequence
  derived and/or modified CDS sequence (opt2) from hemagglutinin__InfluenzaA__AHJ57430
augaaggccauccucgucguccuccucuacaccuucgccaccgccaacgccgacacccucugcaucggcuaccacgccaacaacuccaccgacaccgucgacaccguccucgagaagaacgucaccgucacccacuccgucaaccuccucgaggacaagcacaacggcaagcucugccgccuccgcggcgucgccccccuccaccucggcaagugcaacaucgccggcuggauccucggcaaccccgagugcgagucccucuccaccgccuccuccugguccuacaucgucgagaccuccuccuccgacaacggcaccugcuaccccggcgacuucaucaacuacgaggagcuccgcgagcagcucuccuccgucuccuccuucgagcgcuucgagaucucccccaagaccuccuccuggcccaaccacgacuccaacaagggcguccgcgccgccugcccccacgccggcgccaaguccuucuacaagaaccucaucuggcucgucaagaagggcaacuccuaccccaagcucuccaaguccuacaucaacgacaagggcaaggagguccucguccucuggggcauccaccaccccuccaccuccgccgaccagcagucccucuaccagaacgccgacgccuacgucuucgucggcaccucccgcuacuccaagaaguucaagcccgagaucgccauccgccccaagguccgcggccaggagggccgcaugaacuacuacuggacccucgucgagcccggcgacaagaucaccuucgaggccaccggcaaccucgucgucccccgcuacgccuucgccauggagcgcaacgccgccuccggcaucaucaucuccgacacccccguccacgacugcaacaccaccugccagacccccaagggcgccgucaacaccucccuccccuuccagaacauccaccccaucaccaucggcaagugccccaaguacgucaaguccaccaagcuccgccucgccaccggccuccgcaacauccccuccauccagucccgcggccucuucggcgccaucgccggcuucaucgagggcggcuggaccggcauggucgacggcugguacggcuaccaccaccagaacgagcagggcuccggcuacgccgccgaccucaaguccacccagaacgccaucgacgagaucaccaacaaggucaacuccgucaucgagaagaugaacacccaguucaccgccgucggcaaggaguucaaccaccucgagaagcgcaucgagaaccucaacaagaaggucgacgacggcuuccucgacaucuggaccuacaacgccgagcuccucguccuccucgagaacgagcgcacccucgacuaccacgacuccaacgucaagaaccucuacgagaagguccgcucccagcucaagaacaacgccaaggagaucggcaacggcugcuucgaguucuaccacaagugcaacaacaccugcauggaguccgucaagaacggcaccuacgacuaccccaaguacuccgaggaggccaagcucaaccgcgagaagaucgacggcgucaagcucgaguccacccgcaucuaccagauccucgccaucuacuccaccgucgccuccucccucguccucgucgucucccucggcgccaucuccuucuggaugugcuccaacggcucccuccagugccgcaucugcaucuga

SEQ ID NO: 107122 - RNA, 1701 nt, Artificial Sequence
  derived and/or modified CDS sequence (opt2) from hemagglutinin__InfluenzaA__AHJ57431
augaaggccauccucgucguccuccucuacaccuucgccaccgccaacgccgacacccucugcaucggcuaccacgccaacaacuccaccgacaccgucgacaccguccucgagaagaacgucaccgucacccacuccgucaaccuccucgaggacaagcacaacggcaagcucugcaagcuccgcggcgucgccccccuccaccucggcaagugcaacaucgccggcuggauccucggcaaccccgagugcgagucccucuccaccgccuccuccugguccuacaucgucgagaccuccuccuccgacaacggcaccugcuaccccggcgacuucaucgacuacgaggagcuccgcgagcagcucuccuccgucuccuccuucgagcgcuucgagaucuuccccaagaccuccuccuggcccaaccacgacuccaacaagggcguccgcgccgccugcccccacgccggcgccaaguccuucuacaagaaccucaucuggcucgucaagaagggcaacuccuaccccaagcucucccaguccuacaucaacgacaagggcaaggagguccucguccucuggggcauccaccaccccuccaccuccgccgaccagcagucccucuaccagaacgccgacgccuacgucuucgucggcaccucccgcuacuccaagaaguucaagcccgagaucgccauccgccccaagguccgcgaccaggagggccgcaugaacuacuacuggacccucgucgagcccggcgacaagaucaccuucgaggccaccggcaaccucgucgucccccgcuacgccuucgccauggagcgcaacgccggcuccggcaucaucaucuccgacacccccguccacgacugcaacaccaccugccagacccccaagggcgccaucaacaccucccuccccuuccagaacauccaccccaucaccaucggcaagugccccaaguacgucaaguccaccaagcuccgccucgccaccggccuccgcaacauccccuccauccagucccgcggccucuucggcgccaucgccggcuucaucgagggcggcuggaccggcauggucgacggcugguacggcuaccaccaccagaacgagcagggcuccggcuacgccgccgaccucaaguccacccagaacgccaucgacaagaucaccaacaaggucaacuccgucaucgagaagaugaacacccaguucaccgccgucggcaaggaguucaaccaccucgagaagcgcaucgagaaccucaacaagaaggucgacgacggcuuccucgacaucuggaccuacaacgccgagcuccucguccuccucgagaacgagcgcacccucgacuaccacgacuccaacgucaagaaccucuacgagaagguccgcaaccagcucaagaacaacgccaaggagaucggcaacggcugcuucgaguucuaccacaagugcgacaacaccugcauggaguccgucaagaacggcaccuacgacuaccccaaguacuccgaggaggccaagcucaaccgcgagaagaucgacggcgucaagcucgaguccacccgcaucuaccagauccucgccaucuacuccaccgucgccuccucccucguccucgucgucucccucggcgccaucuccuucuggaugugcuccaacggcucccuccagugccgcaucugcaucuga

SEQ ID NO: 107123 - RNA, 1701 nt, Artificial Sequence
  derived and/or modified CDS sequence (opt2) from hemagglutinin__InfluenzaA__AHJ57432
augaaggccauccucgucguccuccucuacaccuucgccaccgccaacgccgacacccucugcaucggcuaccacgccaacaacuccaccgacaccgucgacaccguccucgagaagaacgucaccgucacccacuccgucaaccuccucgaggacaagcacaacggcaagcucugcaagcuccgcggcgucgccccccuccaccucggcaagugcaacaucgccggcuggauccucggcaaccccgagugcgagucccucuccaccgccuccuccugguccuacaucgucgagaccuccuccuccgacaacggcaccugcuaccccggcgacuucaucgacuacgaggagcuccgcgagcagcucuccuccgucuccuccuucgagcgcuucgagaucuuccccaagaccuccuccuggcccaaccacgacuccaacaagggcgucaccgccgccugcccccacgccggcgccaaguccuucuacaagaaccucaucuggcucgucaagaagggcaacuccuaccccaagcucuccaaguccuacaucaacgacaagggcaaggagguccucguccucuggggcauccaccaccccuccaccaccgccgaccagcagucccucuaccagaacgccgacgccuacgucuucgucggcaccucccgcuacuccaagaaguucaagccccagaucgccauccgccccaagguccgcgaccaggagggccgcaugaacuacuacuggacccucgucgagcccggcgacaagaucaccuucgaggccaccggcaaccucgucgucccccgcuacgccuucgcccucgagcgcaacgccggcuccggcaucaucaucuccgacacccccguccacgacugcaacaccaccugccagacccccaagggcgccaucaacaccucccuccccuuccagaacauccaccccaucaccaucggcaagugccccaaguacgucaaguccaccaagcuccgccucgccaccggccuccgcaacguccccuccauccagucccgcggccucuucggcgccaucgccggcuucaucgagggcggcuggaccggcauggucgagggcugguacggcuaccaccaccagaacgagcagggcuccggcuacgccgccgaccucaaguccacccagaacgccaucgacaagaucaccaacaaggucaacuccgucaucgagaagaugaacacccaguucaccgccgucggcaaggaguucaaccaccucgagaagcgcaucgagaaccucaacaagaaggucgacgacggcuuccucgacaucuggaccuacaacgccgagcuccucguccuccucgagaacgagcgcacccucgacuaccacgacuccaacgucaagaaccucuacgagaagguccgcaaccagcucaagaacaacgccaaggagaucggcaacggcugcuucgaguucuaccacaagugcgacaacaccugcauggaguccgucaagaacggcaccuacgacuaccccaaguacuccgaggaggccaagcucaaccgcgagaagaucgacggcgucaagcucgaguccacccgcaucuaccagauccucgccaucuacuccaccgucgccuccucccucguccucgucgucucccucggcgccaucuccuucuggaugugcuccaacggcucccuccagugccgcaucugcaucuga

SEQ ID NO: 107124 - RNA, 1701 nt, Artificial Sequence
  derived and/or modified CDS sequence (opt2) from hemagglutinin__InfluenzaA__AHJ57433
augaaggccauccucgucguccuccucuacaccuucgccaccgccaacgccgacacccucugcaucggcuaccacgccaacaacuccaccgacaccgucgacaccguccucgagaagaacgucaccgucacccacuccgucaaccuccucgaggacaagcacaacggcaagcucugcaagcuccgcggcgucgccccccuccaccucggcaagugcaacaucgccggcuggauccucggcaaccccgagugcgagucccucuccaccgccuccuccugguccuacaucgucgagaccuccuccuccgacaacggcaccugcuaccccggcgacuucaucaacuacgaggagcuccgcgagcagcucuccuccgucuccuccuucgagcgcuucgagaucuuccccaagaccuccuccuggcccaaccacgacuccaacaagggcgucaccgccgccugcccccacgccggcgccaaguccuucuacaagaaccucaucuggcucgucaaggagggcaacuccuaccccaagcucuccaaguccuacaucaacgacaagggcaaggagguccucguccucuggggcauccaccaccccuccaccaccgccgaccagcagucccucuaccagaacgccgacgccuacgucuucgucggcaccucccgcuacuccaagaaguucaagcccgagaucgccauccgccccaagguccgcgaccaggagggccgcaugaacuacuacuggacccucaucgagcccggcgacaagaucaccuucgaggccaccggcaaccucgucgucccccgcuacgccuucgccauggagcgcaacgccggcuccggcaucaucaucuccgacacccccguccacgacugcaacaccaccugccagacccccgagggcgccaucaacaccucccuccccuuccagaacauccaccccaucaccaucggcaagugccccaaguacgucaaguccaccaagcuccgccucgccaccggccuccgcaacguccccuccauccagucccgcggccucuucggcgccaucgccggcuucaucgagggcggcuggaccggcauggucgacggcugguacggcuaccaccaccagaacgagcagggcuccggcuacgccgccgaccucaaguccacccagaacgccaucgacaagaucaccaacaaggucaacuccgucaucgagaagaugaacacccaguucaccgccgucggcaaggaguucaaccaccucgagaagcgcaucgagaaccucaacaagaaggucgacgacggcuuccucgacaucuggaccuacaacgccgagcuccucguccuccucgagaacgagcgcacccucgacuaccacgacuccaacgucaagaaccucuacgagaagguccgcaaccagcucaagaacaacgccaaggagaucggcaacggcugcuucgaguucuaccacaagugcgacaacaccugcauggaguccgucaagaacggcaccuacgacuaccccaaguacuccgaggaggccaagcucaaccgcgagaagaucgacggcgucaagcucgaguccacccgcaucuaccagauccucgccaucuacuccaccgucgccuccucccucguccucgucgucucccucggcgccaucuccuucuggaugugcuccaacggcucccuccagugccgcaucugcaucuga

SEQ ID NO: 107125 - RNA, 1701 nt, Artificial Sequence
  derived and/or modified CDS sequence (opt2) from hemagglutinin__InfluenzaA__AHJ57434
augaaggccauccucgucguccuccucuacaccuucgccaccgccaacgccgacacccucugcaucggcuaccacgccaacaacuccaccgacaccgucgacaccguccucgagaagaacgucaccgucacccacuccgucaacccccucgaggacaagcacaacggcaagcucugcaagcuccgcggcgucgccccccuccaccucggcaagugcaacaucgccggcuggauccucggcaaccccgagugcgagucccucuccaccgccuccuccugguccuacaucgucgagaccuccuccuccgacaacggcaccugcuaccccggcgacuucaucgacuacgaggagcuccgcgagcagcucuccuccgucuccuccuucgagcgcuucgagaucuuccccaagaccuccuccuggcccaaccacgacuccaacaagggcgucaccgccgccugcccccacgccggcgccaaguccuucuacaagaaccucaucuggcucgucaaggagggcaacuccuaccccaagcucuccaaguccuacaucaacgacaagggcaaggagguccucguccucuggggcauccaccaccccuccaccaccgccgaccagcagucccucuaccagaacgccgacgccuacgucuucgucggcaccucccgcuacuccaagaaguucaagcccgagaucgccauccgccccaagguccgcgaccaggagggccgcaugaacuacuacuggacccucgucgagcccggcgacaagaucaccuucgaggccaccggcaaccucgucgucccccgcuacgccuucgccauggagcgcaacgccggcuccggcaucaucaucuccgacacccccguccacgacugcaacaccaccugccagacccccgagggcgccaucaacaccucccuccccuuccagaacauccaccccaucaccaucggcaagugccccaaguacgucaaguccaccaagcuccgccucgccaccggccuccgcaacguccccuccauccagucccgcggccucuucggcgccaucgccggcuucaucgagggcggcuggaccggcauggucgacggcugguacggcuaccaccaccagaacgagcagggcuccggcuacgccgccgaccucaaguccacccagaacgccaucgacaagaucaccaacaaggucaacuccgucaucgagaagaugaacacccaguucaccgccgucggcaaggaguucaaccaccucgagaagcgcaucgagaaccucaacaagaaggucgacgacggcuuccucgacaucuggaccuacaacgccgagcuccucguccuccucgagaacgagcgcacccucgacuaccacgacuccaacgucaagaaccucuacgagaagguccgcaaccagcucaagaacaacgccaaggagaucggcaacggcugcuucgaguucuaccacaagugcgacaacaccugcauggaguccgucaagaacggcaccuacgacuaccccaaguacuccgaggaggccaagcucaaccgcgagaagaucgacggcgucaagcucgaguccacccgcaucuaccagauccucgccaucuacuccaccgucgccuccucccucguccucgucgucucccucggcgccaucuccuucuggaugugcuccaacggcucccuccagugccgcaucugcaucuga

SEQ ID NO: 107126 - RNA, 1701 nt, Artificial Sequence
  derived and/or modified CDS sequence (opt2) from hemagglutinin__InfluenzaA__AHJ57435
augaaggccauccucgucguccuccucuacaccuucgccaccgccaacgccgacacccucugcaucggcuaccacgccaacaacuccaccgacaccgucgacaccguccucgagaagaacgucaccgucacccacuccgucaaccuccucgaggacaagcacaacggcaagcucugcaagcuccgcggcgucgccccccuccaccucggcaagugcaacaucgccggcuggauccucggcaaccccgagugcgagucccucuccaccgccuccuccugguccuacaucgucgagaccuccuccuccgacaacggcaccugcuaccccggcgacuucaucaacuacgaggagcuccgcgagcagcucuccuccgucuccuccuucgagcgcuucgagaucuuccccaagaccuccuccuggcccaaccacgacuccaaccgcggcgucaccgccgccugcccccacgccggcgccaaguccuucuacaagaaccucaucuggcucgucaagaagggcaacuccuaccccaagcucucccaguccuacaucaacgacaagggcaaggagguccucguccucuggggcauccaccaccccuccaccaccgccgaccagcagucccucuaccagaacgccgacgccuacgucuucgucggcaccucccgcuacuccaagaaguucaagcccgagaucgccauccgccccaagguccgcgaccaggagggccgcaugaacuacuacuggacccucgucgagcccggcgacaagaucaccuucgaggccaccggcaaccucgucgucccccgcuacgccuucgccauggagcgcaacgccggcuccggcaucaucaucuccgacacccccguccacgacugcaacaccaccugccagacccccgagggcgccaucaacaccucccuccccuuccagaacauccaccccaucaccaucggcaagugccccaaguacgucaaguccaccaagcuccgccucgccaccggccuccgcaacguccccuccauccagucccgcggccucuucggcgccaucgccggcuucaucgagggcggcuggaccggcauggucgacggcugguacggcuaccaccaccagaacgagcagggcuccggcuacgccgccgaccucaaguccacccagaacgccaucgacaagaucaccaacaaggucaacuccgucaucgagaagaugaacacccaguucaccgccgucggcaaggaguucaaccaccucgagaagcgcaucgagaaccucaacaagaaggucgacgacggcuuccucgacaucuggaccuacaacgccgagcuccucguccuccucgagaacgagcgcacccucgacuaccacgacuccaacgucaagaaccucuacgagaagguccgcaaccagcucaagaacaacgccaaggagaucggcaacggcugcuucgaguucuaccacaagugcgacaacaccugcauggaguccgucaagaacggcaccuacgacuaccccaaguacuccgaggaggccaagcucaaccgcgagaagaucgacggcgucaagcucgaguccacccgcaucuaccagauccucgccaucuacuccaccgucgccuccucccucguccucgucgucucccucggcgccaucuccuucuggaugugcuccaacggcucccuccagugccgcaucugcaucuga

SEQ ID NO: 107127 - RNA, 1701 nt, Artificial Sequence
  derived and/or modified CDS sequence (opt2) from hemagglutinin__InfluenzaA__AHJ57436
augaagaccaucaucgcccucuccuacauccucugccucgucuucgcccagaagcuccccggcaacgacaacuccaccgccacccucugccucggccaccacgccguccccaacggcaccaucgucaagaccaucaccaacgaccagaucgaggucaccaacgccaccgagcucguccaguccuccuccaccggcgagaucugcgacuccccccaccagauccucgacggcgagaacugcacccucaucgacgcccuccucggcgacccccagugcgacggcuuccagaacaagaagugggaccucuucgucgagcgcuccaaggccuacuccaacugcuaccccuacgacguccccgacuacgccucccuccgcucccucgucgccuccuccggcacccucgaguucaacaacgaguccuucaacuggaccggcgucacccagaacggcaccuccuccgccugcauccgccgcuccaacuccuccuucuucucccgccucaacuggcucacccaccucaacuucaaguaccccgcccucaacgucaccauccccaacaacgagcaguucgacaagcucuacaucuggggcguccaccaccccggcaccgacaaggaccagaucuuccucuacgcccaggccuccggccgcaucaccgucuccaccaagcgcucccagcagaccgucauccccaacaucggcucccgcccccgcguccgcaacauccccucccgcaucuccaucuacuggaccaucgucaagcccggcgacauccuccucaucaacuccaccggcaaccucaucgccccccgcggcuacuucaagauccgcuccggcaaguccuccaucaugcgcuccgacgcccccaucggcaagugcaacuccgagugcaucacccccaacggcuccauccccaacgacaagcccuuccagaacgucaaccgcaucaccuacggcgccugcccccgcuacgucaagcagaacacccucaagcucgccaccggcaugcgcaacguccccgagaagcagacccgcggcaucuucggcgccaucgccggcuucaucgagaacggcugggagggcauggucgacggcugguacggcuuccgccaccagaacuccgagggccgcggccaggccgccgaccucaaguccacccaggccgccaucgaccagaucaacggcaagcucaaccgccucaucggcaagaccaacgagaaguuccaccagaucgagaaggaguucuccgaggucgagggccgcauccaggaccucgagaaguacgucgaggacaccaagaucgaccucugguccuacaacgccgagcuccucgucgcccucgagaaccagcacaccaucgaccucaccgacuccgagcucaacaagcucuucgagaagaccaagaagcagcuccgcgagaacgccgaggacaugggcaacggcugcuucaagaucuaccacaagugcgacaacgccugcaucggcuccauccgcaacggcaccuacgaccacgacgucuaccgcgacgaggcccucaacaaccgcuuccagaucaagggcgucgagcucaaguccggcuacaaggacuggauccucuggaucuccuucgccaucuccugcuuccuccucugcgucgcccuccucggcuucaucaugugggccugccagaagggcaacauccgcugcaacaucugcaucuga

SEQ ID NO: 107128 - RNA, 1701 nt, Artificial Sequence
  derived and/or modified CDS sequence (opt2) from hemagglutinin__InfluenzaA__AHJ57437
augaagaccaucaucgcccucuccuacauccucugccucgucuucgcccagaagcuccccggcaacgacaacuccaccgccacccucugccucggccaccacgccguccccaacggcaccaucgucaagaccaucaccaacgaccagaucgaggucaccaacgccaccgagcucguccagaacuccuccaccggcgagaucugcgacuccccccaccagauccucgacggcgagaacugcacccucaucgacgcccuccucggcgacccccagugcgacggcuuccagaacaagaagugggaccucuucgucgagcgcuccaaggccuacuccaacugcuaccccuacgacguccccgacuacgccucccuccgcucccucgucgccuccuccggcacccucgaguucaacaacgaguccuucaacuggaccggcgucacccagaacggcaccuccuccgccugcauccgccgcuccaacuccuccuucuucucccgccucaacuggcucacccaccucaacuucaaguaccccgcccucaacgucaccaugcccaacaacgagcaguucgacaagcucuacaucuggggcguccaccaccccggcaccgacaaggaccagaucuuccucuacgcccaguccuccggccgcaucaccgucuccaccaagcgcucccagcagaccgucauccccaacaucggcucccgcccccgcguccgcaacauccccucccgcaucuccaucuacuggaccaucgucaagcccggcgacauccuccucaucaacuccaccggcaaccucaucgccccccgcggcuacuucaagauccgcuccggcaaguccuccaucaugcgcuccgacgcccccaucggcaagugcaacuccgagugcaucacccccaacggcuccauccccaacgacaagcccuuccagaacgucaaccgcaucaccuacggcgccugcccccgcuacgucaagcaguccacccucaagcucgccaccggcaugcgcaacguccccgagaagcagacccgcggcaucuucggcgccaucgccggcuucaucgagaacggcugggagggcauggucgacggcugguacggcuuccgccaccagaacuccgagggccgcggccaggccgccgaccucaaguccacccaggccgccaucgaccagaucaacggcaagcucaaccgccucaucggcaagaccaacgagaaguuccaccagaucgagaaggaguucuccgaggucgagggccgcauccaggaccucgagaaguacgucgaggacaccaagaucgaccucugguccuacaacgccgagcuccucgucgcccucgagaaccagcacaccaucgaccucaccgacuccgagaugaacaagcucuucgagaagaccaagaagcagcucaaggagaacgccgaggacaugggcaacggcugcuucaagaucuaccacaagugcgacaacgccugcaucggcuccauccgcaacggcaccuacgaccacgacgucuaccgcgacgaggcccucaacaaccgcuuccagaucaagggcgucgagcucaaguccggcuacaaggacuggauccucuggaucuccuucgccaucuccugcuuccuccucugcgucgcccuccucggcuucaucaugugggccugccagaagggcaacauccgcugcaacaucugcaucuga

SEQ ID NO: 107129 - RNA, 1701 nt, Artificial Sequence
  derived and/or modified CDS sequence (opt2) from hemagglutinin__InfluenzaA__AHJ57438
augaagaccaucaucgcccucuccuacauccucugccucgucuucgcccagaagcuccccggcaacgacaacuccaccgccacccucugccucggccaccacgccguccccaacggcaccaucgucaagaccaucaccaacgaccagaucgaggucaccaacgccaccgagcucguccagaacuccuccaccggcgagaucugcgacuccccccaccagauccucgacggcgagaacugcacccucaucgacgcccuccucggcgacccccagugcgacggcuuccagaacaagaagugggaccucuucgucgagcgcuccaaggccuacuccaacugcuaccccuacgacguccccgacuacgccucccuccgcucccucgucgccuccuccggcacccucgaguucaacaacgaguccuucaacuggaccggcgucacccagaacggcaccuccuccgccugcauccgccgcuccaacuccuccuucuucucccgccucaaguggcucacccaccucaacuucaaguaccccgcccucaacgucaccaugcccaacaacgagcaguucgacaagcucuacaucuggggcguccaccaccccggcaccgacaaggaccagaucuuccucuacgcccaggccuccggccgcaucaccgucuccaccaagcgcucccagcaggccgucauccccaacaucggcucccgcccccgcauccgcaacauccccucccgcaucuccaucuacuggaccaucgucaagcccggcgacauccuccucaucaacuccaccggcaaccucaucgccccccgcggcuacuucaagauccgcuccggcaaguccuccaucaugcgcuccgacgcccccaucggcaagugcaacuccgagugcaucacccccaacggcuccauccccaacgacaagcccuuccagaacgucaaccgcaucaccuacggcgacugcccccgcuacgucaagcaguccacccucaagcucgccaccggcaugcgcaacguccccgagaagcagacccgcggcaucuucggcgccaucgccggcuucaucgagaacggcugggagggcauggucgacggcugguacggcuuccgccaccagaacuccgagggccgcggccaggccgccgaccucaaguccacccaggccgccaucgaccagaucaacggcaagcucaaccgccucaucggcaagaccaacgagaaguuccaccagaucgagaaggaguucuccgaggucgagggccgcauccaggaccucgagaaguacgucgaggacaccaagaucgaccucugguccuacaacgccgagcuccucgucgcccucgagaaccagcacaccaucgaccucaccgacuccgagaugaacaagcucuucgagaagaccaagaagcagcuccgcgagaacgccgaggacaugggcaacggcugcuucaagaucuaccacaagugcgacaacgccugcaccggcuccauccgcaacggcaccuacgaccacgacgucuaccgcgacgaggcccucaacaaccgcuuccagaucaagggcgucgaggucaaguccggcuacaaggacuggauccucuggaucuccuucgccaucuccugcuuccuccucugcgucgcccuccucggcuucaucaugugggccugccagaagggcaacauccgcugcaacaucugcaucuga

SEQ ID NO: 107130 - RNA, 1701 nt, Artificial Sequence
  derived and/or modified CDS sequence (opt2) from hemagglutinin__InfluenzaA__AHJ57651
augaucgccuucaucgucaucgccauccucgccgccaccggcaaguccgacaagaucugcaucggcuaccacgccaacaacuccaccaccaaggucgacaccauccucgagaagaacgucaccgucacccacuccgucgagcuccucgagaaccagaaggaggagcgcuucugcaagaucuccaacaaggccccccucgaccuccgcgacugcacccucgagggcuggauccucggcaacccccgcugcggcauccuccucgccgaccaguccugguccuacaucgucgagcgccccaacgcccgcaacggcaucugcuaccccggcacccucaacgaggucgaggagcucaaggcccucaucggcuccggcgagcgcgucgagcgcuucgagauguuccccaaguccaccugggccggcgucgacaccgacuccggcgucuccuccgccugcccccucggcaacggccccuccuucuaccgcaaccuccucuggaucaucaagcucaaguccuccgaguaccccgucauccgcggcaccuucaacaacaccggcgacaaguccauccucuacuucuggggcguccaccacccccccgucaccaccgagcaggaggcccucuacggcuccggcgaccgcuacguccgcaugggcaccgaguccaugaacuucgcccgcucccccgagaucgccgcccgccccgccgucaacggccagcgcggccgcaucgacuacuucugguccauccucaagcccggcgagacccucaacgucgaguccaacggcaaccucaucgcccccugguacgccuaccgcuucgucaacaaggacuccaagggcgccaucuuccgcuccacccuccccaucgagaacugcgacgccaccugccagaccaccgagggcgucauccgcaccaacaagaccuuccagaacgucuccccccucuggaucggcgagugccccaaguacgucaaguccaagucccuccgccucgccaccggccuccgcaacgucccccagaucgagacccgcggccucuucggcgccaucgccggcuucaucgagggcggcuggaccggcaugaucgacggcugguacggcuaccaccacgagaacucccagggcuccggcuacgccgccgaccgcgaguccacccagaaggccaucgacggcaucaccaacaaggucaacuccaucaucgacaagaugaacacccaguucgaggccgucggccacgaguucuccaaccucgagcgccgcaucgacaaccucaacaagcgcauggaggacggcuuccucgacgucuggaccuacaacgccgagcuccucguccuccucgagaacgagcgcacccucgacaugcacgacgccaacgucaagauccucuacgagaagguccgcucccagcuccgcgacaacgccaaggaccucggcaacggcugcuucgaguucuggcacaagugcgacaacgagugcaucgaguccgucaagaacggcaccuacaacuaccccaaguaccaguccgagucccgccucaaccgccagaccaucgaguccgucaagcucgagaaccucggcgucuaccagauccucgccaucuacuccaccgucuccuccucccucguccucgucggccucauccucgccaugggccucuggaugugcuccaacggcuccaugcagugccgcaucugcaucuga

SEQ ID NO: 107131 - RNA, 1701 nt, Artificial Sequence
  derived and/or modified CDS sequence (opt2) from hemagglutinin__InfluenzaA__AHJ57663
augaucgccuucaucgucaucgccacccucgucgccaccggcaaguccgacaagaucugcaucggcuaccacgccaacaacuccaccaccaaggucgacaccauccucgagaagaacgucaccgucacccacuccgucgagcuccucgagaaccagaaggaggagcgcuucugcaagaucuccaacaaggccccccucgaccuccgcgacugcacccucgagggcuggauccucggcaacccccgcugcggcauccuccucgccgaccaguccugguccuacaucgucgagcgccccaacgcccgcaacggcaucugcuaccccggcacccucaacgaggccgaggagcucaaggcccucaucggcuccggcgagcgcgucgagcgcuucgagauguuccccaaguccaccuggaccggcgucgacaccgaguccggcgucuccuccgccugcccccucggcaacggccccuccuucuaccgcaaccuccucuggaucaucaagcucaaguccuccgaguaccccgucauccgcggcaccuucaacaacaccggcgacaaguccauccucuacuucuggggcguccaccacccccccgucaccaccgagcagaacgcccucuacggcuccggcgaccgcuacguccgcaugggcaccgaguccaugaacuucgcccgcucccccgagaucgccgcccgccccgccgucaacggccagcgcggccgcaucgacuacuucugguccauccucaagcccggcgagacccucaacgucgaguccaacggcaaccucaucgcccccugguacgccuaccgcuucgucaacaaggacuccaagggcgccaucuuccgcuccaaccuccccaucgagaacugcgacgccaccugccagaccaccgagggcgucauccgcaccaacaagaccuuccagaacgucuccccccucuggaucggcgagugccccaaguacgucaaguccaagucccuccgccucgccaccggccuccgcaacgucccccagaucgagacccgcggccucuucggcgccaucgccggcuucaucgagggcggcuggaccggcaugaucgacggcugguacggcuaccaccacgagaacucccagggcuccggcuacgccgccgacaaggaguccacccagaaggccaucgacggcaucaccaacaaggucaacuccaucaucgacaagaugaacacccaguucgaggccgucggccacgaguucuccaaccucgagcgccgcaucgacaaccucaacaagcgcauggaggacggcuuccucgacgucuggaccuacaacgccgagcuccucguccuccucgagaacgagcgcacccucgaccuccacgacgccaacgucaagaaccuccacgagcgcgucaagucccagcuccgcgacaacgccaacgaccucggcaacggcugcuucgaguucuggcacaagugcgacaacgagugcauggaguccgucaagaacggcaccuacaacuaccccaaguaccaggccgagucccgccucaacaagcagaagaucgaguccgucaagcucgaggaguucggcgucuaccagauccucgccaucuacuccaccgucuccuccucccucguccucgucggccucaucauggccaugggccucuggaugugccccaacggcuccaugcagugccgcaucugcaucuga

SEQ ID NO: 107132 - RNA, 1701 nt, Artificial Sequence
  derived and/or modified CDS sequence (opt2) from hemagglutinin__InfluenzaA__AHJ57674
augaucgccuucaucgucaucgccauccucgucaccaccggcaaguccgacaagaucugcaucggcuaccacgccaacaacuccaccaccaaggucgacaccauccucgagaagaacgucaccgucacccacuccgucgagcuccucgagaaccagaaggaggagcgcuucugcaagaucuccaacaaggccccccucgaccuccgcgacugcacccucgagggcuggauccucggcaacccccgcugcggcauccuccucgccgaccaguccugguccuacaucgucgagcgccccaacgcccgcaacggcaucugcuaccccggcacccucaacgaggucgaggagcucaaggcccucaucggcuccggcgagcgcgucgagcgcuucgagauguuccccaaguccaccugggccggcgucgacaccaacuccggcgucuccuccgccugcccccucggcgagggccccuccuucuaccgcaaccuccucuggaucaucaagcacaccaccuccggcuaccccgucaucaagggcaccuaccgcaacaccggcgacaaguccguccucuacuucuggggcguccaccacccccccgacaccaccgagcagaacguccucuacggcuccggcaaccgcuacguccgcaugggcaccgaguccaugaacuucgcccgcucccccgagaucgccgcccgccccgccgucaacggccagcgcggccgcaucgacuacuucugguccauccucaagcccggcgagacccucaacgucgaguccaacggcaaccucaucgcccccugguacgccuaccgcuucgucaacaaggacuccaagggcgccaucuuccgcuccaaccuccccaucgagaacugcgacgccaccugccagaccaccgagggcgucauccgcaccaacaagaccuuccagaacgucuccccccucuggaucggcgagugccccaaguacgucaaguccaagucccuccgccucgccaccggccuccgcaacgucccccagaucgagacccgcggccucuucggcgccaucgccggcuucaucgagggcggcuggaccggcaugaucgacggcugguacggcuaccaccacgagaacucccagggcuccggcuacgccgccgaccgcgaguccacccagaaggccaucgacggcaucaccaacaaggucaacuccaucaucgacaagaugaacacccaguucgaggccgucggccacgaguucuccaaccucgagcgccgcaucgacaaccucaacaagcgcauggaggacggcuuccucgacgucuggaccuacaacgccgagcuccucguccuccucgagaacgagcgcacccucgaccuccacgacgccaacgucaagaaccuccacgagcgcguccgcucccagcuccgcgacaacgccaacgaccucggcaacggcugcuucgaguucuggcacaagugcgacaacgagugcauggaguccgucaagaacggcaccuacaacuaccccaaguaccaggccgagucccgccucaaccgccagaagaucgaguccgucaagcucgaggaguucggcgucuaccagauccucgccaucuacuccaccgucuccuccucccucguccucgucggccucaucauggccaugggccucuggaugugcuccaacggcuccaugcagugccgcaucugcaucuga

SEQ ID NO: 107133 - RNA, 1701 nt, Artificial Sequence
  derived and/or modified CDS sequence (opt2) from hemagglutinin__InfluenzaA__AHJ57686
augaucgccuucaucgucaucgccauccucgccgccaccggcaaguccgacaagaucugcaucggcuaccacgccaacaacuccaccaccaaggucgacaccauccucgagaagaacgucaccgucacccacuccgucgagcuccucgagaaccagaaggagggccgcuucugcaagaucuccaacaaggccccccucgaccuccgcgacugcacccucgagggcuggauccucggcaacccccgcugcggcauccuccucgccgaccaguccugguccuacaucgucgagcgccccaacgcccgcaacggcaucugcuaccccggcauccucaacgaggccgaggagcucaaggcccucaucggcuccggcgagcgcgucgagcgcuucgagauguuccccaaguccaccugggccggcgucgacaccaacuccggcgucuccuccgccugcccccucggcaacggccccuccuucuaccgcaaccuccucuggaucaucaagcucaaguccuccgccuaccccgucauccgcggcaccuucaacaacaccggcgacaaguccauccucuacuucuggggcguccaccacccccccgucgccaccgagcaggaggcccucuacggcuccggcaaccgcuacguccgcaugggcaccgaguccaugaacuucgcccgcaaccccgagaucgccgcccgccccgccgucaacggccagcgcggccgcaucgacuacuucugguccauccucaagcccggcgagacccucaacgucgaguccaacggcaaccucaucgcccccugguacgccuaccgcuucgucaacaaggacuccaagggcgccaucuuccgcuccaaccuccccaucgagaacugcgaggccaccugccagaccaccgagggcgucauccgcaccaacaagaccuuccagaacgucuccccccucuggaucggcgagugccccaaguacgucaaguccaagucccuccgccucgccaccggccuccgcaacgucccccagaucgagacccgcggccucuucggcgccaucgccggcuucaucgagggcggcuggaccggcaugaucgacggcugguacggcuaccaccacgagaacucccagggcuccggcuacgccgccgaccgcgaguccacccagaaggccaucgacggcaucaccaacaaggucaacuccaucaucgacaagaugaacacccaguucgaggccgucggccacgaguucuccaaccucgagcgccgcaucgacaaccucaacaagcgcauggaggacggcuuccucgacgucuggaccuacaacgccgagcuccucguccuccucgagaacgagcgcacccucgaccuccacgacgccaacgucaagaaccuccacgagaagguccgcucccagcuccgcgacaacgccaacgaccucggcaacggcugcuucgaguucuggcacaagugcgacaacgagugcauggaguccgucaagaacggcaccuacgacuaccccaaguaccaggccgagucccgccucaaccgccagaagaucgaguccgucaagcucgagaacuucgacgucuaccagauccucgccaucuacuccaccgucuccuccucccucguccucgucggccucaucauggccaugggccucuggaugugcuccaacggcuccaugcagugccgcaucugcaucuga

SEQ ID NO: 107134 - RNA, 1701 nt, Artificial Sequence
  derived and/or modified CDS sequence (opt2) from hemagglutinin__InfluenzaA__AHJ57697
augaucgccuucaucgucaucgccauccucgccgccaccggcaaguccgacaagaucugcaucggcuaccacgccaacaacuccaccaccaaggucgacaccauccucgagaagaacgucaccgucacccacuccgucgagcuccucgagaaccagaaggaggagcgcuucugcaagaucuccaacaaggccccccucgaccuccgcgacugcacccucgagggcuggauccucggcaacccccgcugcggcauccuccucgccgaccaguccugguccuacaucgucgagcgccccaacgcccgcaacggcaucugcuaccccggcacccucaacgaggucgaggagcucaaggcccucaucggcuccggcgagcgcgucgagcgcuucgagauguuccccaaguccaccugggccggcgucgacaccaacuccggcgucuccuccgccugcccccucggcaacggccccuccuucuaccgcaaccuccucuggaucaucaagcucaaguccuccgaguaccccgucauccgcggcaccuucaacaacaccggcgacaaguccauccucuacuucuggggcguccaccacccccccgucaccaccgagcaggaggcccucuacggcuccggcgaccgcuacguccgcaugggcaccgaguccaugaacuucgcccgcucccccgagaucgccgcccgccccgccgucaacggccagcgcggccgcaucgacuacuucugguccauccucaagcccggcgagacccucaacgucgaguccaacggcaaccucaucgcccccugguacgccuaccgcuucgucaacaaggacuccaagggcgccaucuuccgcuccaaccuccccaucgagaacugcgacgccaccugccagaccaccgagggcgucauccgcaccaacaagaccuuccagaacgucuccccccucuggaucggcgagugccccaaguacgucaaguccaagucccuccgccucgccaccggccuccgcaacgucccccagaucgagacccgcggccucuucggcgccaucgccggcuucaucgagggcggcuggaccggcaugaucgacggcugguacggcuaccaccacgagaacucccagggcuccggcuacgccgccgaccgcgaguccacccagaaggccaucgacggcaucaccaacaaggucaacuccaucaucgacaagaugaacacccaguucgaggccgucggccacgaguucuccaaccucgagcgccgcaucgacaaccucaacaagcgcauggaggacggcuuccucgacgucuggaccuacaacgccgagcuccucguccuccucgagaacgagcgcacccucgaccuccacgacgccaacgucaagaaccuccacgagaaggucaagucccagcuccgcgacaacgccaacgaccucggcaacggcugcuucgaguucuggcacaagugcgacaacgagugcauggaguccgucaagaacggcaccuacgacuaccccaaguaccaggccgagucccgccucaaccgccagaagaucgaguccgucaagcucgagaacuucgacgucuaccagauccucgccaucuacuccaccgucuccuccucccucguccucgucggccucaucauggccaugggccucuggaugugcuccaacggcuccaugcagugccgcaucugcaucuga

SEQ ID NO: 107135 - RNA, 1701 nt, Artificial Sequence
  derived and/or modified CDS sequence (opt2) from hemagglutinin__InfluenzaA__AHJ57707
augaucgccuucaucgucaucgccauccucgucaccaccggcaaguccgacaagaucugcgucggcuaccacgccaacaacuccaccaccaaggucgacaccauccucgagaagaacgucaccgucacccacuccgucgagcuccucgagaaccagaaggaggagcgcuucugcaagaucuccaacaaggccccccucgaccuccgcgacugcacccucgagggcuggauccucggcaacccccgcugcggcauccuccucgccgaccaguccugguccuacaucgucgagcgccccaacgcccgcaacggcaucugcuaccccggcacccucaacgaggucgaggagcucaaggcccucaucggcuccggcgagcgcgucgagcgcuucgagauguuccccaaguccaccuggaccggcgucgacaccaacuccggcgucuccuccgccugcccccucggcgagggccccuccuucuaccgcaaccuccucuggaucaucaagcacaccaccuccggcuaccccgucaucaagggcaccuaccgcaacaccggcgacaaguccguccucuacuucuggggcguccaccacccccccgacaccaccgagcagaacguccucuacggcuccggcaaccgcuacguccgcaugggcaccgaguccaugaacuucgcccgcucccccgagaucgccgcccgccccgccgucaacggccagcgcggccgcaucgacuacuucugguccauccucaagcccggcgagacccucaacgucgaguccaacggcaaccucaucgcccccugguacgccuaccgcuucgucaacaaggacuccaagggcgccaucuuccgcuccaaccuccccaucgagaacugcgacgccaccugccagaccaccgagggcgucauccgcaccaacaagaccuuccagaacgucuccccccucuggaucggcgagugccccaaguacgucaaguccaagucccuccgccucgccaccggccuccgcaacgucccccagaucgagacccgcggccucuucggcgccaucgccggcuucaucgagggcggcuggaccggcaugaucgacggcugguacggcuaccaccacgagaacucccagggcuccggcuacgccgccgaccgcgaguccacccagaaggccaucgacggcaucaccaacaaggucaacuccaucaucgacaagaugaacacccaguucgaggccgucggccacgaguucuccaaccucgagcgccgcaucgacaaccucaacaagcgcauggaggacggcuuccucgacgucuggaccuacaacgccgagcuccucguccuccucgagaacgagcgcacccucgaccuccacgacgccaacgucaagaaccuccacgagcgcguccgcucccagcuccgcgacaacgccaacgaccucggcaacggcugcuucgaguucuggcacaagugcgacaacgagugcauggaguccgucaagaacggcaccuacaacuaccccaaguaccaggccgagucccgccucaacaagcagaagaucgaguccgucaagcucgaggaguucggcgucuaccagauccucgccaucuacuccaccgucuccuccucccucguccucgucggccucaucauggccaugggccucuggaugugcuccaacggcuccaugcagugccgcaucugcaucuga

SEQ ID NO: 107136 - RNA, 1701 nt, Artificial Sequence
  derived and/or modified CDS sequence (opt2) from hemagglutinin__InfluenzaA__AHJ57719
augaucgccuucaucgucaucgccauccucgccgccaccggcaaguccgacaagaucugcaucggcuaccacgccaacaacuccaccaccaaggucgacaccauccucgagaagaacgucaccgucacccacuccgucgagcuccucgagaaccagaaggaggagcgcuucugcaagaucuccaacaaggccccccucgaccuccgcgacugcacccucgagggcuggauccucggcaacccccgcugcggcauccuccucuccgaccaguccugguccuacaucgucgagcgccccaacgcccgcaacggcaucugcuaccccggcauccucaacgaggccgaggagcucaaggcccucaucggcuccggcgagcgcgucgagcgcuucgagauguuccccaaguccaccugggccggcgucgacaccaacuccggcgucuccuccgccugcccccucggcaacggccccuccuucuuccgcaaccuccucuggaucaucaagcucaaguccuccaccuaccccgucauccgcggcaccuucaacaacaccggcgacaaguccauccucuacuucuggggcguccaccaccccuccgucaccaccgagcaggaggcccucuacggcuccggcaaccgcuacguccgcaugggcaccgaguccaugaacuucgcccgcucccccgagaucgccgcccgccccgccgucaacggccagcgcggccgcaucgacuacuucugguccauccucaagcccggcgagacccucaacgucgaguccaacggcaaccucaucgcccccugguacgccuaccgcuucgucaacaaggacuccaagggcgccaucuuccgcuccaaccuccccaucgagaacugcgacgccaccugccagaccaucgagggcgucauccgcaccaacaagaccuuccagaacgucuccccccucuggaucggcgagugccccaaguacgucaaguccaagucccuccgccucgccaccggccuccgcaacgucccccagaucgagacccgcggccucuucggcgccaucgccggcuucaucgagggcggcuggaccggcaugaucgacggcugguacggcuaccaccacgagaacucccagggcuccggcuacgccgacgacaaggaguccacccagaaggccaucgacggcaucaccaacaaggucaacuccaucaucgacaagaugaacacccaguucgaggccgucggccacgaguucuccaaccucgagcgccgcaucgacaaccucaacaagcgcauggaggacggcuuccucgacgucuggaccuacaacgccgagcuccucguccuccucgagaacgagcgcacccucgaccuccacgacgccaacgucaagaaccuccacgagaagguccgcucccagcuccgcgacaacgccaacgaccucggcaacggcugcuucgaguucuggcacaagugcgacaacgagugcauggaguccgucaagaacggcaccuacgacuaccccaaguaccaggccgagucccgccucaaccgccagaagaucgaguccgucaagcucgagaacuucgacgucuaccagauccucgccaucuacuccaccgucuccuccucccucguccucgucggccucaucauggccaugggccucuggaugugcuccaacggcuccaugcagugccgcaucugcaucuga

SEQ ID NO: 107137 - RNA, 1701 nt, Artificial Sequence
  derived and/or modified CDS sequence (opt2) from hemagglutinin__InfluenzaA__AHJ57731
augaucgccuucaucgucaucgccauccucgccgccaccggcaaguccgacaagaucugcaucggcuaccacgccaacaacuccaccaccaaggucgacaccauccucgagaagaacgucaccgucacccacuccgucgagcuccucgagaaccagaaggaggagcgcuucugcaagaucuccaacaaggccccccucgaccuccgcgacugcacccucgagggcuggauccucggcaacccccgcugcggcauccuccucgccgaccaguccugguccuacaucgucgagcgccccaacgcccgcaacggcaucugcuaccccggcauccucaacgaggccgaggagcucaaggcccucaucggcuccggcgagcgcgucgagcgcuucgagauguuccccaaguccaccugggccggcgucgacaccgacuccggcgucuccuccgccugcccccucggcaacggccccuccuucuaccgcaaccuccucuggaucaucaagcucaaguccuccgaguaccccgucauccgcggcaccuucaacaacaccggcgacaaguccauccucuacuucuggggcguccaccacccccccgucaccaccgagcaggaggcccucuacggcuccggcaaccgcuacguccgcaugggcaccgaguccaugaacuucgcccgcucccccgagaucgccgcccgccccgccgucaacggccagcgcggccgcaucgacuacuucugguccauccucaagcccggcgagacccucaacgucgaguccaacggcaaccucaucgcccccugguacgccuaccgcuucgucaacaaggacuccaagggcgccaucuuccgcuccaaccuccccaucgagaacugcgacgccaccugccagaccaccgagggcgucauccgcaccaacaagaccuuccagaacgucuccccccucuggaucggcgagugccccaaguacgucaaguccaagucccuccgccucgccaccggccuccgcaacgucccccagaucgagacccgcggccucuucggcgccaucgccggcuucaucgagggcggcuggaccggcaugaucgacggcugguacggcuaccaccacgagaacucccagggcuccggcuacgccgccgaccgcgaguccacccagaaggccaucgacggcaucaccaacaaggucaacuccaucaucgacaagaugaacacccaguucgaggccgucggccacgaguucuccaaccucgagcgccgcaucgacaaccucaacaagcgcauggaggacggcuuccucgacgucuggaccuacaacgccgagcuccucguccuccucgagaacgagcgcacccucgaccuccacgacgccaacgucaagaaccuccacgagaagguccgcucccagcuccgcgacaacgccaacgaccucggcaacggcugcuucgaguucuggcacaagugcgacaacgagugcauggaguccgucaagaacggcaccuacgacuaccccaaguaccagaccgagucccgccucaaccgccagaagaucgaguccgucaagcucgagaacuucgacgucuaccagauccucgccaucuacuccaccgucuccuccucccucguccucgucggccucaucauggccaugggccucuggaugugcuccaacggcuccaugcagugccgcaucugcaucuga

SEQ ID NO: 107138 - RNA, 1701 nt, Artificial Sequence
  derived and/or modified CDS sequence (opt2) from hemagglutinin__InfluenzaA__AHJ57743
augaucgccuucaucgucaucgccauccucgucgccaccggcaaguccgacaagaucugcaucggcuaccacgccaacaacuccaccaccaaggucgacaccauccucgagaagaacgucaccgucacccacuccgucgagcuccucgagaaccagaaggaggagcgcuucugcaagaucuccaacaaggccccccucgaccuccgcgacugcaccaucgagggcuggauccucggcaacccccgcugcggcauccuccucgccgaccaguccugguccuacaucgucgagcgccccgacgcccgcaacggcaucugcuaccccggcacccucaacgaggccgaggagcucaaggcccucaucggcuccggcgagaaggucgagcgcuucgagauguuccccaaguccaccugggccggcgucgacaccuccuccggcgucuccuccgccugcccccucggcaacggccccuccuucuaccgcaaccuccucuggaucaucaagcucaaguccuccgaguaccccgucauccgcggcaccuucaacaacaccggcgacaaguccguccucuacuucuggggcguccaccacccccccgucaccaccgagcagaacgcccucuacggcuccggcaaccgcuacguccgcaugggcaccgaguccaugaacuucgcccgcucccccgagaucgccgcccgccccgccgucaacggccagcgcggccgcaucgacuacuucugguccauccucaagcccggcgagacccucaacgucgaguccaacggcaaccucaucgcccccugguacgccuaccgcuucgucaacaaggacuccaagggcgccaucuuccgcuccaaccuccccaucgagaacugcgacgccaccugccagaccaucgagggcgucauccgcaccaacaagaccuuccagaacgucuccccccucuggaucggcgagugccccaaguacgucaaguccaagucccuccgccucgccaccggccuccgcaacgucccccagaucgagacccgcggccucuucggcgccaucgccggcuucaucgagggcggcuggaccggcaugaucgacggcugguacggcuaccaccacgagaacucccagggcuccggcuacgccgccgaccgcgaguccacccagaaggccaucgacggcaucaccaacaaggucaacuccaucaucgacaagaugaacacccaguucgaggccgccggccacgaguucuccaaccucgagcgccgcaucgacaaccucaacaagcgcauggaggacggcuuccucgacgucuggaccuacaacgccgagcuccucguccuccucgagaacgagcgcacccucgaccuccacgacgccaacgucaagaaccuccacgagaaggucaagucccagcuccgcgacaacgccaacgaccucggcaacggcugcuucgaguucuggcacaagugcgacaacgagugcauggaguccgucaagaacggcaccuacgacuaccccaaguaccagaaggagucccgccucaaccgccagaagaucgaguccgucaagcucgagaacuucgacgucuaccagauccucgccaucuacuccaccgucuccuccucccucguccucgucggccucaucauggccaugggccucuggaugugcuccaacggcuccaugcagugccgcaucugcaucuga

SEQ ID NO: 107139 - RNA, 1701 nt, Artificial Sequence
  derived and/or modified CDS sequence (opt2) from hemagglutinin__InfluenzaA__AHJ57755
augaucgccuucaucgucaucgccauccucgucgccaccggcaaguccgacaagaucugcaucggcuaccacgccaacaacuccaccaccaaggucgacaccauccucgagaagaacgucaccgucacccacuccgucgagcuccucgagaaccagaaggaggagcgcuucugcaagaucuccaacaaggccccccucgaccuccgcgacugcaccaucgagggcuggauccucggcaacccccgcugcgacauccuccucgccgaccaguccugguccuacaucgucgagcgccccaacgcccgcaacggcaucugcuaccccggcacccucaacgaggccgaggagcucaaggcccucaucggcuccggcgagggcgucgagcgcuucgagauguuccccaaguccaccugggucggcgucgacaccuccuccggcgucuccuccgccugcccccucggcaacggccccuccuucuaccgcaaccuccucuggaucaucaagcucaaguccuccgaguaccccgucauccgcggcaccuucaacaacaccggcgacaaguccguccucuacuucuggggcguccaccacccccccgucaccaccgagcagaacgcccucuacggcuccggcaaccgcuacguccgcaugggcaccgaguccaugaacuucgcccgcucccccgagaucgccgcccgccccgccgucaacggccagcgcggccgcaucgacuacuucugguccauccucaagcccggcgagacccucaacgucgaguccaacggcaaccucaucgcccccugguacgccuaccgcuucgucaacaaggacaacaagggcgccaucuuccgcuccaaccuccccaucgagaacugcgacgccaccugccagaccaccgagggcgucauccgcaccaacaagaccuuccagaacgucuccccccucuggaucggcgagugccccaaguacgucaaguccaagucccuccgccucgccaccggccuccgcaacgucccccagaucgagacccgcggccucuucggcgccaucgccggcuucaucgagggcggcuggaccggcaugaucgacggcugguacggcuaccaccacgagaacucccagggcuccggcuacgccgccgaccgcgaguccacccagaaggccaucgacggcaucaccaacaaggucaacuccaucaucgacaagaugaacacccaguucgaggccgccggccacgaguucuccaaccucgagcgccgcaucgacaaccucaacaagcgcauggaggacggcuuccucgacgucuggaccuacaacgccgagcuccucguccuccucgagaacgagcgcacccucgaccuccacgacgccaacgucaagaaccuccacgagaaggucaagucccagcuccgcgacaacgccaacgaccucggcaacggcugcuucgaguucuggcacaagugcgacaacgagugcauggaguccgucaagaacggcaccuacgacuaccccaaguaccagaaggagucccgccucaaccgccagaagaucgaguccgucaagcucgagaacuucgacgucuaccagauccucgccaucuacuccaccgucuccuccucccucgucgucgucggccucaucauggccaugggccucuggaugugcuccaacggcuccaugcagugccgcaucugcaucuga

SEQ ID NO: 107140 - RNA, 1701 nt, Artificial Sequence
  derived and/or modified CDS sequence (opt2) from hemagglutinin__InfluenzaA__AHJ57767
augaucgccuucaucgucaucgccauccucgccgccaccggcaaguccgacaagaucugcaucggcuaccacgccaacaacuccaccaccaaggucgacaccauccucgagaagaacgucaccgucacccacuccgucgagcuccucgagaaccagaaggaggagcgcuucugcaagaucuccaacaaggccccccucgaccuccgcgacugcacccucgagggcuggauccucggcaacccccgcugcggcauccuccucgccgaccaguccugguccuacaucgucgagcgccccaacgcccgcaacggcaucugcuaccccggcacccucaacgaggucgaggagcucaaggcccucaucggcuccggcgagcgcgucgagcgcuucgagauguuccccaaguccaccugggccggcgucgacaccaacuccggcgucuccuccgccugcccccucggcaacggccccuccuucuaccgcaaccuccucuggaucaucaagcucaaguccuccgaguaccccgucauccgcggcaccuucaacaacaccggcgacaaguccauccucuacuucuggggcguccaccacccccccgucaccaccgagcaggaggcccucuacggcuccggcgaccgcuacguccgcaugggcaccgaguccaugaacuucgcccgcucccccgagaucgccgcccgccccgccgucaacggccagcgcggccgcaucgacuacuucugguccauccucaagcccggcgagacccucaacgucgaguccaacggcaaccucaucgcccccugguacgccuaccgcuucgucaacaaggacuccaagggcgccaucuuccgcuccaaccuccccaucgagaacugcgacgccaccugccagaccaccgagggcgucauccgcaccaacaagaccuuccagaacgucuccccccucuggaucggcgagugccccaaguacgucaaguccaagucccuccgccucgccaccggccuccgcaacgucccccagaucgagacccgcggccucuucggcgccaucgccggcuucaucgagggcggcuggaccggcaugaucgacggcugguacggcuaccaccacgaguccucccagggcuccggcuacgccgccgacaaggaguccacccagaaggccaucgacggcaucaccaacaaggucaacuccaucaucgacaagaugaacacccaguucgaggccgucggccacgaguucuccaaccucgagcgccgcaucgacaaccucaacaagcgcauggaggacggcuuccucgacgucuggaccuacaacgccgagcuccucguccuccucgagaacgagcgcacccucgaccuccacgacgccaacgucaagaaccuccacgagaagguccgcucccagcuccgcgacaacgccaacgaccucggcaacggcugcuucgaguucuggcacaagugcaacaacgagugcauggaguccgucaagaacggcaccuacgacuaccccaaguaccagaaggagucccgccucaaccgccagaagaucgaguccgucaagcucgagaacuucgacgucuaccagauccucgccaucuacuccaccgucuccuccucccucguccucgucggccucauccucgccaugggccucuggaugugcuccaacggcuccaugcagugccgcaucugcaucuga

SEQ ID NO: 107141 - RNA, 1701 nt, Artificial Sequence
  derived and/or modified CDS sequence (opt2) from hemagglutinin__InfluenzaA__AHJ57779
augaucgccaucaucaucaucgccauccucgucgccaccggcaaguccgacaagaucugcaucggcuaccacgccaacaacuccaccaccaaggucgacaccauccucgagaagaacgucaccgucacccacuccgucgagcuccucgaggaccagaaggaggagcgcuucugcaagaucuccaacaaggccccccucgaccuccgcgacugcaccaucgagggcuggauccucggcaacccccgcugcggcauccuccucgccgaccaguccugguccuacaucgucgagcgccccaacgcccgcaacggcaucugcuaccccggcacccucaacgaggccgaggagcucaaggcccucaucggcuccggcgagggcgucgagcgcuucgagauguuccccaaguccaccugggccggcgucgacaccaacuccggcgucuccuccgccugcccccucggcaacggccccuccuucuaccgcaaccuccucuggaucaucaagcucaaguccuccgaguaccccgucauccgcggcaccuucaacaacaccggcgacaaguccguccucuacuucuggggcguccaccacccccccgucaccaccgagcagaacgcccucuacggcuccggcaaccgcuacguccgcaugggcaccgaguccaugaacuucgcccgcucccccgagaucgccgcccgccccgccgucaacggccagcgcggccgcaucgacuacuucugguccauccucaagcccggcgagacccucaacgucgaguccaacggcaaccucaucgcccccugguacgccuaccgcuucgucaacaaggacuccaagggcgccaucuuccgcuccaaccuccccaucgagaacugcgacgccaccugccagaccaccgagggcgucauccgcaccaacaagaccuuccagaacgucuccccccucuggaucggcgagugccccaaguacgucaaguccaagucccuccgccucgccaccggccuccgcaacgucccccagaucgagacccgcggccucuucggcgccaucgccggcuucaucgagggcggcuggaccggcaugaucgacggcugguacggcuaccaccacgagaacucccagggcuccggcuacgccgccgaccgcgaguccacccagaaggccaucgacggcaucaccaacaaggucaacuccaucaucgacaagaugaacacccaguucgaggccgccggccacgaguucuccaaccucgagcgccgcaucgacaaccucaacaagcgcauggaggacggcuuccucgacgucuggaccuacaacgccgagcuccucguccuccucgagaacgagcgcacccucgaccuccacgacgccaacgucaagaaccuccacgagaaggucaagucccagcuccgcgacaacgccaacgaccucggcaacggcugcuucgaguucuggcacaagugcgacaacgagugcauggaguccgucaagaacggcaccuacgacuaccccaaguaccagaaggagucccgccucaaccgccagaagaucgaguccgucaagcucgagaacuucgacgucuaccagauccucgccaucuacuccaccgucuccuccucccucguccucgucggccucaucauggccaugggccucuggaugugcuccaacggcuccaugcagugcaugaucugcaucuga

SEQ ID NO: 107142 - RNA, 1701 nt, Artificial Sequence
  derived and/or modified CDS sequence (opt2) from hemagglutinin__InfluenzaA__AHJ57791
augaucgccaucaucaucaucgccauccucgucaccaccggcaaguccgacaagaucugcaucggcuaccacgccaacaacuccaccaccaaggucgacaccauccucgagaagaacgucaccgucacccacuccgucgagcuccucgagaacaagaaggaggagcgcuucugcaagaucuccaacaaggccccccucgaccuccgcgacugcacccucgagggcuggauccucggcaacccccgcugcggcauccuccucgccgaccaguccugguccuacaucgucgagcgccccaacgcccgcaacggcaucugcuaccccggcacccucaacgaggucaaggagcucaaggcccucaucggcuccggcgagcgcgucaagcgcuucgagauguuccccaaguccaccugggccggcgucgacaccaacuccggcgucuccuccuccugcccccucggcaacggccccuccuucuaccgcaaccuccucuggaucaucaagcacaccaccuccggcuaccccgucaucaagggcaccuacaccaacaccggcgacaaguccguccucuacuucuggggcauccaccacccccccgacaccaccgagcagaacguccucuacggcuccggcaaccgcuacguccgcaugggcaccgaguccaugaacuucgcccgcucccccgagaucgccgcccgccccgccgucaacggccagcgcggccgcaucgacuacuucugguccauccucaagcccggcgagacccucaacgucgaguccaacggcaaccucaucgcccccugguacgccuaccgcuucgucaacaaggacuccaagggcgccaucuuccgcuccaaccuccccaucgaggacugcgacgccaccugccagaccaccgagggcgucauccgcaccaacaagaccuuccagaacgucuccccccucuggaucggcgagugccccaaguacgucaaguccaagucccuccgccucgccaccggccuccgcaacgucccccagaucgagacccgcggccucuucggcgccaucgccggcuucaucgagggcggcuggaccggcaugaucgacggcugguacggcuaccaccacgagaacucccagggcuccggcuacgccgccgaccgcgaguccacccagaaggccaucgacggcaucaccaacaaggucaacuccaucaucgacaagaugaacacccaguucgaggccgucggccacgaguucuccaaccucgagcgccgcaucgacacccucaacaagcgcauggaggacggcuuccucgacgucuggaccuacaacgccgagcuccucguccuccucgagaacgagcgcacccucgaccuccacgacgccaacgucaagaaccuccacgagcgcgucaagucccagcuccgcgacaacgccaacgaccucggcaacggcugcuucgaguucuggcacaagugcgacaacgagugcauggaguccgucaagaacggcaccuacaacuaccccaaguaccaggccgagucccgccucaacaagcagaagaucgaguccgucaagcucgaggaguucggcgucuaccagauccucgccaucuacuccaccgucuccuccucccucguccucgucggccucaucauggccaugguccucuggaugugcuccaacggcuccaugcagugccgcgucugcaucuga

SEQ ID NO: 107143 - RNA, 1701 nt, Artificial Sequence
  derived and/or modified CDS sequence (opt2) from hemagglutinin__InfluenzaA__AHJ57815
augaucgccuucaucaucaucaccauccucgucaccaccggcaaguccgacaagaucugcaucggcuaccacgccaacaacuccaccaccaaggucgacaccauccucgagaagaacgucaccgucacccacuccgucgagcuccucgagaaccagaaggaggagcgcuucugccgcaucuccaacaaggccccccucgaccucaaggagugcacccucgagggcuggauccucggcaacccccagugcgaccuccuccucggcgaccaguccugguccuacaucgucgagcgccccaacgcccgcaacggcaucugcuaccccggcacccucaacgaggucgaggagcuccgcgcccucaucggcuccggcgagggcgucgagcgcuucgagauguuccccaaguccaccugggccggcgucgacaccaaccgcggcgucaccuccuccugccccuucggcuccggcuccuccuucuaccgcaaccuccucuggaucgucaagcacaccaccuccuccuaccccgucaucaagggcaccuuccgcaacaccggcgacaaguccguccucuacuucuggggcguccaccaccccuucgacaccaacgagcagaacguccucuacggcuccggcaaccgcuacguccgcaugggcaccgaguccaugaacuucgcccgcggccccgaggucgccgcccgccccgucgucaacggccagcgcggccgcaucgacuacuucugguccauccucaagcccggcgagacccucaacaucgaguccaacggcaaccucaucgcccccugguacgccuaccgcuucgucaacaaggacuccaagggcgccaucuuccgcuccaaccuccccaucgaggacugcgacgccaccugccagaccaucgagggcgucauccgcaccaacaagaccuuccagaacgucuccccccucuggaucggcgagugccccaaguacgucaaguccgagucccuccgccucgccaccggccuccgcaacgucccccagaucgagacccgcggccucuucggcgccaucgccggcuucaucgagggcggcuggaccggcaugaucgacggcugguacggcuaccaccacgagaacucccagggcuccggcuacgccgccgaccgcgaguccacccagaaggccaucgacggcaucaccaccaaggucaacuccaucaucgacaagaugaacacccaguucgaggccgucggccacgaguucuccaaccucgagcgccgcaucgacaaccucaacaagcgccucgaggacggcuuccucgacgucuggaccuacaacgccgagcuccucguccuccucgagaacgagcgcacccucgaccuccacgacgccaacgucaagaaccuccacgagcgcguccgcucccagcuccgcgacaacgccaacgaccucggcaacggcugcuucgaguucuggcacaagugcgacaacgagugcauggaguccgucaagaacggcaccuacaacuaccccaaguaccaggccgagucccgccucaacaagcagcgcaucgaguccgucaagcucgagaacuucgacgucuaccagauccucgccaucuacuccaccgucuccuccucccucguccucgucggccucauccucgccaugggccucuggaugugcuccaacggcuccaugcagugccgcaucugcaucuga

SEQ ID NO: 107144 - RNA, 1701 nt, Artificial Sequence
  derived and/or modified CDS sequence (opt2) from hemagglutinin__InfluenzaA__AHJ57827
augaucgccuucaucgucaucgccauccucgucgccaccggcaaguccgacaagaucugcaucggcuaccacgccaacaacuccaccaccaaggucgacaccauccucgagaagaacgucaccgucacccacuccgucgagcuccucgagaaccagaaggaggagcgcuucugcaagaucuccaacaaggccccccucgaccuccgcgacugcaccaucgagggcuggauccucggcaacccccgcugcggcauccuccucgccgaccaguccugguccuacaucgucgagcgccccaacgcccgcaacggcaucugcuaccccggcacccucaacgaggucgaggagcucaaggcccucaucggcuccggcgagcgcgucgagcgcuucgagauguuccccaaguccaccugggccggcgucgacaccaacuccggcgucuccuccgccugcccccucggcaacggccccuccuucuaccgcaaccuccucuggaucaucaagaccaaguccuccgaguaccccgucaucaagggcaccuucaacaacaccggcgacaaguccguccucuacuucuggggcguccaccacccccccucccgcaacgagcagaacguccucuacggcuccggcgaccgcuacguccgcaugggcaccgaguccaugaacuucgcccgcucccccgagaucgccgcccgccccgccgucaacggccagcgcggccgcaucgacuacuucugguccauccucaagcccggcgagacccucaacgucgaguccaacggcaaccucaucgcccccugguacgccuaccgcuucgucaacaaggacucccgcggcgccaucuuccgcuccaaccuccccaucgagaacugcgacgccaccugccagaccgccgagggcgucauccgcaccaacaagaccuuccagaacgucuccccccucuggaucggcgagugccccaaguacgucaaguccaagucccuccgccucgccaccggccuccgcaacgucccccagaucgagacccgcggccucuucggcgccaucgccggcuucaucgagggcggcuggaccggcaugaucgacggcugguacggcuaccaccacgagaacucccagggcuccggcuacgccgccgaccgcgaguccacccagaaggccaucgacggcaucaccaacaaggucaacuccaucaucgacaagaugaacacccaguucgaggccgucggccacgaguucuccaaccucgagcgccgcaucgacaaccucaacaagcgcauggaggacggcuuccucgacgucuggaccuacaacgccgagcuccucguccuccucgagaacgagcgcacccucgaccuccacgacgccaacgucaagaaccuccacgagcgcgucaagucccagcuccgcgacaacgccaacgaccucggcaacggcugcuucgaguucuggcacaagugcgacaacgagugcauggaguccgucaagaacggcaccuacgacuaccccaaguaccagaaggagucccgccucaaccgccagaagaucgaguccgucaagcucgagaacuucgacgucuaccagauccucgccaucuacuccaccgucuccuccucccucguccucgucggccucaucauggccaugggccucuggaugugcuccaacggcuccaugcagugccgcaucugcaucuga

SEQ ID NO: 107145 - RNA, 1701 nt, Artificial Sequence
  derived and/or modified CDS sequence (opt2) from hemagglutinin__InfluenzaA__AHJ57850
augaucgccuucaucgucaucgccauccucgccaccaccggcaaguccgacaagaucugcaucggcuaccacgccaacaacuccaccaccaaggucgacaccauccucgagaagaacgucaccgucacccacuccgucgagcuccucgagaaccagaaggaggagcgcuucugcaagaucuccaacaaggccccccucgaccuccgcgacugcacccucgagggcuggauccucggcaacccccgcugcggcauccuccucgccgaccaguccugguccuacaucgucgagcgccccaacgcccgcaacggcaucugcuaccccggcauccucaacgaggccgaggagcucaaggcccucaucggcuccggcgagcgcgucgagcgcuucgagauguuccccaaguccaccugggccggcgucgacaccgacuccggcgucuccuccgccugcccccucggcaacggccccuccuucuaccgcaaccuccucuggaucaucaagcucaaguccuccgaguaccccgucauccgcggcaccuucaacaacaccggcgacaaguccauccucuacuucuggggcguccaccacccccccgucaccaccgagcaggaggcccucuacggcuccggcaaccgcuacguccgcaugggcaccgaguccaugaacuucgcccgcacccccgagaucgccgcccgccccgccgucaacggccagcgcggccgcaucgacuacuucugguccauccucaagcccggcgagacccucaacgucgaguccaacggcaaccucaucgcccccugguacgccuaccgcuucgucaacaaggacuccaagggcgccaucuuccgcuccaaccuccccaucgagaacugcgacgccaccugccagaccaccgagggcgucauccgcaccaacaagaccuuccagaacgucuccccccucuggaucggcgagugccccaaguacgucaaguccaagucccuccgccucgccaccggccuccgcaacgucccccagaucgagacccgcggccucuucggcgccaucgccggcuucaucgagggcggcuggaccggcaugaucgacggcugguacggcuaccaccacgagaacucccagggcuccggcuacgccgccgaccgcgaguccacccagaaggccaucgacggcaucaccaacaaggucaacuccaucaucgacaagaugaacacccaguucgaggccgucggccacgaguucuccaaccucgagcgccgcaucgacaaccucaacaagcgcauggaggacggcuuccucgacgucuggaccuacaacgccgagcuccucguccuccucgagaacgagcgcacccucgaccuccacgacgccaacgucaagaaccuccacgagaagguccgcucccagcuccgcgacaacgccaacgaccucggcaacggcugcuucgaguucuggcacaagugcgacaacgagugcauggaguccgucaagaacggcaccuacgacuaccccaaguaccaggccgagucccgccucaaccgccagaagaucgaguccgucaagcucgagaacuucgacgucuaccagauccucgccaucuacuccaccgucuccuccucccucguccucgucggccucaucauggccaugggccucuggaugugcuccaacggcuccaugcagugccgcaucugcaucuga

SEQ ID NO: 107146 - RNA, 1701 nt, Artificial Sequence
  derived and/or modified CDS sequence (opt2) from hemagglutinin__InfluenzaA__AHJ57862
augaucgccuucaucgucaucgccauccucgccgccaccggcaaguccgacaagaucugcaucggcuaccacgccaacaacuccaccaccaaggucgacaccauccucgagaagaacgucaccgucacccacuccgucgagcuccucgagaaccagaaggaggagcgcuucugcaagaucuccaacaaggccccccucgaccuccgcgacugcacccucgagggcuggauccucggcaacccccgcugcggcauccuccucgccgaccaguccugguccuacaucgucgagcgccccaacgcccgcaacggcaucugcuaccccggcauccucaacgaggccgaggagcucaaggcccucaucggcuccggcgagcgcgucgagcgcuucgagauguuccccaaguccaccugggccggcgucgacaccaacuccggcgucuccuccgccugcccccucggcaacggccccuccuucuaccgcaaccuccucuggaucaucaagcucaaguccuccgaguaccccgucauccgcggcaccuucaacaacaccggcgacaaguccauccucuacuucuggggcguccaccacccccccgucaccaccgagcaggaggcccucuacggcuccggcaaccgcuacguccgcaugggcaccgaguccaugaacuucgcccgcucccccgagaucgccgcccgccccgccgucaacggccagcgcggccgcaucgacuacuucugguccauccucaagcccggcgagacccucaacgucgaguccaacggcaaccucaucgcccccugguacgccuaccgcuucgucaacaaggacuccaagggcgccaucuuccgcuccaaccuccccaucgagaacugcgacgccaccugccagaccaccgagggcgucauccgcaccaacaagaccuuccagaacgucuccccccucuggaucggcgagugccccaaguacgucaaguccaagucccuccgccucgccaccggccuccgcaacgucccccagaucgagacccgcggccucuucggcgccaucgccggcuucaucgagggcggcuggaccggcaugaucgacggcugguacggcuaccaccacgagaacucccagggcuccggcuacgccgccgaccgcgaguccacccagaaggccaucgacggcaucaccaacaaggucaacuccaucaucgacaagaugaacacccaguucgaggccgucggccacgaguucuccaaccucgagcgccgcaucgacaaccucaacaagcgcauggaggacggcuuccucgacgucuggaccuacaacgccgagcuccucguccuccucgagaacgagcgcacccucgaccuccacgacgccaacgucaagaaccuccacgagaagguccgcucccagcuccgcgacaacgccaacgaccucggcaacggcugcuucgaguucuggcacaagugcgacaacgagugcauggaguccgucaagaacggcaccuacgacuaccccaaguaccaggccgagucccgccucaaccgccagaagaucgaguccgucaagcucgagaacuucgacgucuaccagauccucgccaucuacuccaccgucuccuccucccucguccucgucggccucaucauggccaugggccucuggaugugcuccaacggcuccaugcagugccgcaucugcaucuga

SEQ ID NO: 107147 - RNA, 1701 nt, Artificial Sequence
  derived and/or modified CDS sequence (opt2) from hemagglutinin__InfluenzaA__AHJ57873
augaucgccuucaucgucaucgccacccucgucgccaccggcaaguccgacaagaucugcaugggcuaccacgccaacaacuccaccaccaaggucgacaccauccucgagaagaacgucaccgucacccacuccgucgagcuccucgagaaccagaaggaggagcgcuucugcaagaucuccaacaaggccccccucgaccuccgcgacugcacccucgagggcuggauccucggcaacccccgcugcggcauccuccucgccgaccaguccugguccuacaucgucgagcgccccaacgcccgcaacggcaucugcuaccccggcacccucaacgaggccgaggagcucaaggcccucaucggcuccggcgagcgcgucgagcgcuucgagauguuccccaaguccaccuggaccggcgucgacaccgaguccggcgucuccuccgccugcccccucggcaacggccccuccuucuaccgcaaccuccucuggaucaucaagcucaaguccuccgaguaccccgucauccgcggcaccuucaacaacaccggcgacaaguccauccucuacuucuggggcguccaccacccccccgucaccaccgagcagaacgcccucuacggcuccggcgaccgcuacguccgcaugggcaccgaguccaugaacuucgcccgcucccccgagaucgccgcccgccccgccgucaacggccagcgcggccgcaucgacuacuucugguccauccucacccccggcgagacccucaacgucgaguccaacggcaaccucaucgcccccugguacgccuaccgcuucgucaacaaggacuccaagggcgccaucuuccgcuccaaccuccccaucgagaacugcgacgccaccugccagaccaccgagggcgucauccgcaccaacaagaccuuccagaacgucuccccccucuggaucggcgagugccccaaguacgucaaguccaagucccuccgccucgccaccggccuccgcaacgucccccagaucgagacccgcggccucuucggcgccaucgccggcuucaucgagggcggcuggaccggcaugaucgacggcugguacggcuaccaccacgagaacucccagggcuccggcuacgccgccgacaaggaguccacccagaaggccaucgacggcaucaccaacaaggucaacuccaucaucgacaagaugaacacccaguucgaggccgucggccacgaguucuccaaccucgagcgccgcaucgacaaccucaacaagcgcauggaggacggcuuccucgacgucuggaccuacaacgccgagcuccucguccuccucgagaacgagcgcacccucgaccuccacgacgccaacgucaagaaccuccacgagaagguccgcucccagcuccgcgacaacgccaacgaccucggcaacggcugcuucgaguucuggcacaagugcgacaacgagugcauggaguccgucaagaacggcaccuacgacuaccccaaguaccagaaggagucccgccucaaccgccagaagaucgaguccgucaagcucgagaacuucgacgucuaccagauccucgccaucuacuccaccgucuccuccucccucguccucgucggccucauccucgccaugggccucuggaugugcuccaacggcuccaugcacugccgcaucugcaucuga

SEQ ID NO: 107148 - RNA, 1701 nt, Artificial Sequence
  derived and/or modified CDS sequence (opt2) from hemagglutinin__InfluenzaA__AHJ57885
augaucgccuucaucgucauggccauccucgccgccaccggcaaguccgacaagaucugcaucggcuaccacgccaacaacuccaccaccaaggucgacaccauccucgagaagaacgucaccgucacccacuccgucgagcuccucgagaaccagaaggaggagcgcuucugcaagaucuccaacaaggccccccucgaccuccgcgacugcacccucgagggcuggauccucggcaacccccgcugcggcauccuccucgccgaccaguccugguccuacaucgucgagcgccccaacgcccgcaacggcaucugcuaccccggcauccucaacgaggccgaggagcucaaggcccucaucggcuccggcgagcgcgucgagcgcuucgagauguuccccaaguccaccugggccggcgucgacaccgacuccggcgucuccuccgccugcccccucggcaacggccccuccuucuaccgcaaccuccucuggaucaucaagcgcaaguccuccgccuaccccgucauccgcggcaccuucaacaacaccggcgacaaguccauccucuacuucuggggcguccaccacccccccgucaccaccgagcaggaggcccucuacggcuccggcaaccgcuacguccgcaugggcaccgaguccaugaacuucgcccgcaaccccgagaucgccgcccgccccgccgucaacggccagcgcggccgcaucgacuacuucugguccauccucaagcccggcgagacccucaacaucgaguccaacggcaaccucaucgcccccugguacgccuaccgcuucgucaacaaggacuccaagggcgccaucuuccgcuccaaccuccccaucgaggacugcgacgccuccugccagaccaccgagggcgucauccgcaccaacaagaccuuccagaacgucuccccccucuggaucggcgagugccccaaguacgucaaguccaagucccuccgccucgccaccggccuccgcaacgucccccagaucgagacccgcggccucuucggcgccaucgccggcuucaucgagggcggcuggaccggcaugaucgacggcugguacggcuaccaccacgagaacucccagggcuccggcuacgccgccgaccgcgaguccacccagaaggccaucgacggcaucaccaacaaggucaacuccaucaucgacaagaugaacacccaguucgaggccgucggccacgaguucuccaaccucgagcgccgcaucgacaaccucgacaagcgcauggaggacggcuuccucgacgucuggaccuacaacgccgagcuccucguccuccucgagaacgagcgcacccucgaccuccacgacgccaacgucaagaaccuccacgagaagguccgcucccagcuccgcgacaacgccaacgaccucggcaacggcugcuucgaguucuggcacaagugcgacaacgagugcauggaguccgucaagaacggcaccuacgacuaccccaaguaccaggccgagucccgccucaaccgccagaagaucgaguccgucaagcucgagaacuucgacgucuaccagauccucgccaucuacuccaccgucuccuccucccucguccucgucggccucaucauggccaugggccucuggaugugcuccaacggcuccaugcagugccgcaucugcaucuga

SEQ ID NO: 107149 - RNA, 1701 nt, Artificial Sequence
  derived and/or modified CDS sequence (opt2) from hemagglutinin__InfluenzaA__AHJ57897
augaucgccuucaucgucaucgccauccucgccgccaccggcaaguccgacaagaucugcaucggcuaccacgccaacaacuccaccaccaaggucgacaccauccucgagaagaacgucaccgucacccacuccgucgagcuccucgagaaccagaaggaggagcgcuucugcaagaucuccaacaaggccccccucgaccuccgcgacugcacccucgagggcuggauccucggcaacccccgcugcggcauccuccucgccgaccaguccugguccuacaucgucgagcgccccaacgcccgcaacggcaucugcuaccccggcauccucaacgaggccgaggagcucaaggcccucaucggcuccggcgagcgcgucgagcgcuucgagauguuccccaaguccaccugggccggcgucgacaccgacuccggcgucuccuccgccugcccccucggcaacggccccuccuucuaccgcaaccuccucuggaucaucaagcgcaaguccuccgccuaccccgucauccgcggcaccuucaacaacaccggcgacaaguccauccucuacuucuggggcguccaccacccccccgucaccaccgagcaggaggcccucuacggcuccggcaaccgcuacguccgcaugggcaccgaguccaugaacuucgcccgcaaccccgagaucgccgcccgccccgccgucaacggccagcgcggccgcaucgacuacuucugguccauccucaagcccggcgagacccucaacaucgaguccaacggcaaccucaucgcccccugguacgccuaccgcuucgucaacaaggacuccaagggcgccaucuuccgcuccaaccuccccaucgaggacugcgacgccuccugccagaccaccgagggcgucauccgcaccaacaagaccuuccagaacgucuccccccucuggaucggcgagugccccaaguacgucaaguccaagucccuccgccucgccaccggccuccgcaacgucccccagaucgagacccgcggccucuucggcgccaucgccggcuucaucgagggcggcuggaccggcaugaucgacggcugguacggcuaccaccacgagaacucccagggcuccggcuacgccgccgaccgcgaguccacccagaaggccaucgacggcaucaccaacaaggucaacuccaucaucgacaagaugaacacccaguucgaggccgucggccacgaguucuccaaccucgagcgccgcaucgacaaccucaacaagcgcauggaggacggcuuccucgacgucuggaccuacaacgccgagcuccucguccuccucgagaacgagcgcacccucgaccuccacgacgccaacgucaagaaccuccacgagaagguccgcucccagcuccgcgacaacgccaacgaccucggcaacggcugcuucgaguucuggcacaagugcgacaacgagugcauggaguccgucaagaacggcaccuacgacuaccccaaguaccaggccgagucccgccucaaccgccagaagaucgaguccgucaagcucgagaacuucgacgucuaccagauccucgccaucuacuccaccgucuccuccucccucguccucgucggccucaucauggccaugggccucuggaugugcuccaacggcuccaugcagugccgcaucugcaucuga

SEQ ID NO: 107150 - RNA, 1701 nt, Artificial Sequence
  derived and/or modified CDS sequence (opt2) from hemagglutinin__InfluenzaA__AHJ57908
augaucgccuucaucgucaucgccauccucgucgccaccggcaaguccgacaagaucugcaucggcuaccacgccaacaacuccaccaccaaggucgacaccauccucgagaagaacgucaccgucacccacuccgucgagcuccucgagaaccagaaggaggagcgcuucugcaagaucuccaacaaggccccccucgaccuccgcgacugcaccgucgagggcuggauccucggcaacccccgcugcggcauccucaucgccgaccaguccugguccuacaucgucgagcgccccaacgcccgcaacggcaucugcuaccccggcacccucaacgaggccgaggagcucaaggcccucaucggcuccggcgagggcgucgagcgcuucgagauguuccccaaguccaccugggccggcgucgacaccuccuccggcgucuccuccgccugcccccucggcaacggccccuccuucuaccgcaaccuccucuggaucaucaagcucaaguccuccgaguaccccgucauccgcggcaccuucaacaacaccggcgacaaguccguccucuacuucuggggcguccaccacccccccgucaccaccgagcaggacgcccucuacggcuccggcaaccgcuacguccgcaugggcaccgaguccaugaacuucgcccgcucccccgagaucgccgcccgccccgccgucaacggccagcgcggccgcaucgacuacuucugguccguccucaagcccggcgagacccucaacgucgaguccaacggcaaccucaucgcccccugguacgccuaccgcuucgucaacaaggacaacaagggcgccaucuuccgcuccaaccuccccaucgagaacugcgacgccaccugccagaccaccgagggcgucauccgcaccaacaagaccuuccagaacgucuccccccucuggaucggcgagugccccaaguacgucaaguccaagucccuccgccucgccaccggccuccgcaacgucccccagaucgagacccgcggccucuucggcgccaucgccggcuucaucgagggcggcuggaccggcaugaucgacggcugguacggcuaccaccacgagaacucccagggcuccggcuacgccgccgaccgcgaguccacccagaaggccaucgacggcaucaccaacaaggucaacuccaucaucgacaagaugaacacccaguucgaggccgccggccacgaguucuccaaccucgagcgccgcaucgacaaccucaacaagcgcauggaggacggcuuccucgacgucuggaccuacaacgccgagcuccucguccuccucgagaacgagcgcacccucgaccuccacgacgccaacgucaagaaccuccacgagaaggucaagucccagcuccgcgacaacgccaacgaccucggcaacggcugcuucgaguucuggcacaagugcgacaacgagugcauggaguccgucaagaacggcaccuacgacuaccccaaguaccagaaggagucccgccucaaccgccagcgcaucgaguccgucaagcucgagaacuucgacgucuaccagauccucgccaucuacuccaccgucuccuccucccucgucgucgucggccucaucauggccaugggccucuggaugugcuccaacggcuccaugcagugcaugaucugcaucuga

SEQ ID NO: 107151 - RNA, 1701 nt, Artificial Sequence
  derived and/or modified CDS sequence (opt2) from hemagglutinin__InfluenzaA__AHJ57920
augaucgccaucaucaucaucgccauccucgucgccaccggcaaguccgacaagaucugcaucggcuaccacgccaacaacuccaccaccaaggucgacaccauccucgagaagaacgucaccgucacccacuccgucgagcuccucgagaaccagaaggaggagcgcuucugcaagaucuccaacaaggccccccucgaccuccgcgacugcaccaucgagggcuggauccucggcaaccccuggugcggcauccuccucgccgaccaguccugguccuacaucgucgagcgccccaacgcccgcaacggcaucugcuaccccggcacccucaacgaggucgaggagcucaaggcccucaucggcuccggcgagcgcgucgagcgcuucgagauguuccccaaguccaccugggccggcgucgacaccaacuccggcgucuccuccgccugcccccucggcaacggccccuccuucuaccgcaaccuccucuggaucaucaagaccaaguccuccgaguaccccgucaucaagggcaccuucaacaacaccggcgacaaguccguccucuacuucuggggcguccaccacccccccucccgcaacgagcagaacguccucuacggcuccggcgaccgcuacguccgcaugggcaccgaguccaugaacuucgcccgcucccccgagaucgccgcccgccccgccgucaacggccagcgcggccgcaucgacuacuucugguccauccucaagcccggcgagacccucaacgucgaguccaacggcaaccucaucgcccccugguacgccuaccgcuucgucaacaaggacucccgcggcgccaucuuccgcuccaaccuccccaucgagaacugcgacgccaccugccagaccgccgagggcgucauccgcaccaacaagaccuuccagaacgucuccccccucuggaucggcgagugccccaaguacgucaaguccaagucccuccgccucgccaccggccuccgcaacgucccccagaucgagacccgcggccucuucggcgccaucgccggcuucaucgagggcggcuggaccggcaugaucgacggcugguacggcuaccaccacgagaacucccagggcuccggcuacgccgccgaccgcgaguccacccagaaggccaccgacggcaucaccaacaaggucaacuccaucaucgacaagaugaacacccaguucgaggccgucggccacgaguucuccaaccucgagcgccgcaucgacaaccucaacaagcgcauggaggacggcuuccucgacgucuggaccuacaacgccgagcuccucguccuccucgagaacgagcgcacccucgaccuccacgacgccaacgucaagaaccuccacgagcgcgucaagucccagcuccgcgacaacgccaacgaccucggcaacggcugcuucgaguucuggcacaagugcgacaacgagugcauggaguccgucaagaacgacaccuacgacuaccccaaguaccagaaggagucccgccucaaccgccagaagaucgaguccguccgccucgagaacuucgacgucuaccagauccucgccaucuacuccaccgucuccuccucccucguccucgucggccucaucauggccaugggccucuggaugugcuccaacggcuccaugcagugccgcaucugcaucuga

SEQ ID NO: 107152 - RNA, 1701 nt, Artificial Sequence
  derived and/or modified CDS sequence (opt2) from hemagglutinin__InfluenzaA__AHJ57932
augaucgcccucaucaucaucaccauccucgucaccaccggcaaguccgacaagaucugcaucggcuaccacgccaacaacuccaccaccaaggucgacaccauccucgagaagaacgucaccgucacccacuccgucgagcuccucgagaaccagaaggaggagcgcuucugccgcaucuccaacaaggccccccucgaccucaaggagugcacccucgagggcuggauccucggcaacccccagugcgaccuccuccucggcgaccaguccugguccuacaucgucgagcgccccaacgcccgcaacggcaucugcuaccccggcacccucaacgaggucgaggagcuccgcgcccucaucggcuccggcgagggcgucgagcgcuucgagauguuccccaaguccaccugggccggcgucgacaccaaccgcggcgucaccuccuccugccccuucggcuccggcuccuccuucuaccgcaaccuccucuggaucgucaagcacaccaccuccuccuaccccgucaucaagggcaccuuccgcaacaccggcgacaaguccguccucuacuucuggggcguccaccaccccuucgacaccaacgagcagaacguccucuacggcuccggcaaccgcuacguccgcaugggcaccgaguccaugaacuucgcccgcggccccgaggucgccgcccgccccgucgucaacggccagcgcggccgcaucgacuacuucugguccauccucaagcccggcgagacccucaacaucgaguccaacggcaaccucaucgcccccugguacgccuaccgcuucgucaacaaggacuccaagggcgccaucuuccgcuccaaccuccccaucgaggacugcgacgccaccugccagaccaucgagggcgucauccgcaccaacaagaccuuccagaacgucuccccccucuggaucggcgagugccccaaguacgucaaguccgagucccuccgccucgccaccggccuccgcaacgucccccagaucgagacccgcggccucuucggcgccaucgccggcuucaucgagggcggcuggaccggcaugaucgacggcugguacggcuaccaccacgagaacucccagggcuccggcuacgccgccgaccgcgaguccacccagaaggccaucgacggcaucaccaccaaggucaacuccaucaucgacaagaugaacacccaguucgaggccgucggccacgaguucuccaaccucgagcgccgcaucgacaaccucaacaagcgccucgaggacggcuuccucgacgucuggaccuacaacgccgagcuccucguccuccucgagaacgagcgcacccucgaccuccacgacgccaacgucaagaaccuccacgagcgcguccgcucccagcuccgcgacaacgccaacgaccucggcaacggcugcuucgaguucuggcacaagugcgacaacgagugcauggaguccguccgcaacggcaccuacaacuaccccaaguaccaggccgagucccgccucaacaagcagcgcaucgaguccgucaagcucgagaacuucgacgucuaccagauccucgccaucuacuccaccgucuccuccucccucguccucgucggccucauccucgccaugggccucuggaugugcuccaacggcuccaugcagugccgcaucugcaucuga

SEQ ID NO: 107153 - RNA, 1701 nt, Artificial Sequence
  derived and/or modified CDS sequence (opt2) from hemagglutinin__InfluenzaA__AHJ57943
augaucgccuucaucgucaucgccacccucgucgccaccggcaaguccgacaagaucugcaucggcuaccacgccaacaacuccaccaccaaggucgacaccauccucgagaagaacgucaccgucacccacuccgucgagcuccucgagaaccagaaggaggagcgcuucugcaagaucuccaacaaggccccccucgaccuccgcgacugcacccucgagggcuggauccucggcaacccccgcugcggcauccuccucgccgaccaguccugguccuacaucgucgagcgccccaacgcccgcaacggcaucugcuaccccggcacccucaacgaggccgaggagcucaaggcccucaucggcuccggcgagcgcgucgagcgcuucgagauguuccccaaguccaccuggaccggcgucgacaccgaguccggcgucuccuccgccugcccccucggcaacggccccuccuucuaccgcaaccuccucuggaucaucaagcucaaguccuccgaguaccccgucauccgcggcaccuucaacaacaccggcgacaaguccauccucuacuucuggggcguccaccacccccccgucaccaccgagcagaacgcccucuacggcuccggcgaccgcuacguccgcaugggcaccgaguccaugaacuucgcccgcucccccgagaucgccgcccgccccgccgucaacggccagcgcggccgcaucgacuacuucugguccauccucaagcccggcgagacccucaacgucgaguccaacggcaaccucaucgcccccugguacgccuaccgcuucgucaacaaggacuccaagggcgccaucuuccgcuccaaccuccccaucgagaacugcgacgccaccugccagaccaccgagggcgucauccgcaccaacaagaccuuccagaacgucuccccccucuggaucggcgagugccccaaguacgucaaguccaagucccuccgccucgccaccggccuccgcaacgucccccagaucgagacccgcggccucuucggcgccaucgccggcuucaucgagggcggcuggaccggcaugaucgacggcugguacggcuaccaccacgagaacucccagggcuccggcuacgccgccgacaaggaguccacccagaaggccaucgacggcaucaccaacaaggucaacuccaucaucgacaagaugaacacccaguucgagaccgucggccacgaguucuccaaccucgagcgccgcaucgacaaccucaacaagcgcauggaggacggcuuccucgacgucuggaccuacaacgccgagcuccucguccuccucgagaacgagcgcacccucgaccuccacgacgccaacgucaagaaccuccacgagaagguccgcucccagcuccgcgacaacgccaacgaccucggcaacggcugcuucgaguucuggcacaagugcaacaacgagugcauggaguccgucaagaacggcaccuacgacuaccccaaguaccagaaggagucccgccucaaccgccagaagaucgaguccgucaagcucgagaacuucgacgucuaccagauccucgccaucuacuccaccgucuccuccucccucguccucgucggccucauccucgccaugggccucuggaugugcuccaacggcuccaugcagugccgcaucugcaucuga

SEQ ID NO: 107154 - RNA, 1701 nt, Artificial Sequence
  derived and/or modified CDS sequence (opt2) from hemagglutinin__InfluenzaA__AHJ57954
augaucgccuucaucgucaucgccauccucgccgccaccggcaaguccgacaagaucugcaucggcuaccacgccaacaacuccaccaccaaggucgacaccauccucgagaagaacgucaccgucacccacuccgucgagcuccucgagaaccagaaggaggagcgcuucugcaagaucuccaacaaggccccccucgaccuccgcgacugcacccucgagggcuggauccucggcaacccccgcugcggcauccuccucgccgaccaguccugguccuacaucgucgagcgccccaacgcccgcaacggcaucugcuaccccggcauccucaacgaggccgaggagcucaaggcccucaucggcuccggcgagcgcgucgagcgcuucgagauguuccccaaguccaccugggccggcgucgacaccaacuccggcgucuccuccgccugcccccucggcaacggccccuccuucuaccgcaaccuccucuggaucaucaagcagaaguccuccgccuaccccgucauccgcggcaccuucaacaacaccggcgacaaguccauccucuacuucuggggcguccaccacccccccgucaccaccgagcaggaggcccucuacggcuccggcaaccgcuacguccgcaugggcaccgaguccaugaacuucgcccgcaaccccgagaucgccgcccgccccgccgucaacggccagcgcggccgcaucgacuacuucugguccauccucaagcccggcgagacccucaacgucgaguccaacggcaaccucaucgcccccugguacgccuaccgcuucgucaacaaggacuccaagggcgccaucuuccgcuccaaccuccccaucgagaacugcgacgccaccugccagaccaccgagggcgucauccgcaccaacaagaccuuccagaacgucuccccccucuggaucggcgagugccccaaguacgucaaguccaagucccuccgccucgccaccggccuccgcaacgucccccagaucgagacccgcggccucuucggcgccaucgccggcuucaucgagggcggcuggaccggcaugaucgacggcugguacggcuaccaccacgagaacucccagggcuccggcuacgccgccgaccgcgaguccacccagaaggccaucgacggcaucaccaacaaggucaacuccaucaucgacaagaugaacacccaguucgaggccgucggccacgaguucuccaaccucgagcgccgcaucgacaaccucaacaagcgcauggaggacggcuuccucgacgucuggaccuacaacgccgagcuccucguccuccucgagaacgagcgcacccucgaccuccacgacgccaacgucaagaaccuccacgagaagguccgcucccagcuccgcgacaacgccaacgaccucggcaacggcugcuucgaguucuggcacaagugcgacaacgagugcauggaguccgucaagaacggcaccuacgacuaccccaaguaccaggccgagucccgccucaaccgccagaagaucgaguccgucaagcucgagaacuucgacgucuaccagauccucgccaucuacuccaccgucuccuccucccucguccucgucggccucaucauggccaugggccucuggaugugcuccaacggcuccaugcagugccgcaucugcaucuga

SEQ ID NO: 107155 - RNA, 1701 nt, Artificial Sequence
  derived and/or modified CDS sequence (opt2) from hemagglutinin__InfluenzaA__AHJ57965
augaucgccuucaucaucaucaccauccucgucaccaccggcaaguccgacaagaucugcaucggcuaccacgccaacaacuccaccaccaaggucgacaccauccucgagaagaacgucaccgucacccacuccgucgagcuccucgagaaccagaaggaggagcgcuucugcaagaucuccaacaaggccccccucgaccucaaggagugcacccucgagggcuggauccucggcaacccccagugcgaccuccuccucggcgaccaguccugguccuacaucgucgagcgccccaacgcccgcaacggcaucugcuaccccggcacccucaacgaggucgaggagcucaaggcccucaucggcuccggcgagcgcgucgagcgcuucgagauguuccccaaguccaccugggccggcgucgacaccaacuccggcgucaccuccuccugcuccuucggcuccggcuccuccuucuaccgcaaccuccucuggaucaucaagcacaccaccuccuccuaccccgucaucaagggcaccuuccgcaacaccggcgacaaguccguccucuacuucuggggcguccaccaccccaucgacaccaccgagcagaacguccucuacggcuccggcaaccgcuacguccgcaugggcaccgaguccaugaacuucgcccgcucccccgagaucgccgcccgccccgucgucaacggccagcgcggccgcaucgacuacuucugguccauccucaagcccggcgagacccucaacaucgaguccaacggcaaccucaucgcccccugguacgccuaccgcuucgucaacaaggacuccaagggcgccaucuuccgcuccaaccuccccaucgagaacugcgacgccaccugccagaccaucgagggcgucauccgcaccaacaagaccuuccagaacgucuccccccucuggaucggcgagugccccaaguacgucaaguccgagucccuccgccucgccaccggccuccgcaacgucccccagaucgagacccgcggccucuucggcgccaucgccggcuucaucgagggcggcuggaccggcaugaucgacggcugguacggcuaccaccacgagaacucccagggcuccggcuacgccgccgaccgcgaguccacccagcgcgccaucgacggcaucaccaccaaggucaacuccaucaucgacaagaugaacacccaguucgaggccgucggccacgaguucuccaaccucgagcgccgcaucgacaaccucaacaagcgcauggaggacggcuuccucgacgucuggaccuacaacgccgagcuccucguccuccucgagaacgagcgcacccucgaccuccacgacgccaacgucaagaaccuccacgagcgcguccgcucccagcuccgcgacaacgccaacgacggcggcaacggcugcuucgaguucuggcacaagugcgacaacgagugcauggaguccgucaagaacggcaccuacgacuaccccaaguaccaggccgagucccgcuccaaccgccagcgcaucgaguccgucaagcucgagaacuucgacgucuaccagauccucgccaucuacuccaccgucuccuccucccucgucgucgucuggcucauccucgccaugggccucuggaugugcgccaacggcuccaugcagugccgcaucugcaucuga

SEQ ID NO: 107156 - RNA, 1701 nt, Artificial Sequence
  derived and/or modified CDS sequence (opt2) from hemagglutinin__InfluenzaA__AHJ57977
augaucgccuucaucgucaucgccauccucgccgccaccggcaaguccgacaagaucugcaucggcuaccacgccaacaacuccaccaccaaggucgacaccauccucgagaagaacgucaccgucacccacuccgucgagcuccucgagaaccagaaggaggagcgcuucugcaagaucuccaacaaggccccccucgaccuccgcgacugcaccaucgagggcuggauccucggcaacccccgcugcggcauccuccucgccgaccaguccugguccuacaucgucgagcgccccaacgcccgcaacggcaucugcuaccccggcacccucaacgaggucgaggagcucaaggcccucaucggcuccggcgagcgcgucgagcgcuucgagauguuccccaaguccaccugggccggcgucgacaccaacuccggcgucuccuccgccugcccccucggcaacggccccuccuucuaccgcaaccuccucuggaucaucaagcucaaguccuccgaguaccccgucauccgcggcaccuucaacaacaccggcgacaaguccauccucuacuucuggggcguccaccacccccccgucaccaccgagcaggaggcccucuacggcuccggcgaccgcuacguccgcaugggcaccgaguccaugaacuucgcccgcucccccgagaucgccgcccgccccgccgucaacggccagcgcggccgcaucgacuacuucugguccauccucaagcccggcgagacccucaacgucgaguccaacggcaaccucaucgcccccugguacgccuaccgcuucgucaacaaggacuccaagggcgccaucuuccgcuccaaccuccccaucgagaacugcgacgccaccugccagaccaccgagggcgucauccgcaccaacaagaccuuccagaacgucuccccccucuggaucggcgagugccccaaguacgucaaguccaagucccuccgccucgccaccggccuccgcaacgucccccagaucgagacccgcggccucuucggcgccaucgccggcuucaucgagggcggcuggaccggcaugaucgacggcugguacggcuaccaccacgagaacucccagggcuccggcuacgccgccgacaaggaguccacccagaaggccaucgacggcaucaccaacaaggucaacuccaucaucgacaagaugaacacccaguucgaggccgucggccacgaguucuccaaccucgagcgccgcaucgacaaccucaacaagcgcauggaggacggcuuccucgacgucuggaccuacaacgccgagcuccucguccuccucgagaacgagcgcacccucgaccuccacgacgccaacgucaagaaccuccacgagaagguccgcucccagcuccgcgacaacgccaacgaccucggcaacggcugcuucgaguucuggcacaagugcaacaacgagugcauggaguccgucaagaacggcaccuacgacuaccccaaguaccagaaggagucccgccucaaccgccagaagaucgaguccgucaagcucgagaacuucgacgucuaccagauccucgccaucuacuccaccgucuccuccucccucguccucgucggccucauccucgccaugggccucuggaugugcuccaacggcuccaugcagugccgcaucugcaucuga

SEQ ID NO: 107157 - RNA, 1701 nt, Artificial Sequence
  derived and/or modified CDS sequence (opt2) from hemagglutinin__InfluenzaA__AHJ57989
augaucgccuucaucgucaucgccauccucgucaccaccggcaaguccgacaagaucugcaucggcuaccacgccaacaacuccaccaccaaggucgacaccauccucgagaagaacgucaccgucacccacuccgucgagcuccucgagaaccagaaggaggagcgcuucugcaagaucuccaacaaggccccccucgaccuccgcgacugcacccucgagggcuggauccucggcaacccccgcugcggcauccuccucgccgaccaguccugguccuacaucgucgagcgccccaacgcccgcaacggcaucugcuaccccggcacccucaacgaggucgaggagcucaaggcccucaucggcuccggcgagcgcgucgagcgcuucgagauguuccccaaguccaccugggcccgcgucgacaccgaccgcggcgucuccuccgccugcccccucggcaacggccccuccuucuaccgcaaccuccucuggaucgucaagcacaccaccuccgaguaccccgucaucaagggcaccuacaccaacaccggcgacaaguccguccucuacuucuggggcguccaccacccccccgacaccaccgagcagaacguccucuacggcuccggcaaccgcuacguccgcaugggcaccgaguccaugaacuucgcccgcucccccgagaucgccgcccgccccgccgucaacggccagcgcggccgcaucgacuacuucugguccauccucaagcccggcgagacccucaacgucgaguccaacggcaaccucaucgcccccugguacgccuaccgcuucgucaacaaggacuccaagggcgccaucuuccgcuccaaccuccccaucgagaacugcgacgccaccugccagaccaccgagggcgucauccgcaccaacaagaccuuccagaacgucucccccauguggaucggcgagugccccaaguacgucaaguccaagucccuccgccucgccaccggccuccgcaacgucccccagaucgagacccgcggccucuucggcgccaucgccggcuucaucgagggcggcuggaccggcaugaucgacggcugguacggcuaccaccacgagaacucccagggcuccggcuacgccgccgaccgcgaguccacccagaaggccaucgacggcaucaccaacaaggucaacuccaucaucgacaagaugaacacccaguucgaggccgucggccacgaguucuccaaccucgagcgccgcaucgacaaccucaacaagcgcauggaggacggcuuccucgacgucuggaccuacaacgccgagcuccucguccuccucgagaacgagcgcacccucgaccuccacgacuccaacgucaagaaccuccacgagcgcgucaagucccagcuccgcgacaacgccaacgaccucggcaacggcugcuucgaguucuggcacaagugcgacaacgagugcauggaguccgucaagaacggcaccuacaacuaccccaaguaccaggccgagucccgccucaaccgccagaagaucgaguccgucaagcucgaggaguucggcgucuaccagauccucgccaucuacuccaccgucuccuccucccucguccucgucggccucaucauggccaugggccucuggaugugcuccaacggcuccaugcagugccgcaucugcaucuga

SEQ ID NO: 107158 - RNA, 1701 nt, Artificial Sequence
  derived and/or modified CDS sequence (opt2) from hemagglutinin__InfluenzaA__AHJ58001
augaucgccuucaucgucaucgccauccucgccgccaccggcaaguccgacaagaucugcaucggcuaccacgccaacaacuccaccaccaaggucgacaccauccucgagaagaacgucaccgucacccacuccgucgagcuccucgagaaccagaaggaggagcgcuucugcaagaucuccaacaaggccccccucgaccuccgcgacugcacccucgagggcuggauccucggcaacccccgcugcggcauccuccucgccgaccaguccugguccuacaucgucgagcgccccaacgcccgcaacggcaucugcuaccccggcauccucaacgaggccgaggagcucaaggcccucaucggcuccggcgagcgcgucgagcgcuucgagauguuccccaaguccaccugggccggcgucgacaccgacuccggcgucuccuccgccugcccccucggcaacggccccuccuucuaccgcaaccuccucuggaucaucaagcucaaguccuccgaguaccccgucauccgcggcaccuucaacaacaccggcgacaaguccauccucuacuucuggggcguccaccacccccccgucaccaccgagcaggaggcccucuacggcuccggcaaccgcuacguccgcaugggcaccgaguccaugaacuucgcccgcucccccgagaucgccgcccgccccgccgucaacggccagcgcggccgcaucgacuacuucugguccauccucaagcccggcgagacccucaacgucgaguccaacggcaaccucaucgcccccugguacgccuaccgcuucgucaacaaggacuccaagggcgccaucuuccgcuccaaccuccccaucgagaacugcgacgccaccugccagaccaccgagggcgucauccgcaccaacaagaccuuccagaacgucucccccauguggaucggcgagugccccaaguacgucaaguccaagucccuccgccucgccaccggccuccgcaacgucccccagaucgagacccgcggccucuucggcgccaucgccggcuucaucgagggcggcuggaccggcaugaucgacggcugguacggcuaccaccacgagaacucccagggcuccggcuacgccgccgaccgcgaguccacccagaaggccaucgacggcaucaccaacaaggucaacuccaucaucgacaagaugaacacccaguucgaggccgucggccacgaguucuccaaccucgagcgccgcaucgacaaccucaacaagcgcauggaggacggcuuccucgacgucuggaccuacaacgccgagcuccucguccuccucgagaacgagcgcacccucgaccuccacgacgccaacgucaagaaccuccacgagaagguccgcucccagcuccgcgacaacgccaacgaccucggcaacggcugcuucgaguucuggcacaagugcgacaacgagugcauggaguccgucaagaacggcaccuacgacuaccccaaguaccagaccgagucccgccucaaccgccagaagaucgaguccgucaagcucgagaacuucgacgucuaccagauccucgccaucuacuccaccgucuccuccucccucguccucgucggccucaucauggccaugggccucuggaugugcuccaacggcuccaugcagugccgcaucugcaucuga

SEQ ID NO: 107159 - RNA, 1701 nt, Artificial Sequence
  derived and/or modified CDS sequence (opt2) from hemagglutinin__InfluenzaA__AHJ58013
augaucgccuucaucgucaucgccauccucgucaccaccggcaaguccgacaagaucugcaucggcuaccacgccaacaacuccaccaccaaggucgacaccauccucgagaagaacgucaccgucacccacuccgucgagcuccucgagaaccagaaggaggagcgcuucugcaagaucuccuccaaggccccccucgaccuccgcgacugcucccucgagggcuggauccucggcaacccccgcugcggcauccuccucgccgaccaguccugguccuacaucgucgagcgccccaacgcccgcaacggcaucugcuaccccggcacccucaacgaggucgaggagcucaaggcccucaucggcuccggcgagcgcgucgagcgcuucgagauguuccccaaguccaccugggccggcgucgacaccaacuccggcgucuccuccgccugcccccucggcgagggccccuccuucuaccgcaaccuccucuggaucaucaagcgcaccaccuccgaguaccccgucaucaagggcaccuaccgcaacaccggcgacaaguccguccucuacuucuggggcguccaccacccccccgacaccaccgagcagaacguccucuacggcuccggcaaccgcuacguccgcaugggcaccgaguccaugaacuucgcccgcucccccgagaucgccgcccgccccgccgucaacggccagcgcggccgcaucgacuacuucugguccauccucaagcccggcgagacccucgacgucgaguccaacggcaaccucaucgcccccugguacgccuaccgcuucgucaacaaggaguccaagggcgccaucuuccgcuccaaccuccccaucgagaacugcgacgccaccugccagaccaccgagggcgucauccgcaccaacaagaccuuccagaacgucuccccccucuggaucggcgagugccccaaguacgucaaguccaagucccuccgccucgccaccggccuccgcaacgucccccagaucgagacccgcggccucuucggcgccaucgccggcuucaucgagggcggcuggaccggcaugaucgacggcugguacggcuaccaccacgagaacucccagggcuccggcuacgccgccgacaaggaguccacccagaaggccaucgacggcaucaccaacaaggucaacuccaucaucgacaagaugaacacccaguucgaggccgucggccacgaguucuccacccucgagcgccgcaucgacaaccucaacaagcgcauggaggacggcuuccucgacgucuggaccuacaacgccgagcuccucguccuccucgagaacgagcgcacccucgaccuccacgacgccaacgucaagaaccuccacgagcgcguccgcucccagcuccgcgacaacgccaacgaccucggcaacggcugcuucgaguucuggcacaagugcgacaacgagugcauggaguccgucaagaacggcaccuacaacuaccccaaguaccaggccgagucccgccucaacaagcagaagaucgaguccgucaagcucgaggaguucggcgucuaccagauccucgccaucuacuccaccgucuccuccucccucguccucgucggccucaucauggccaugggccucuggaugugcuccaacggcuccaugcagugccgcaucugcaucuga

SEQ ID NO: 107160 - RNA, 1701 nt, Artificial Sequence
  derived and/or modified CDS sequence (opt2) from hemagglutinin__InfluenzaA__AHJ58025
augaucgccuucaucgucaucgccauccucgucaccaccggcgaguccgacaagaucugcaucggcuaccacgccaacaacuccaccaccaaggucgacaccauccucgagaagaacgucaccgucacccacuccgucgagcuccucgagaaccagaaggaggagcgcuucugcaagaucuccaacaaggccccccucgaccuccgcgacugcaccaucgagggcuggauccucggcaacccccgcugcggcauccuccucgccgaccaguccugguccuacaucgucgagcgccccaacgcccgcaacggcaucugcuaccccggcacccucaacgaggccgaggagcucaaggcccucaucggcuccggcgagggcgucgagcgcuucgagauguuccccaaguccaccugggccggcgucgacaccaacuccggcgucuccuccgccugcccccucggcaacggccccuccuucuaccgcaaccuccucuggaucaucaagcucaaguccuccgaguaccccgucauccgcggcaccuucaacaacaccggcgacaaguccguccucuacuucuggggcguccaccacccccccgucaccaccgagcagaacgaccucuacggcuccggcaaccgcuacguccgcaugggcaccgaguccaugaacuucgcccgcaaccccgagaucgcccuccgccccgccgucaacggccagcgcggccgcaucgacuacuucugguccauccucaagcccggcgagacccucaacgucgaguccaacggcaaccucaucgcccccugguacgccuaccgcuucgucaacaaggacuccaagggcgccaucuuccgcuccucccuccccaucgagaacugcgacgccaccugccagaccgccgagggcgucauccgcaccaacaagaccuuccagaacgucuccccccucuggaucggcgagugccccaaguacgucaaguccaagucccuccgccucgccaccggccuccgcaacgucccccagaucgagacccgcggccucuucggcgccaucgccggcuucaucgagggcggcuggaccggcauggucgacggcugguacggcuaccaccacgagaacucccagggcuccggcuacgccgccgaccgcgaguccacccagaaggccaucgacggcaucaccaacaaggucaacuccaucaucgacaagaugaacacccaguucgaggccgucgaccacgaguucuccaaccucgagcgccgcaucgacaaccucaacaagcgcauggaggacggcuuccucgacgucuggaccuacaacgccgagcuccucguccuccucgagaacgagcgcacccucgaccuccacgacgccaacgucaagaaccuccacgagaaggucaagucccagcuccgcgacaacgccaacgaccucggcaacggcugcuucgaguucuggcacaagugcgacaacgagugcauggaguccgucaagaacggcaccuacaacuaccccaaguaccagaaggagucccgccucaaccgccagaagaucgaguccgucaagcucgagaacuucgacgucuaccagauccucgccaucuacuccaccgucuccuccucccucguccucgucggccucaucauggccaugggccucuggaugugcuccaacggcuccaugcagugccgcaucugcaucuga

SEQ ID NO: 107161 - RNA, 1701 nt, Artificial Sequence
  derived and/or modified CDS sequence (opt2) from hemagglutinin__InfluenzaA__AHJ58037
augaucgccuucaucaucaucaccauccucgucaccaccggcgaguccgacaagaucugcaucggcuaccacgccaacaacuccaccaccaaggucgacaccauccucgagaagaacgucaccgucacccacuccgucgagcuccucgagaaccagaaggaggagcgcuucugcaagaucuccaacaaggccccccucgaccucaaggagugcacccucgagggcuggauccucggcaacccccagugcgaccuccuccucggcgaccaguccugguccuacaucgucgagcgccccaacgcccgcaacggcaucugcuaccccggcacccucaacgaggucgaggagcucaaggcccucaucggcuccggcgagcgcgucgagcgcuucgagauguuccccaaguccaccugggccggcgucgacaccaacuccggcgucacccgcuccugccccuucggcuccggcuccuccuucuaccgcaaccuccucuggaucaucaagcacaccaccuccuccuaccccgucaucaagggcaccuuccgcaacaccggcgacaaguccguccucuacuucuggggcguccaccaccccaucgacaccaccgagcagaacguccucuacggcuccggcaaccgcuacguccgcaugggcaccgaguccaugaacuucgcccgcucccccgagaucgccgcccgccccgucgucaacggccagcgcggccgcaucgacuacuucugguccauccucaagcccggcgagacccucaacaucgaguccaacggcaaccucaucgcccccugguacgccuaccgcuucgucaacaaggacuccaagggcgccaucuuccgcuccaaccuccccaucgagaacugcgacgccaccugccagaccaucgagggcgucauccgcaccaacaagaccuuccagaacgucuccccccucuggaucggcgagugccccaaguacgucaaguccgagucccuccgccucgccaccggccuccgcaacgucccccagaucgagacccgcggccucuucggcgccaucgccggcuucaucgagggcggcuggaccggcaugaucgacggcugguacggcuaccaccacgagaacucccagggcuccggcuacgccgccgaccgcgaguccacccagcgcgccaucgacggcaucaccaccaaggucaacuccaucaucgacaagaugaacacccaguucgaggccgucggccacgaguucuccaaccucgagcgccgcaucgacaaccucaacaagcgcauggaggacggcuuccucgacgucuggaccuacaacgccgagcuccucguccuccucgagaacgagcgcacccucgaccuccacgacgccaacgucaagaaccuccacgagcgcgucaagucccagcuccgcgacaacgccaacgaccucggcaacggcugcuucgaguucuggcacaagugcgacaacgagugcauggaguccgucaagaacggcaccuacgacuaccccaaguaccaggccgagucccgccucaacaagcagcgcaucgaguccgucaagcucgagaacuucgacgucuaccagauccucgccaucuacuccaccgucuccuccucccucguccucgucggccucaucauggccaucggccucuggaugugcuccaacggcuccaugcagugccgcaucugcaucuga

SEQ ID NO: 107162 - RNA, 1701 nt, Artificial Sequence
  derived and/or modified CDS sequence (opt2) from hemagglutinin__InfluenzaA__AHJ58049
augaucgccuucaucgucaucgccauccucgccgccaccggcaaguccgacaagaucugcaucggcuaccacgccaacaacuccaccaccaaggucgacaccauccucgagaagaacgucaccgucacccacuccgucgagcuccucgagaaccagaaggaggagcgcuucugcaagaucuccaacaaggccccccucgaccuccgcgacugcacccucgagggcuggauccucggcaacccccgcugcggcauccuccucgccgaccaguccugguccuacaucgucgagcgccccaacgcccgcaacggcaucugcuaccccggcauccucaacgaggccgaggagcucaaggcccucaucggcuccggcgagcgcgucgagcgcuucgagauguuccccaaguccaccugggccggcgucgacaccgacuccggcgucuccuccgccugcccccucggcaacggccccuccuucuaccgcaaccuccucuggaucaucaagcucaaguccuccgaguaccccgucauccgcggcaccuucaacaacaccggcgacaaguccauccucuacuucuggggcguccaccacccccccgucaccaccgagcaggaggcccucuacggcuccggcaaccgcuacguccgcaugggcaccgaguccaugaacuucgcccgcacccccgagaucgccgcccgccccgccgucaacggccagcgcggccgcaucgacuacuucugguccauccucaagcccggcgagacccucaacgucgaguccaacggcaaccucaucgcccccugguacgccuaccgcuucgucaacaaggacuccaagggcgccaucuuccgcuccaaccuccccaucgagaacugcgacgccaccugccagaccaccgagggcgucauccgcaccaacaagaccuuccagaacgucuccccccucuggaucggcgagugccccaaguacgucaaguccaagucccuccgccucgccaccggccuccgcaacgucccccagaucgagacccgcggccucuucggcgccaucgccggcuucaucgagggcggcuggaccggcaugaucgacggcugguacggcuaccaccacgagaacucccagggcuccggcuacgccgccgaccgcgaguccacccagaaggccaucgacggcaucaccaacaaggucaacuccaucaucgacaagaugaacacccaguucgaggccgucggccacgaguucuccaaccucgagcgccgcaucgacaaccucaacaagcgcauggaggacggcuuccucgacgucuggaccuacaacgccgagcuccucguccuccucgagaacgagcgcacccucgaccuccacgacgccaacgucaagaaccuccacgagaagguccgcucccagcuccgcgacaacgccaacgaccucggcaacggcugcuucgaguucuggcacaagugcgacaacgagugcauggaguccgucaagaacggcaccuacgacuaccccaaguaccaggccgagucccgccucaaccgccagaagaucgaguccgucaagcucgagaacuucgacgucuaccagauccucgccaucuacuccaccgucuccuccucccucguccucgucggccucaucauggccaugggccucuggaugugcuccaacggcuccaugcagugccgcaucugcaucuga

SEQ ID NO: 107163 - RNA, 1701 nt, Artificial Sequence
  derived and/or modified CDS sequence (opt2) from hemagglutinin__InfluenzaA__AHJ58061
augaucgccuucaucgucaucgccacccucgucgccaccggcaaguccgacaagaucugcaucggcuaccacgccaacaacuccaccaccaaggucgacaccauccucgagaagaacgucaccgucacccacuccgucgagcuccucgagaaccagaaggaggagcgcuucugcaagaucuccaacaaggccccccucgaccuccgcgacugcacccucgagggcuggauccucggcaacccccgcugcggcauccuccucgccgaccaguccugguccuacaucgucgagcgccccaacgcccgcaacggcaucugcuaccccggcacccucaacgaggccgaggagcucaaggcccucaucggcuccggcgagcgcgucgagcgcuucgagauguuccccaaguccaccuggaccggcgucgacaccgaguccggcgucuccuccgccugcccccucggcaacggccccuccuucuaccgcaaccuccucuggaucaucaagcucaaguccuccgaguaccccgucauccgcggcaccuucaacaacaccggcgacaaguccauccucuacuucuggggcguccaccacccccccgucaccaccgagcagaacgcccucuacggcuccggcgaccgcuacguccgcaugggcaccgaguccaugaacuucgcccgcucccccgagaucgccgcccgccccgccgucaacggccagcgcggccgcaucgacuacuucugguccauccucaagcccggcgagacccucaacgucgaguccaacggcaaccucaucgcccccugguacgccuaccgcuucgucaacaaggacuccaagggcgccaucuuccgcuccaaccuccccaucgagaacugcgacgccaccugccagaccaccgagggcgucauccgcaccaacaagaccuuccagaacgucuccccccucuggaucggcgagugccccaaguacgucaaguccaagucccuccgccucgccaccggccuccgcaacgucccccagaucgagacccgcggccucuucggcgccaucgccggcuucaucgagggcggcuggaccggcaugaucgacggcugguacggcuaccaccacgagaacucccagggcuccggcuacgccgccgacaaggaguccacccagaaggccaucgacggcaucaccaacaaggucaacuccaucaucgacaagaugaacacccaguucgaggccgucggccacgaguucuccaaccucgagcgccgcaucgacaaccucaacaagcgcauggaggacggcuuccucgacgucuggaccuacaacgccgagcuccucguccuccucgagaacgagcgcacccucgaccuccacgacgccaacgucaagaaccuccacgagaagguccgcucccagcuccgcgacaacgccaacgaccucggcaacggcugcuucgaguucuggcacaagugcaacaacgagugcauggaguccgucaagaacggcaccuacgacuaccccaaguaccagaaggagucccgccucaaccgccagaagaucgaguccgucaagcucgagaacuucgacgucuaccagauccucgccaucuacuccaccgucuccuccucccucguccucgucggccucauccucgccaugggccucuggaugugcuccaacggcuccaugcagugccgcaucugcaucuga

SEQ ID NO: 107164 - RNA, 1701 nt, Artificial Sequence
  derived and/or modified CDS sequence (opt2) from hemagglutinin__InfluenzaA__AHJ58084
augaucgccuucaucgucaucgccacccucgucgccaccggcaaguccgacaagaucugcaucggcuaccacgccaacaacuccaccaccaaggucgacaccauccucgagaagaacgucaccgucacccacuccgucgagcuccucgagaaccagaaggaggagcgcuucugcaagaucuccaacaaggccccccucgaccuccgcgacugcacccucgagggcuggauccucggcaacccccgcugcggcauccuccucgccgaccaguccugguccuacaucgucgagcgccccaacgcccgcaacggcaucugcuaccccggcacccucaacgaggccgaggagcucaaggcccucaucggcuccggcgagcgcgucgagcgcuucgagauguuccccaaguccaccuggaccggcgucaacaccgaguccggcgucuccuccgccugcccccucggcaacggccccuccuucuaccgcaaccuccucuggaucaucaagcucaaguccuccgaguaccccgucauccgcggcaccuucaacaacaccggcgacaaguccauccucuacuucuggggcguccaccacccccccgucaccaccgagcagaacgcccucuacggcuccggcgaccgcuacguccgcaugggcaccgaguccaugaacuucgcccgcucccccgagaucgccgcccgccccgccgucaacggccagcgcggccgcaucgacuacuucugguccauccucaagcccggcgagacccucaacgucgaguccaacggcaaccucaucgcccccugguacgccuaccgcuucgucaacaaggacuccaagggcgccaucuuccgcuccaaccuccccaucgagaacugcgacgccaccugccagaccaccgagggcgucauccgcaccaacaagaccuuccagaacgucuccccccucuggaucggcgagugccccaaguacgucaaguccaagucccuccgccucgccaccggccuccgcaacgucccccagaucgagacccgcggccucuucggcgccaucgccggcuucaucgagggcggcuggaccggcaugaucgacggcugguacggcuaccaccacgagaacucccagggcuccggcuacgccgccgacaaggaguccacccagaaggccaucgacggcaucaccaacaaggucaacuccaucaucgacaagaugaacacccaguucgaggccgucggccacgaguucuccaaccucgagcgccgcaucgacaaccucaacaagcgcauggaggacggcuuccucgacgucuggaccuacaacgccgagcuccucguccuccucgagaacgagcgcacccucgaccuccacgacgccaacgucaagaaccuccacgagaagguccgcucccagcuccgcgacaacgccaacgaccucggcaacggcugcuucgaguucuggcacaagugcaacaacgagugcauggaguccgucaagaacggcaccuacgacuaccccaaguaccagaaggagucccgccucaaccgccagaagaucgaguccgucaagcucgagaacuucgacgucuaccagauccucgccaucuacuccaccgucuccuccucccucguccucgucggccucauccucgccaugggccucuggaugugcuccaacggcuccaugcagugccgcaucugcaucuga

SEQ ID NO: 107165 - RNA, 1701 nt, Artificial Sequence; identical to SEQ ID NO: 102891
  derived and/or modified CDS sequence (opt2) from hemagglutinin__InfluenzaA__AHL80708

SEQ ID NO: 107166 - RNA, 1701 nt, Artificial Sequence
  derived and/or modified CDS sequence (opt2) from hemagglutinin__InfluenzaA__AHL80718
augaaggccauccucgucguccuccucuacaccuucgccaccgccaacgccgacacccucugcaucggcuaccacgccaacaacuccaccgacaccgucgacaccguccucgagaagaacgucaccgucacccacuccgucaaccuccucgaggacaagcacaacggcaagcucugcaagcuccgcggcgucgccccccuccaccucggcaagugcaacaucgccggcuggauccucggcaaccccgagugcgagucccucuccaccgccuccuccugguccuacaucgucgagaccuccuccuccgacaacggcaccugcuaccccggcgacuucaucaacuacgaggagcuccgcgagcagcucuccuccgucuccuccuucgagcgcuucgagaucuuccccaagaucuccuccuggcccaaccacgacuccaacaagggcgucaccgccgccugcccccacgccggcgccaaguccuucuacaagaaccucaucuggcucgucaagaagggcaacuccuaccccaagcucuccaaguccuacaucaacgacaagggcaaggagguccucguccucuggggcauccaccaccccuccaccaccgccgaccagcagucccucuaccagaacgccgacgccuacgucuucgucggcaccucccgcuacuccaagaaguucaagcccgagaucgccauccgccccaagguccgcgaccaggagggccgcaugaacuacuacuggacccucgucgagcccggcgacaagaucaccuucgaggccaccggcaaccucgucgucccccgcuacgccuucgccauggagcgcaacgccggcuccggcaucaucaucuccgacaccuccguccacgacugcaacaccaccugccagacccccaagggcgccaucaacaccucccuccccuuccagaacauccaccccaucaccaucggcaagugccccaaguacgucaaguccaccaagcuccgccucgccaccggccuccgcaacguccccuccauccagucccgcggccucuucggcgccaucgccggcuucaucgagggcggcuggaccggcauggucgacggcugguacggcuaccaccaccagaacgagcagggcuccggcuacgccgccgaccucaaguccacccagaacgccaucgacaagaucaccaacaaggucaacuccgucaucgagaagaugaacacccaguucaccgccgucggcaaggaguucaaccaccucgagaagcgcaucgagaaccucaacaagaaggucgacgacggcuuccucgacaucuggaccuacaacgccgagcuccucguccuccucgagaacgagcgcacccucgacuaccacgacuccaacgucaagaaccucuacgagaagguccgcucccagcucaagaacaacgccaaggagaucggcaacggcugcuucgaguucuaccacaagugcgacaacaccugcauggaguccgucaagaacggcaccuacgacuaccccaaguacuccgaggaggccaagcucaaccgcgaggagaucgacggcgucaagcucgaguccacccgcaucuaccagauccucgccaucuacuccaccgucgccuccucccucguccucgucgucucccucggcgccaucuccuucuggaugugcuccaacggcucccuccagugccgcaucugcaucuga

SEQ ID NO: 107167 - RNA, 1710 nt, Artificial Sequence
  derived and/or modified CDS sequence (opt2) from hemagglutinin__InfluenzaA__AHL80729
augaaggccauccucgucguccuccucuacaccuucgccaccgccaacgccgacacccucugcaucggcuaccacgccaacaacuccaccgacaccgucgacaccguccucgagaagaacgucaccgucacccacuccgucaaccuccucgaggacaagcacaacggcaagcucugcaagcuccgcggcgucgccccccuccaccucggcgagugcaacaucgccggcuggauccucggcaaccccgagugcgagucccucuccaccgccuccuccugguccuacaucgucgagaccuccuccuccgacaacggcaccugcuaccccggcgacuucaucgacuacgaggagcuccgcgagcagcucuccuccgucuccuccuucgagcgcuucgagaucuuccccaagaccuccuccuggcccaaccacgacuccaacaagggcgucaccgccgccugcccccacgccggcgccaaguccuucuacaagaaccucaucuggcucgucaagaagggcaacuccuaccccaagcucuccaaguccuacaucaacgacaagggcaaggagguccucguccucuggggcauccaccaccccuccaccuccgccgaccagcagucccucuaccagaacgccgacgccuacgucuucgucggcaccucccgcuacuccaagaaguucaagcccgagaucgccauccgccccaagguccgcgaccaggagggccgcaugaacuacuacuggacccucgucgagcccggcgacaagaucaccuucgaggccaccggcaaccucgucgucccccgcuacgccuucgccauggagcgcaacgccggcuccggcaucaucaucuccgacacccccguccacgacugcaacaccaccugccagacccccaagggcgccaucaacaccucccucaccucccuccccuuccagaacguccaccccaucaccaucggcaagugccccaaguacgucaaguccaccaagcuccgccucgccaccggccuccgcaacguccccuccauccagucccgcggccucuucggcgccaucgccggcuucaucgagggcggcuggaccggcauggucgacggcugguacggcuaccaccaccagaacgagcagggcuccggcuacgccgccgaccucaaguccacccagaacgccaucgacgagaucaccaacaaggucaacuccgucaucgagaagaugaacacccaguucaccgccgucggcaaggaguucaaccaccucgagaagcgcaucgagaaccucaacaagaaggucgacgacggcuuccucgacaucuggaccuacaacgccgagcuccucguccuccucgagaacgagcgcacccucgacuaccacgacuccaacgucaagaaccucuacgagaagguccgcucccagcucaagaacaacgccaaggagaucggcaacggcugcuucgaguucuaccacaagugcgacaacaccugcauggaguccgucaagaacggcaccuacgacuaccccaaguacuccgaggaggccaagcucaaccgcgaggagaucgacggcgucaagcucgaguccacccgcaucuaccagauccucgccaucuacuccaccgucgccuccucccucguccucgucgucucccucggcgccaucuccuucuggaugugcuccaacggcucccuccagugccgcaucugcaucuga

SEQ ID NO: 107168 - RNA, 1701 nt, Artificial Sequence
  derived and/or modified CDS sequence (opt2) from hemagglutinin__InfluenzaA__AHL80740
augaaggccauccucgucguccuccucuacaccuucgccaccgccaacgccgacacccucugcaucggcuaccacgccaacaacuccaccgacaccgucgacaccguccucgagaagaacgucaccgucacccacuccgucaaccuccucgaggacaagcacaacggcaagcucugcaagcuccgcggcgucgccccccuccaccucggcaagugcaacaucgccggcuggauccucggcaaccccgagugcgagcuccucuccaccgccuccuccugguccuacaucgucgagaccuccuccuccgacaacggcaccugcuaccccggcgacuucaucaacuacgaggagcuccgcgagcagcucuccuccgucuccuccuucgagcgcuucgagaucuuccccaagaccuccuccuggcccaaccacgacuccaacaagggcgucaccgccgccugcccccacgccggcgccaaguccuucuacaagaaccucaucuggcucgucaagaagggcaacuccuaccccaagcucuccaaguccuacaucaacgacaagggcaaggagguccucguccucuggggcguccaccaccccuccaccuccgccgaccagcagucccucuaccagaacgccgacgccuacgucuucgucggcaccucccgcuacuccaagaaguucaagcccgagaucgccauccgccccaagguccgcgaccaggagggccgcaugaacuacuacuggacccucgucgagcccggcgacaagaucaccuucgaggccaccggcaaccucgucgucccccgcuacgccuucgccauggagcgcaacgccggcuccggcaucaucaucuccgacacccccguccacgacugcaacaccaccugccagacccccaagggcgccaucaacaccucccuccccuuccagaacauccaccccaucaccaucggcaagugccccaaguacgucaaguccaccaagcuccgccucgccaccggccuccgcaacguccccuccauccagucccgcggccucuucggcgccaucgccggcuucaucgagggcggcuggaccggcauggucgacggcugguacggcuaccaccaccagaacgagcagggcuccggcuacgccgccgaccucaaguccacccagaacgccaucgacaagaucaccaacaaggucaacuccgucaucgagaagaugaacacccaguucaccgccgucggcaaggaguucaaccaccucgagaagcgcaucgagaaccucaacaagaaggucgacgacggcuuccucgacaucuggaccuacaacgccgagcuccucguccuccucgagaacgagcgcacccucgacuaccacgacuccaacgucaagaaccucuacgagaagguccgcucccagcucaagaacaacgccaaggagaucggcaacggcugcuucgaguucuaccacaagugcgacaacaccugcauggaguccgucaagaacggcaccuacgacuaccccaaguacuccgaggaggccaagcucaaccgcgagaagaucgacggcgucaagcucgaguccacccgcaucuaccagauccucgccaucuacuccaccgucgccuccucccucguccucgucgucucccucggcgccaucuccuucuggaugugcuccaacggcucccuccagugccgcaucugcaucuga

SEQ ID NO: 107169 - RNA, 1701 nt, Artificial Sequence
  derived and/or modified CDS sequence (opt2) from hemagglutinin__InfluenzaA__AHL80751
augaaggccauccucgucguccuccucuacaccuucgccaccgccaacgccgacacccucugcaucggcuaccacgccaacaacuccaccgacaccgucgacaccauccucgagaagaacgucaccgucacccacuccgucaaccuccucgaggacaagcacaacggcaagcucugcaagcuccgcggcgucgccccccuccaccucggcaagugcaacaucgccggcuggauccucggcaaccccgagugcgagucccucuccaccgccuccuccugguccuacaucgucgagaccuccuccuccgacaacggcaccugcuaccccggcgacuucaucgacuacgaggagcuccgcgagcagcucuccuccgucuccuccuucgagcgcuucgagaucuuccccaagaccuccuccuggcccaaccacgacuccaacaagggcgucaccgccgccugcccccacgccggcgccaaguccuucuacaagaaccucaucuggcucgucaagaagggcaacuccuaccccaagcucuccaaguccuacaucaacgacaagggcaaggagauccucguccucuggggcauccaccaccccuccaccuccgccgaccagcagucccucuaccagaacgccgacgccuacgucuucgucggcaccucccgcuacuccaagaaguucaagcccgagaucgccauccgccccaagguccgcgaccaggagggccgcaugaacuacuacuggacccucgucgagcccggcgacaagaucaccuucgaggccaccggcaaccucgucgucccccgcuacgccuucgccauggagaagaacgccggcuccggcaucaucaucuccgacacccccguccacgacugcaacaccaccugccagacccccaagggcgccaucaacaccucccuccccuuccagaacauccaccccaucaccaucggcaagugccccaaguacgucaaguccaccaagcuccgccucgccaccggccuccgcaacguccccuccauccagucccgcggccucuucggcgccaucgccggcuucaucgagggcggcuggaccggcauggucgacggcugguacggcuaccaccaccagaacgagcagggcuccggcuacgccgccgaccucaaguccacccagaacgccaucgacgagaucaccaacaaggucaacuccgucaucgagaagaugaacacccaguucaccgccgucggcaaggaguucaaccaccucgagaagcgcaucgagaaccucaacaagaaggucgacgacggcuuccucgacaucuggaccuacaacgccgagcuccucguccuccucgagaacgagcgcacccucgacuaccacgacuccaacgucaagaaccucuacgagaagguccgcucccagcucaagaacaacgccaaggaggucggcaacggcugcuucgaguucuaccacaagugcgacaacaccugcauggaguccgucaagaacggcaccuacgacuaccccaaguacuccgaggaggccaagcucaaccgcgaggagaucgacggcgucaagcucgaguccacccgcaucuaccagauccucgccaucuacuccaccgucgccuccucccucguccucgucgucucccucggcgccaucuccuucuggaugugcuccaacggcucccuccagugccgcaucugcaucuga

SEQ ID NO: 107170 - RNA, 1701 nt, Artificial Sequence
  derived and/or modified CDS sequence (opt2) from hemagglutinin__InfluenzaA__AHL80762
augaaggccauccucgucguccuccucuacaccuucgccaccgccaacgccgacacccucugcaucggcuaccacgccaacaacuccaccgacaccgucgacaccguccucgagaagaacgucaccgucacccacuccgucaaccuccucgaggacaagcacaacggcaagcucugcaagcuccgcggcgucgccccccuccaccucggcaagugcaacaucgccggcuggauccucggcaaccccgagugcgagucccucuccaccgccuccuccugguccuacaucgucgagaccuccuccuccgacaacggcaccugcuaccccggcgacuucaucaacuacgaggagcuccgcgagcagcucuccuccgucuccuccuucgagcgcuucgagaucuuccccaagaccuccuccuggcccaaccacgacuccaacaagggcgucaccgccgccugcccccacgccggcgccaaguccuucuacaagaaccucaucuggcucgucaagaagggcaacuccuaccccaagcucuccaaguccuacaucaacgacaagggcaaggagguccucguccucuggggcauccaccaccccuccaccuccgccgaccagcagucccucuaccagaacgccgacgccuacgucuucgucggcaccucccgcuacuccaagaaguucaagcccgagaucgccauccgccccaagguccgcgaccaggagggccgcaugaacuacuacuggauccucgucgagcccggcgacaagaucaccuucgaggccaccggcaaccucgucgucccccgcuacgccuucgccauggagcgcaacgccggcuccggcaucaucaucuccgacacccccguccacgacugcaacaccaccugccagacccccaagggcgccaucaacaccucccuccccuuccagaacauccaccccaucaccaucggcaagugccccaaguacgucaaguccaccaagcuccgccucgccaccggccuccgcaacguccccuccauccagucccgcggccucuucggcgccaucgccggcuucaucgagggcggcuggaccggcauggucgacggcugguacggcuaccaccaccagaacgagcagggcuccggcuacgccgccgaccucaaguccacccagaacgccaucgacaagaucaccaacaaggucaacuccgucaucgagaagaugaacacccaguucaccgccgucggcaaggaguucaaccaccucgagaagcgcaucgagaaccucaacaagaaggucgacgacggcuuccucgacaucuggaccuacaacgccgagcuccucguccuccucgagaacgagcgcacccucgacuaccacgacuccaacgucaagaaccucuacgagaagguccgcucccagcucaaggacaacgccaaggagaucggcaacggcugcuucgaguucuaccacaagugcgacaacaccugcauggaguccgucaagaacggcaccuacgacuaccccaaguacuccgaggaggccaagcucaaccgcgaggagaucgacggcgucaagcucgaguccacccgcaucuaccagauccucgccaucuacuccaccgucgccuccucccucguccucgucgucucccucggcgccaucuccuucuggaugugcuccaacggcucccuccagugccgcaucugcaucuga

SEQ ID NO: 107171 - RNA, 1701 nt, Artificial Sequence
  derived and/or modified CDS sequence (opt2) from hemagglutinin__InfluenzaA__AHL80784
augaaggccauccucgucguccuccucuacaccuucgccaccgccaacgccgacacccucugcaucggcuaccacgccaacaacuccaccgacaccgucgacaccguccucgagaagaacgucaccgucacccacuccgucaaccuccucgaggacaagcacaacggcaagcucugcaagcuccgcggcgucgccccccuccaccucggcaagugcaacaucgccggcuggauccucggcaaccccgagugcgagucccucuccaccgccuccuccugguccuacaucgucgagaccuccuccuccgacaacggcaccugcuaccccggcgacuucaucgacuacgaggagcuccgcgagcagcucuccuccgucuccuccuucgagcgcuucgagaucuuccccaagaccuccuccuggcccaaccacgacuccaacaagggcaucaccgccgccugcccccacgccggcgccaaguccuucuacaagaaccucaucuggcucgucaagaagggcaacuccuaccccaagcucuccaaguccuacaucaacgacaagggcaaggagguccucguccucuggggcauccaccaccccuccaccuccgccgaccagcagucccucuaccagaacgccgacgccuacgucuucgucggcaccucccgcuacuccaagaaguucaagcccgagaucgccauccgccccaagguccgcgaccaggagggccgcaugaacuacuacuggacccucgucgagcccggcgacaagaucaccuucgaggccaccggcaaccucgucgucccccgcuacgccuucgccauggagcgcaacgccggcuccggcaucaucaucuccgacacccccguccacgacugcaacaccaccugccagacccccaagggcgccaucaacaccucccuccccuuccagaacauccaccccaucaccaucggcaagugccccaaguacgucaaguccaccaagcuccgccucgccaccggccuccgcaacguccccuccauccagucccgcggccucuucggcgccaucgccggcuucaucgagggcggcuggaccggcauggucgacggcugguacggcuaccaccaccagaacgagcagggcuccggcuacgccgccgaccucaaguccacccagaacgccaucgacaagaucaccaacaaggucaacuccgucaucgagaagaugaacacccaguucaccgccgucggcaaggaguucaaccaccucgagaagcgcaucgagaaccucaacaagaaggucgacgacggcuuccucgacaucuggaccuacaacgccgagcuccucguccuccucgagaacgagcgcacccucgacuaccacgacuccaacgucaagaaccucuacgagaagguccgcucccagcucaagaacaacgccaaggagaucggcaacggcugcuucgaguucuaccacaagugcgacaacaccugcauggaguccgucaagaacggcaccuacgacuaccccaaguacuccgaggaggccaagcucaaccgcgaggagaucgacggcgucaagcucgaguccacccgcaucuaccagauccucgccaucuacuccaccgucgccuccucccucguccucgucgucucccucggcgccaucuccuucuggaugugcuccaacggcucccuccagugccgcaucugcaucuga

SEQ ID NO: 107172 - RNA, 1701 nt, Artificial Sequence; identical to SEQ ID NO: 99869
  derived and/or modified CDS sequence (opt2) from hemagglutinin__InfluenzaA__AHL80795

SEQ ID NO: 107173 - RNA, 1701 nt, Artificial Sequence
  derived and/or modified CDS sequence (opt2) from hemagglutinin__InfluenzaA__AHL80817
augaaggccauccucgucguccuccucuacaccuucgccaccgccaacgccgacacccucugcaucggcuaccacgccaacaacuccaccgacaccgucgacaccguccucgagaagaacgucaccgucacccacuccgucaaccuccucgaggacaagcacaacggcaagcucugcaagcuccgcggcgucgccccccuccaccucggcaacugcaacaucgccggcuggauccucggcaaccccgagugcgagucccucuccaccgccuccuccugguccuacaucgucgaggccuccuccuccgacaacggcaccugcuaccccggcgacuucaucgacuacgaggagcuccgcgagcagcucuccuccgucuccuccuucgagcgcuucgagaucuuccccaagaccuccuccuggcccaaccacgacuccaacaagggcgucaccgccgccugcccccacgccggcgccaaguccuucuacaagaaccucaucuggcucgucaagaagggcaacuccuaccccaagcucuccaaguccuacaucaacgacaagggcaaggagguccucguccucuggggcauccaccaccccuccaccuccgccgaccagcagucccucuaccagaacgccgacgccuacgucuucgucggcaccucccgcuacuccaagaaguucaagcccgagaucgccauccgccccaagguccgcgaccaggagggccgcaugaacuacuacuggacccucgucgagcccggcgacaagaucaccuucgaggccaccggcaaccucgucgucccccgcuacgccuucgccauggagcgcaacgccggcuccggcaucaucaucuccgacacccccguccacgacugcaacaccaccugccagacccccaagggcgccaucaacaccucccuccccuuccagaacauccaccccaucaccaucggcaagugccccaaguacgucaaguccaccaagcuccgccucgccaccggccuccgcaacguccccuccauccagucccgcggccucuucggcgccaucgccggcuucaucgagggcggcuggaccggcauggucgacggcugguacggcuaccaccaccagaacgagcagggcuccggcuacgccgccgaccucaaguccacccagaacgccaucgacaagaucaccaacaaggucaacuccgucaucgagaagaugaacacccaguucaccgccgucggcaaggaguucaaccaccucgagaagcgcaucgagaaccucaacaagaaggucgacgacggcuuccucgacaucuggaccuacaacgccgagcuccucguccuccucgagaacgagcgcacccucgacuaccacgacuccaacgucaagaaccucuacgagaagguccgcucccagcucaagaacaacgccaaggagaucggcaacggcugcuucgaguucuaccacaagugcgacaacaccugcauggaguccgucaagaacggcaccuacgacuaccccaaguacuccgaggaggccaagcucaaccgcgaggagaucgacggcgucaagcucgaguccacccgcaucuaccagauccucgccaucuacuccaccgucgccuccucccucguccucgucgucucccucggcgccaucuccuucuggaugugcuccaacggcucccuccagugccgcaucugcaucuga

SEQ ID NO: 107174 - RNA, 1701 nt, Artificial Sequence; identical to SEQ ID NO: 107173
  derived and/or modified CDS sequence (opt2) from hemagglutinin__InfluenzaA__AHL80828

SEQ ID NO: 107175 - RNA, 1701 nt, Artificial Sequence
  derived and/or modified CDS sequence (opt2) from hemagglutinin__InfluenzaA__AHL80839
augaaggccauccucgucguccuccucuacaccuucgccaccgccaacgccgacacccucugcaucggcuaccacgccaacaacuccaccgacaccgucgacaccguccucgagaagaacgucaccgucacccacuccgucaaccuccucgaggacaagcacaacggcaagcucugcaagcuccgcggcgucgccccccuccaccucggcaagugcaacaucgccggcuggauccucggcaaccccgagugcgagucccucuccaccgccuccuccugguccuacaucgucgagaccuccuccuccgacaacggcaccugcuaccccggcgacuucaucgacuacgaggagcuccgcgagcagcucuccuccgucuccuccuucgagcgcuucgagaucuuccccaagaccuccuccuggcccaaccacgacuccaacaagggcaucaccgccgccugcccccacgccggcgccaaguccuucuacaagaaccucaucuggcucgucaagaagggcaacuccuaccccaagcucucccgcuccuacaucaacgacaagggcaaggagguccucguccucuggggcauccaccaccccuccaccuccgccgaccagcagucccucuaccagaacgccgacgccuacgucuucgucggcaccucccgcuacuccaagaaguucaagcccgagaucgccauccgccccaagguccgcgaccaggagggccgcaugaacuacuacuggacccucgucgagcccggcgacaagaucaccuucgaggccaccggcaaccucgucgucccccgcuacgccuucgccauggagcgcaacgccggcuccggcaucaucaucuccgacacccccguccacgacugcaacaccaccugccagacccccaagggcgccaucaacaccucccuccccuuccagaacauccaccccaucaccaucggcaagugccccaaguacgucaaguccaccaagcuccgccucgccaccggccuccgcaacguccccuccauccagucccgcggccucuucggcgccaucgccggcuucaucgagggcggcuggaccggcauggucgacggcugguacggcuaccaccaccagaacgagcagggcuccggcuacgccgccgaccucaaguccacccagaacgccaucgacaagaucaccaacaaggucaacuccgucaucgagaagaugaacacccaguucaccgccgucggcaaggaguucaaccaccucgagaagcgcaucgagaaccucaacaagaaggucgacgacggcuuccucgacaucuggaccuacaacgccgagcuccucguccuccucgagaacgagcgcacccucgacuaccacgacuccaacgucaagaaccucuacgagaagguccgcucccagcucaagaacaacgccaaggagaucggcaacggcugcuucgaguucuaccacaagugcgacaacaccugcauggaguccgucaagaacggcaccuacgacuaccccaaguacuccgaggaggccaagcucaaccgcgaggagaucgacggcgucaagcucgaguccacccgcaucuaccagauccucgccaucuacuccaccgucgccuccucccucguccucgucgucucccucggcgccaucuccuucuggaugugcuccaacggcucccuccagugccgcaucugcaucuga

SEQ ID NO: 107176 - RNA, 1701 nt, Artificial Sequence
  derived and/or modified CDS sequence (opt2) from hemagglutinin__InfluenzaA__AHL80861
augaaggccauccucgucguccuccucuacaccuucgccaccgccaacgccgacacccucugcaucggcuaccacgccaacaacuccaccgacaccgucgacaccguccucgagaagaacgucaccgucacccacuccgucaaccuccucgaggacaagcacaacggcaagcucugcaagcuccgcggcgucgccccccuccaccucggcaagugcaacaucgccggcuggauccucggcaaccccgagugcgagucccucuccaccgccuccuccugguccuacaucgucgagaccuccuccuccgacaacggcaccugcuaccccggcgacuucaucgacuacgaggagcuccgcgagcagcucuccuccgucuccuccuucgagcgcuucgagaucuuccccaagaccuccuccuggcccaaccacgacuccaacaagggcgucaccgccgccugcccccacgccggcgccaaguccuucuacaagaaccucaucuggcucgucaagaagggcaacuccuaccccaagcucuccaaguccuacaucaacgacaagggcaaggagguccucguccucuggggcauccaccaccccuccaccuccgccgaccagcagucccucuaccagaacgccgacgccuacgucuucgucggcaccucccgcuacuccaagaaguucaagcccgagaucgccauccgccccaagguccgcgaccaggagggccgcaugaacuacuacuggacccucgucgagcccggcgacaagaucaccuucgaggccaccggcaaccucgucgucccccgcuacgccuucgccauggagcgcaacgccggcuccggcaucaucaucuccgacacccccguccacgacugcaacaccaccugccagacccccaagggcgccaucaacaccucccuccccuuccagaacauccaccccaucaccaucggcaagugccccaaguacgucaaguccaccaagcuccgccucgccaccggccuccgcaacguccccuccauccagucccgcggccucuucggcgccaucgccggcuucaucgagggcggcuggaccggcauggucgacggcugguacggcuaccaccaccagaacgagcagggcuccggcuacgccgccgaccucaaguccacccagaacgccaucgacaagaucaccaacaaggucaacuccgucaucgagaagaugaacacccaguucaccgccgucggcaaggaguucaaccaccucgagaagcgcaucggcaaccucaacaagaaggucgacgacggcuuccucgacaucuggaccuacaacgccgagcuccucguccuccucgagaacgagcgcacccucgacuaccacgacuccaacgucaagaaccucuacgagaagguccgcucccagcucaagaacaacgccaaggagaucggcaacggcugcuucgaguucuaccacaagugcgacaacaccugcauggaguccgucaagaacggcaccuacgacuaccccaaguacuccgaggaggccaagcucaaccgcgaggagaucgacggcgucaagcucgaguccacccgcaucuaccagauccucgccaucuacuccaccgucgccuccucccucguccucgucgucucccucggcgccaucuccuucuggaugugcuccaacggcucccuccagugccgcaucugcaucuga

SEQ ID NO: 107177 - RNA, 1701 nt, Artificial Sequence
  derived and/or modified CDS sequence (opt2) from hemagglutinin__InfluenzaA__AHL80872
augaaggccauccucgucguccuccucuacaccuucgccaccgccaacgccgacacccucugcaucggcuaccacgccaacaacuccaccgacaccgucgacaccguccucgagaagaacgucaccgucacccacuccgucaaccuccucgaggacaagcacaacggcaagcucugcaagcuccgcggcgucgccccccuccaccucggcaagugcaacaucgccggcuggauccucggcaaccccgagugcgagucccucuccaccgccuccuccugguccuacaucgucgagaccuccuccuccgacaacggcaccugcuaccccggcgacuucaucgacuacgaggagcuccgcgagcagcucuccuccgucuccuccuucgagcgcuucgagaucuuccccaagaccuccuccuggcccaaccacgacuccaacaagggcgucaccgccgccugcccccacgccggcgccaaguccuucuacaagaaccucaucuggcucgucaagaagggcaacuccuaccccaagcucuccaaguccuacaucaacgacaagggcaaggagguccucguccucuggggcauccaccaccccuccaccaacgccgaccagcagucccucuaccagaacgccgacgccuacgucuucgucggcaccucccgcuacuccaagaaguucaagcccgagaucgccauccgccccaagguccgcgaccaggagggccgcaugaacuacuacuggacccucgucgagcccggcgacaagaucaccuucgaggccaccggcaaccucgucgucccccgcuacgccuucgccauggagcgcaacgccggcuccggcaucaucaucuccgacacccccguccacgacugcaacaccaccugccagacccccaagggcgccaucaacaccucccuccccuuccagaacauccaccccaucaccaucggcaagugccccaaguacgucaaguccaccaagcuccgccucgccaccggccuccgcaacguccccuccauccagucccgcggccucuucggcgccaucgccggcuucaucgagggcggcuggaccggcauggucgacggcugguacggcuaccaccaccagaacgagcagggcuccggcuacgccgccgaccucaaguccacccagaacgccaucgacaagaucaccaacaaggucaacuccgucaucgagaagaugaacacccaguucaccgccgucggcaaggaguucaaccaccucgagaagcgcaucgagaaccucaacaagaaggucgacgacggcuuccucgacaucuggaccuacaacgccgagcuccucguccuccucgagaacgagcgcacccucgacuaccacgacuccaacgucaagaaccucuacgagaagguccgcucccagcucaagaacaacgccaaggagaucggcaacggcugcuucgaguucuaccacaagugcgacaacaccugcauggaguccgucaagaacggcaccuacgacuaccccaaguacuccgaggaggccaagcucaaccgcgaggagaucgacggcgucaagcucgaguccacccgcaucuaccagauccucgccaucuacuccaccgucgccuccucccucguccucgucgucucccucggcgccaucuccuucuggaugugcuccaacggcucccuccagugccgcaucugcaucuga

SEQ ID NO: 107178 - RNA, 1701 nt, Artificial Sequence; identical to SEQ ID NO: 99869
  derived and/or modified CDS sequence (opt2) from hemagglutinin__InfluenzaA__AHL80883

SEQ ID NO: 107179 - RNA, 1701 nt, Artificial Sequence; identical to SEQ ID NO: 99869
  derived and/or modified CDS sequence (opt2) from hemagglutinin__InfluenzaA__AHL80894

SEQ ID NO: 107180 - RNA, 1701 nt, Artificial Sequence; identical to SEQ ID NO: 99869
  derived and/or modified CDS sequence (opt2) from hemagglutinin__InfluenzaA__AHL80905

SEQ ID NO: 107181 - RNA, 1701 nt, Artificial Sequence; identical to SEQ ID NO: 102490
  derived and/or modified CDS sequence (opt2) from hemagglutinin__InfluenzaA__AHL80916

SEQ ID NO: 107182 - RNA, 1701 nt, Artificial Sequence; identical to SEQ ID NO: 102891
  derived and/or modified CDS sequence (opt2) from hemagglutinin__InfluenzaA__AHL80927

SEQ ID NO: 107183 - RNA, 1701 nt, Artificial Sequence; identical to SEQ ID NO: 102891
  derived and/or modified CDS sequence (opt2) from hemagglutinin__InfluenzaA__AHL80946

SEQ ID NO: 107184 - RNA, 1701 nt, Artificial Sequence
  derived and/or modified CDS sequence (opt2) from hemagglutinin__InfluenzaA__AHL80958
augaaggccauccucgucguccuccucuacaccuucgccaccgccaacgccgacacccucugcaucggcuaccacgccaacaacuccaccgacaccgucgacaccguccucgagaagaacgucaccgucacccacuccgucaaccuccucgaggacaagcacaacggcaagcucugcaagcuccgcggcgucgccccccuccaccucggcaagugcaacaucgccggcuggauccucggcaaccccgagugcgagucccucuccaccgccuccuccugguccuacaucgucgagaccuccuccuccgacaacggcaccugcuaccccggcgacuucaucaacuacgaggagcuccgcgagcagcucuccuccgucuccuccuucgagcgcuucgagaucuuccccaagaucuccuccuggcccaaccacgacuccaacaagggcgucaccgccgccugcccccacgccggcgccaaguccuucuacaagaaccucaucuggcucgucaagaagggcaacuccuaccccaagcucuccaaguccuacaucaacgacaagggcaaggagguccucguccucuggggcauccaccaccccuccaccaccgccgaccagcagucccucuaccagaacgccgacgccuacgucuucgucggcaccucccgcuacuccaagaaguucaagcccgagaucgccauccgccccaagguccgcgaccaggagggccgcaugaacuacuacuggacccucgucgagcccggcgacaagaucaccuucgaggccaccggcaaccucgucgucccccgcuacgccuucgccauggagcgcaacgccggcuccggcaucaucaucuccgacaccuccguccacgacugcaacaccaccugccagacccccaagggcgccaucaacaccucccuccccuuccagaacauccaccccaucaccaucggcaagugccccaaguacgucaaguccaccaagcuccgccucgccaccggccuccgcaacguccccuccauccagucccgcggccucuucggcgccaucgccggcuucaucgagggcggcuggaccggcauggucgacggcugguacggcuaccaccaccagaacgagcagggcuccggcuacgccgccgaccucaaguccacccagaacgccaucgacaagaucaccaacaaggucaacuccgucaucgagaagaugaacacccaguucaccgccgucggcaaggaguucaaccaccucgagaagcgcaucgagaaccucaacaagaaggucgacgacggcuuccucgacaucuggaccuacaacgccgagcuccucguccuccucgagaacgagcgcacccucgacuaccacgacuccaacgucaagaaccucuacgagaagguccgcaaccagcucaagaacaacgccaaggagaucggcaacggcugcuucgaguucuaccacaagugcgacaacaccugcauggaguccgucaagaacggcaccuacgacuaccccaaguacuccgaggaggccaagcucaaccgcgaggagaucgacggcgucaagcucgaguccacccgcaucuaccagauccucgccaucuacuccaccgucgccuccucccucguccucgucgucucccucggcgccaucuccuucuggaugugcuccaacggcucccuccagugccgcaucugcaucuga

SEQ ID NO: 107185 - RNA, 1701 nt, Artificial Sequence
  derived and/or modified CDS sequence (opt2) from hemagglutinin__InfluenzaA__AHL81001
augaagaccaucaucgcccucuccuacauccucugccucaucuucgcccagaagcuccccggcaacgacaacuccaccgccacccucugccucggccaccacgccguccccaacggcaccaucgucaagaccaucaccaacgaccagaucgaggucaccaacgccaccgagcucguccaguccuccuccaccggcgagaucugcaacuccccccaccagauccucgacggcgagaacugcacccucaucgacgcccuccucggcgacccccagugcgacggcuuccagaacaagaagugggaccucuucgucgagcgcuccaaggcccacuccaacugcuaccccuacgacguccccgacuacgccucccuccgcucccucgucgccuccuccggcacccucgaguucaacaacgaguccuucaacuggaccggcgucacccagaacggcaccuccuccgccugcauccgccgcuccaacaacuccuucuucucccgccucaacuggcucacccaccucaacuucaaguaccccgcccucaacgucaccaugcccaacaacgagcaguucgacaagcucuacaucuggggcguccaccaccccggcaccgacaaggaccagaucuuccucuacgcccaggccgccggccgcaucaccgucuccaccaagcgcucccagcaggccgucauccccaacaucggcucccgcccccgcguccgcaacauccccucccgcgucuccaucuacuggaccaucgucaagcccggcgacauccuccucaucaacuccaccggcaaccucaucgccccccgcggcuacuucaagauccgcuccggcaaguccuccaucaugcgcuccgacgcccccaucggcaagugcaacuccgccugcaucacccccaacggcuccauccccaacgacaagcccuuccagaacgucaaccgcaucaccuacggcgccugcccccgcuacgucaagcagaacacccucaagcucgccaccggcaugcgcaacguccccgagaagcagacccgcggcaucuucggcgccaucgccggcuucaucgagaacggcugggagggcauggucgacggcugguacggcuuccgccaccagaacuccgagggccgcggccaggccgccgaccucaaguccacccaggccgccaucgaccagaucaacggcaagcucaaccgccucaucggcaagaccaacgagaaguuccaccagaucgagaaggaguucuccgaggucgagggccgcauccaggaccucgagaaguacgucgaggacaccaagaucgaccucugguccuacaacgccgagcuccucgucgcccucgagaaccagcacaccaucgaccucaccgacuccgagaugaacaagcucuucgagaagaccaagaagcagcuccgcgagaacgccgaggacaugggcaacggcugcuucaagaucuaccacaagugcgacaacgccugcaucggcuccauccgcaacggcaccuacgaccacgacgucuaccgcgacgaggcccucaacaaccgcuuccagaucaagggcgucgagcucaaguccggcuacaaggacuggauccucuggaucuccuucgccaucuccugcuuccuccucugcgucgcccuccucggcuucaucaugugggccugccagaagggcaacauccgcugcaacaucugcaucuga

SEQ ID NO: 107186 - RNA, 1701 nt, Artificial Sequence; identical to SEQ ID NO: 102891
  derived and/or modified CDS sequence (opt2) from hemagglutinin__InfluenzaA__AHL81013

SEQ ID NO: 107187 - RNA, 1701 nt, Artificial Sequence; identical to SEQ ID NO: 102891
  derived and/or modified CDS sequence (opt2) from hemagglutinin__InfluenzaA__AHL81025

SEQ ID NO: 107188 - RNA, 1701 nt, Artificial Sequence; identical to SEQ ID NO: 102891
  derived and/or modified CDS sequence (opt2) from hemagglutinin__InfluenzaA__AHL81037

SEQ ID NO: 107189 - RNA, 1701 nt, Artificial Sequence; identical to SEQ ID NO: 102891
  derived and/or modified CDS sequence (opt2) from hemagglutinin__InfluenzaA__AHL81049

SEQ ID NO: 107190 - RNA, 1701 nt, Artificial Sequence; identical to SEQ ID NO: 107184
  derived and/or modified CDS sequence (opt2) from hemagglutinin__InfluenzaA__AHL81061

SEQ ID NO: 107191 - RNA, 1701 nt, Artificial Sequence; identical to SEQ ID NO: 107184
  derived and/or modified CDS sequence (opt2) from hemagglutinin__InfluenzaA__AHL81072

SEQ ID NO: 107192 - RNA, 1701 nt, Artificial Sequence; identical to SEQ ID NO: 104397
  derived and/or modified CDS sequence (opt2) from hemagglutinin__InfluenzaA__AHL81083

SEQ ID NO: 107193 - RNA, 1701 nt, Artificial Sequence; identical to SEQ ID NO: 102891
  derived and/or modified CDS sequence (opt2) from hemagglutinin__InfluenzaA__AHL81095

SEQ ID NO: 107194 - RNA, 1701 nt, Artificial Sequence
  derived and/or modified CDS sequence (opt2) from hemagglutinin__InfluenzaA__AHL81118
augaaggccauccucgucguccuccucuacaccuucgccaccgccaacgccgacacccucugcaucggcuaccacgccaacaacuccaccgacaccgucgacaccguccucgagaagaacgucaccgucacccacuccgucaaccuccucgaggacaagcacaacggcaagcucugcaagcuccgcggcgucgccccccuccaccucggcaagugcaacaucgccggcuggauccucggcaaccccgagugcgagucccucuccaccgccuccuccugguccuacaucgucgagaccuccuccuccgacaacggcaccugcuaccccggcgacuucaucaacuacgaggagcuccgcgagcagcucuccuccgucuccuccuucgagcgcuucgagaucuuccccaagaccaacuccuggcccaaccacgacuccaacaagggcgucaccgccgccugcccccacgccggcgccaaguccuucuacaagaaccucaucuggcucgucaagaagggcaacuccuaccccaagcucuccaaguccuacaucaacgacaagggcaaggagguccucguccucuggggcauccaccaccccuccaccaccgccgaccagcagucccucuaccagaacgccgacgccuacgucuucgucggcaccucccgcuacuccaagaaguucaagcccgagaucgccauccgccccaagguccgcgaccaggagggccgcaugaacuacuacuggacccucgucgagcccggcgacaagaucaccuucgaggccaccggcaaccucgucgucccccgcuacgccuucgccauggagcgcaacgccggcuccggcaucaucaucuccgacacccccguccacgacugcaacaccaccugccagacccccaagggcgccaucaacaccucccuccccuuccagaacauccaccccaucaccaucggcaagugccccaaguacgucaaguccaccaagcuccgccucgccaccggccuccgcaacguccccuccauccagucccgcggccucuucggcgccaucgccggcuucaucgagggcggcuggaccggcauggucgacggcugguacggcuaccaccaccagaacgagcagggcuccggcuacgccgccgaccucaaguccacccagaacgccaucgacaagaucaccaacaaggucaacuccgucaucgagaagaugaacacccaguucaccgccgucggcaaggaguucaaccaccucgagaagcgcaucgagaaccucaacaagaaggucgacgacggcuuccucgacaucuggaccuacaacgccgagcuccucguccuccucgagaacgagcgcacccucgacuaccacgacuccaacgucaagaaccucuacgagaagguccgcaaccagcucaagaacaacgccaaggagaucggcaacggcugcuucgaguucuaccacaagugcgacaacaccugcauggaguccgucaagaacggcaccuacgacuaccccaaguacuccgaggaggccaagcucaaccgcgaggagaucgacggcgucaagcucgaguccacccgcaucuaccagauccucgccaucuacuccaccgucgccuccucccucguccucgucgucucccucggcgccaucuccuucuggaugugcuccaacggcucccuccagugccgcaucugcaucuga

SEQ ID NO: 107195 - RNA, 1701 nt, Artificial Sequence; identical to SEQ ID NO: 102891
  derived and/or modified CDS sequence (opt2) from hemagglutinin__InfluenzaA__AHL81129

SEQ ID NO: 107196 - RNA, 1701 nt, Artificial Sequence; identical to SEQ ID NO: 102891
  derived and/or modified CDS sequence (opt2) from hemagglutinin__InfluenzaA__AHL81141

SEQ ID NO: 107197 - RNA, 1701 nt, Artificial Sequence; identical to SEQ ID NO: 102891
  derived and/or modified CDS sequence (opt2) from hemagglutinin__InfluenzaA__AHL81153

SEQ ID NO: 107198 - RNA, 1701 nt, Artificial Sequence
  derived and/or modified CDS sequence (opt2) from hemagglutinin__InfluenzaA__AHL81165
augaagaccaucaucgcccucuccuacauccucugccucgucuucgcccagaagcuccccggcaacgacaacuccaccgccacccucugccucggccaccacgccguccccaacggcaccaucgucaagaccaucaccaacgaccagaucgaggucaccaacgccaccgagcucguccaguccuccuccgccggcgagaucugcgacuccccccaccagauccucgacggcgagaacugcacccucaucgacgcccuccucggcgacccccagugcgacggcuuccagaacaagaagugggaccucuucgucgagcgcucccgcgccuacuccaacugcuaccccuacgacguccccgacuacgccucccuccgcucccucgucgccuccuccggcacccucgaguucaacaacgaguccuucaacuggaccggcgucacccagaacggcaccuccuccgccugcauccgccgcuccaacaacuccuucuucucccgccucaacuggcucacccaccucaacuucaaguaccccgcccucaacgucaccaugcccaacaacgagcaguucgacaagcucuacaucuggggcguccaccaccccggcaccgacaaggaccagaucuuccucuacgcccaggccuccggccgcaucaccgucuccaccaagcgcucccagcaggccgucauccccaacaucggcucccgcccccgcguccgcaacauccccucccgcaucuccaucuacuggaccaucgucaagcccggcgacauccuccucaucaacuccaccggcaaccucaucgccccccgcggcuacuucaagauccgcuccggcaaguccuccaucaugcgcuccgacgcccccaucggcaagugcaacuccgagugcaucacccccaacggcuccauccccaacgacaagcccuuccagaacgucaaccgcaucaccuacggcgccugcccccgcuacgucaagcaguccacccucaagcucgccaccggcaugcgcaacguccccgagaagcagacccgcggcaucuucggcgccaucgccggcuucaucgagaacggcugggagggcaugauggacggcugguacggcuuccgccaccagaacuccgagggccgcggccaggccgccgaccucaaguccacccaggccgccaucgaccagaucaacggcaagcucaaccgccucaucggcaagaccaacgagaaguuccaccagaucgagaaggaguucuccgaggucgagggccgcauccaggaccucgagaaguacgucgaggacaccaagaucgaccucugguccuacaacgccgagcuccucgucgcccucgagaaccagcacaccaucgaccucaccgacuccgagaugaacaagcucuucgagaagaccaagaagcagcuccgcgagaacgccgaggacaugggcaacggcugcuucaagaucuaccacaagugcgacaacgccugcaucggcuccauccgcaacggcaccuacgaccacgacgucuaccgcgacgaggcccucaacaaccgcuuccagaucaagggcgucgagcucaaguccggcuacaaggacuggauccucuggaucuccuucgccaucuccugcuuccuccucugcgucgcccuccucggcuucaucaugugggccugccagaagggcaacauccgcugcaacaucugcaucuga

SEQ ID NO: 107199 - RNA, 1701 nt, Artificial Sequence; identical to SEQ ID NO: 107198
  derived and/or modified CDS sequence (opt2) from hemagglutinin__InfluenzaA__AHL81177

SEQ ID NO: 107200 - RNA, 1701 nt, Artificial Sequence; identical to SEQ ID NO: 107185
  derived and/or modified CDS sequence (opt2) from hemagglutinin__InfluenzaA__AHL81189

SEQ ID NO: 107201 - RNA, 1701 nt, Artificial Sequence
  derived and/or modified CDS sequence (opt2) from hemagglutinin__InfluenzaA__AHL81212
augaagaccaucaucgcccucuccuacauccucugccucgucuucgcccagaagcuccccggcaacgacaacuccaccgccacccucugccucggccaccacgccguccccaacggcaccaucgucaagaccaucaccaacgaccagaucgaggucaccaacgccaccgagcucguccaguccuccuccaccggcgagaucugcaacuccccccaccagauccucgacggcgagaacugcacccucaucgacgcccuccucggcgacccccagugcgacggcuuccagaacaagaagugggaccucuucgucgagcgcuccaaggcccacuccaacugcuaccccuacgacguccccgacuacgccucccuccgcucccucgucgccuccuccggcacccucgaguucaagaacgaguccuucaacuggaccggcgucacccagaacggcaccuccuccgccugcauccgccgcuccaacaacuccuucuucucccgccucaacuggcucacccaccucaacuucaaguaccccgcccucaacgucaccaugcccaacaacgagcaguucgacaagcucuacaucuggggcguccaccaccccggcaccgacaaggaccagaucuuccucuacgcccaggccgccggccgcaucaccgucuccaccaagcgcucccagcaggccgucauccccaacaucggcucccgcccccgcguccgcaacauccccucccgcgucuccaucuacuggaccaucgucaagcccggcgacauccuccucaucaacuccaccggcaaccucaucgccccccgcggcuacuucaagauccgcuccggcaaguccuccaucaugcgcuccgacgcccccaucggcaagugcaacuccgccugcaucacccccaacggcuccauccccaacgacaagcccuuccagaacgucaaccgcaucaccuacggcgccugcccccgcuacgucaagcagaacacccucaagcucgccaccggcaugcgcaacguccccgagaagcagacccgcggcaucuucggcgccaucgccggcuucaucgagaacggcugggagggcauggucgacggcugguacggcuuccgccaccagaacuccgagggccgcggccaggccgccgaccucaaguccacccaggccgccaucgaccagaucaacggcaagcucaaccgccucaucggcaagaccaacgagaaguuccaccagaucgagaaggaguucuccgaggucgagggccgcauccaggaccucgagaaguacgucgaggacaccaagaucgaccucugguccuacaacgccgagcuccucgucgcccucgagaaccagcacaccaucgaccucaccgacuccgagaugaacaagcucuucgagaagaccaagaagcagcuccgcgagaacgccgaggacaugggcaacggcugcuucaagaucuaccacaagugcgacaacgccugcaucggcuccauccgcaacggcaccuacgaccacgacgucuaccgcgacgaggcccucaacaaccgcuuccagaucaagggcgucgagcucaaguccggcuacaaggacuggauccucuggaucuccuucgccaucuccugcuuccuccucugcgucgcccuccucggcuucaucaugugggccugccagaagggcaacauccgcugcaacaucugcaucuga

SEQ ID NO: 107202 - RNA, 1701 nt, Artificial Sequence
  derived and/or modified CDS sequence (opt2) from hemagglutinin__InfluenzaA__AHL81224
augaaggccauccucgucguccuccucuacaccuucgccaccgccaacgccgacacccucugcaucggcuaccacgccaacaacuccaccgacaccgucgacaccguccucgagaagaacgucaccgucacccacuccgucaaccuccucgaggacaagcacaacggcaagcucugcaagcuccgcggcgucgccccccuccaccucggcaagugcaacaucgccggcuggauccucggcaaccccgagugcgagucccucuccaccgccuccuccugguccuacaucgucgagaccuccuccuccgacaacggcaccugcuaccccggcgacuucaucgacuacgaggagcuccgcgagcagcucuccuccgucuccuccuucgagcgcuucgagaucuuccccaagaccuccuccuggcccaaccacgacuccaacaagggcgucaccgccgccugcccccacgccggcgccaagggcuucuacaagaaccucaucuggcucgucaagaagggcaacuccuaccccaagcucuccaaguccuacaucaacgacaagggcaaggagguccucguccucuggggcauccaccaccccuccaccaccgccgaccagcagucccucuaccagaacgccgacaccuacgucuucgucggcaccucccgcuacuccaagaaguucaagcccgagaucgccauccgccccaagguccgcgaccaggagggccgcaugaacuacuacuggacccucgucgagcccggcgacaagaucaccuucgaggccaccggcaaccucgucgucccccgcuacgccuucgccauggagcgcaccgccggcuccggcaucaucaucuccgacacccccguccacgacugcaacaccaccugccagacccccaagggcgccaucaacaccucccuccccuuccagaacauccaccccaucaccaucggcaagugccccaaguacgucaaguccaccaagcuccgccucgccaccggccuccgcaacguccccuccauccagucccgcggccucuucggcgccaucgccggcuucaucgagggcggcuggaccggcauggucgacggcugguacggcuaccaccaccagaacgagcagggcuccggcuacgccgccgaccucaaguccacccagaacgccaucgacaagaucaccaacaaggucaacuccgucaucgagaagaugaacacccaguucaccgccgucggcaaggaguucaaccaccucgagaagcgcaucgagaaccucaacaagaaggucgacgacggcuuccucgacaucuggaccuacaacgccgagcuccucguccuccucgagaacgagcgcacccucgacuaccacgacuccaacgucaagaaccucuacgagaagguccgcaaccagcucaagaacaacgccaaggagaucggcaacggcugcuucgaguucuaccacaagugcgacaacaccugcauggaguccgucaagaacggcaccuacgacuaccccaaguacuccgaggaggccaagcucaaccgcgaggagaucgacggcgucaagcucgaguccacccgcaucuaccagauccucgccaucuacuccaccgucgccuccucccucguccucgucgucucccucggcgccaucuccuucuggaugugcuccaacggcucccuccagugccgcaucugcaucuga

SEQ ID NO: 107203 - RNA, 1701 nt, Artificial Sequence; identical to SEQ ID NO: 102891
  derived and/or modified CDS sequence (opt2) from hemagglutinin__InfluenzaA__AHL81235

SEQ ID NO: 107204 - RNA, 1701 nt, Artificial Sequence; identical to SEQ ID NO: 102891
  derived and/or modified CDS sequence (opt2) from hemagglutinin__InfluenzaA__AHL81247

SEQ ID NO: 107205 - RNA, 1701 nt, Artificial Sequence; identical to SEQ ID NO: 102891
  derived and/or modified CDS sequence (opt2) from hemagglutinin__InfluenzaA__AHL81259

SEQ ID NO: 107206 - RNA, 1701 nt, Artificial Sequence; identical to SEQ ID NO: 102891
  derived and/or modified CDS sequence (opt2) from hemagglutinin__InfluenzaA__AHL81271

SEQ ID NO: 107207 - RNA, 1701 nt, Artificial Sequence; identical to SEQ ID NO: 102891
  derived and/or modified CDS sequence (opt2) from hemagglutinin__InfluenzaA__AHL81283

SEQ ID NO: 107208 - RNA, 1701 nt, Artificial Sequence; identical to SEQ ID NO: 102891
  derived and/or modified CDS sequence (opt2) from hemagglutinin__InfluenzaA__AHL81295

SEQ ID NO: 107209 - RNA, 1701 nt, Artificial Sequence; identical to SEQ ID NO: 107184
  derived and/or modified CDS sequence (opt2) from hemagglutinin__InfluenzaA__AHL81307

SEQ ID NO: 107210 - RNA, 1701 nt, Artificial Sequence; identical to SEQ ID NO: 102903
  derived and/or modified CDS sequence (opt2) from hemagglutinin__InfluenzaA__AHL81329

SEQ ID NO: 107211 - RNA, 1701 nt, Artificial Sequence
  derived and/or modified CDS sequence (opt2) from hemagglutinin__InfluenzaA__AHL81340
augaagaccaucaucgcccucuccuacauccucugccucgucuucgcccagaagcuccccggcaacgacaacuccaccgccacccucugccucggccaccacgccguccccaacggcaccaucgucaagaccaucaccaacgaccagaucgaggucaccaacgccaccgagcucguccaguccuccuccaccggcgagaucugcgacuccccccaccagauccucgacggcaagaacugcacccucaucgacgcccuccucggcgacccccagugcgacggcuuccagaacaagaagugggaccucuucgucgagcgcuccaaggccuacuccaacugcuaccccuacgacguccccgacuacgccucccuccgcucccucgucgccuccuccggcacccucgaguucaacaacgaguccuucaacuggaccggcgucacccaggacggcaccuccuccgccugcauccgcggcuccaagaacuccuucuucucccgccucaacuggcucacccaccucaacuucaaguaccccgcccucaacgucaccaugcccaacaacgagcaguucgacaagcucuacaucuggggcguccaccaccccggcaccgacaaggaccagaucuuccucuacgcccaggccuccggccgcaucaccgucuccaccaagcgcucccagcaggccgccauccccaacaucggcucccgcccccgcguccgcaacauccccucccgcaucuccaucuacuggaccaucgucaagcccggcgacauccuccucaucaacuccaccggcaaccucaucgccccccgcggcuacuucaagauccgcuccggcaaguccuccaucaugcgcuccgacgcccccaucggcaagugcaacuccgagugcaucacccccaacggcuccauccccaacgacaagcccuuccagaacgucaaccgcaucaccuacggcgccugcccccgcuacgucaagcagaacacccucaagcucgccaccggcaugcgcaacguccccgagaagcagacccgcggcaucuucggcgccaucgccggcuucaucgagaacggcugggagggcauggucgacggcugguacggcuuccgccaccagaacuccgagggccgcggccaggccgccgaccucaaguccacccaggccgccaucgaccagaucaacggcaagcucaaccgccucaucggcaagaccaacgagaaguuccaccagaucgagaaggaguucuccgaggucgagggccgcauccaggaccucgagaaguacgucgaggacaccaagaucgaccucugguccuacaacgccgagcuccucgucgcccucgagaaccagcacaccaucgaccucaccgacuccgagaugaacaagcucuucgagaagaccaagaagcagcuccgcgagaacgccgaggacaugggcaacggcugcuucaagaucuaccacaagugcgacaacgccugcaucggcuccauccgcaacggcaccuacaaccacgacgucuaccgcgacgaggcccucaacaagcgcuuccagaucaagggcaucgagcucaaguccggcuacaaggacuggauccucuggaucuccuucgccaucuccugcuuccuccucugcgucgcccuccucggcuucaucaugugggccugccagaagggcaacauccgcugcaacaucugcaucuga

SEQ ID NO: 107212 - RNA, 1701 nt, Artificial Sequence; identical to SEQ ID NO: 102891
  derived and/or modified CDS sequence (opt2) from hemagglutinin__InfluenzaA__AHL81352

SEQ ID NO: 107213 - RNA, 1701 nt, Artificial Sequence
  derived and/or modified CDS sequence (opt2) from hemagglutinin__InfluenzaA__AHL81364
augaaggccauccucgucguccuccucuacaccuucgccaccgccaacgccgacacccucugcaucggcuaccacgccaacaacuccaccgacaccgucgacaccguccucgagaagaacgucaccgucacccacuccgucaaccuccucgaggacaagcacaacggcaagcucugcaagcuccgcggcgucgccccccuccaccucggcaagugcaacaucgccggcuggauccucggcaaccccgagugcgagucccucuccaccgccuccuccugguccuacaucgucgagaccuccuccuccgacaacggcgccugcuaccccggcgacuucaucaacuacgaggagcuccgcgagcagcucuccuccgucuccuccuucgagcgcuucgagaucuuccccaagaccaacuccuggcccaaccacgacuccaacaagggcgucaccgccgccugcccccacgccggcgccaaguccuucuacaagaaccucaucuggcucgucaagaagggcaacuccuaccccaagcucuccaaguccuacaucaacgacaagggcaaggagguccucguccucuggggcauccaccaccccuccaccaccgccgaccagcagucccucuaccagaacgccgacgccuacgucuucgucggcaccucccgcuacuccaagaaguucaagcccgagaucgccauccgccccaagguccgcgaccaggagggccgcaugaacuacuacuggacccucgucgagcccggcgacaagaucaccuucgaggccaccggcaaccucgucgucccccgcuacgccuucgccauggagcgcaacgccggcuccggcaucaucaucuccgacacccccguccacgacugcaacaccaccugccagacccccaagggcgccaucaacaccucccuccccuuccagaacauccaccccaucaccaucggcaagugccccaaguacgucaaguccaccaagcuccgccucgccaccggccuccgcaacguccccuccauccagucccgcggccucuucggcgccaucgccggcuucaucgagggcggcuggaccggcauggucgacggcugguacggcuaccaccaccagaacgagcagggcuccggcuacgccgccgaccucaaguccacccagaacgccaucgacaagaucaccaacaaggucaacuccgucaucgagaagaugaacacccaguucaccgccgucggcaaggaguucaaccaccucgagaagcgcaucgagaaccucaacaagaaggucgacgacggcuuccucgacaucuggaccuacaacgccgagcuccucguccuccucgagaacgagcgcacccucgacuaccacgacuccaacgucaagaaccucuacgagaagguccgcaaccagcucaagaacaacgccaaggagaucggcaacggcugcuucgaguucuaccacaagugcgacaacaccugcauggaguccgucaagaacggcaccuacgacuaccccaaguacuccgaggaggccaagcucaaccgcgaggagaucgacggcgucaagcucgaguccacccgcaucuaccagauccucgccaucuacuccaccgucgccuccucccucguccucgucgucucccucggcgccaucuccuucuggaugugcuccaacggcucccuccagugccgcaucugcaucuga

SEQ ID NO: 107214 - RNA, 1701 nt, Artificial Sequence
  derived and/or modified CDS sequence (opt2) from hemagglutinin__InfluenzaA__AHL81386
augaaggccauccucgucguccuccucuacaccuucgccaccgccaacgccgacacccucugcaucggcuaccacgccaacaacuccaccgacaccgucgacaccguccucgagaagaacgucaccgucacccacuccgucaaccuccucgaggacaagcacaacggcaagcucugcaagcuccgcggcgucgccccccuccaccucggcaagugcaacaucgccggcuggauccucggcaaccccgagugcgagucccucuccaccgccuccuccugguccuacaucgucgagaccuccuccuccgacaacggcaccugcuaccccggcgacuucaucaacuacgaggagcuccgcgagcagcucuccuccgucuccuccuucgagcgcuucgagaucuuccccaagaccaacuccuggcccaaccacgacuccaacaagggcgucaccgccgccugcccccacgccggcgucaaguccuucuacaagaaccucaucuggcucgucaagaagggcaacuccuaccccaagcucuccaaguccuacaucaacgacaagggcaaggagguccucguccucuggggcauccaccaccccuccaccaccgccgaccagcagucccucuaccagaacgccgacgccuacgucuucgucggcaccucccgcuacuccaagaaguucaagcccgagaucgccauccgccccaagguccgcgaccaggagggccgcaugaacuacuacuggacccucgucgagcccggcgacaagaucaccuucgaggccaccggcaaccucgucgucccccgcuacgccuucgccauggagcgcaacgccggcuccggcaucaucaucuccgacacccccguccacgacugcaacaccaccugccagacccccaagggcgccaucaacaccucccuccccuuccagaacauccaccccaucaccaucggcaagugccccaaguacgucaaguccaccaagcuccgccucgccaccggccuccgcaacguccccuccauccagucccgcggccucuucggcgccaucgccggcuucaucgagggcggcuggaccggcauggucgacggcugguacggcuaccaccaccagaacgagcagggcuccggcuacgccgccgaccucaaguccacccagaacgccaucgacaagaucaccaacaaggucaacuccgucaucgagaagaugaacacccaguucaccgccgucggcaaggaguucaaccaccucgagaagcgcaucgagaaccucaacaagaaggucgacgacggcuuccucgacaucuggaccuacaacgccgagcuccucguccuccucgagaacgagcgcacccucgacuaccacgacuccaacgucaagaaccucuacgagaagguccgcaaccagcucaagaacaacgccaaggagaucggcaacggcugcuucgaguucuaccacaagugcgacaacaccugcauggaguccgucaagaacggcaccuacgacuaccccaaguacuccgaggaggccaagcucaaccgcgaggagaucgacggcgucaagcucgaguccacccgcaucuaccagauccucgccaucuacuccaccgucgccuccucccucguccucgucgucucccucggcgccaucuccuucuggaugugcuccaacggcucccuccagugccgcaucugcaucuga

SEQ ID NO: 107215 - RNA, 1701 nt, Artificial Sequence; identical to SEQ ID NO: 102891
  derived and/or modified CDS sequence (opt2) from hemagglutinin__InfluenzaA__AHL81397

SEQ ID NO: 107216 - RNA, 1701 nt, Artificial Sequence; identical to SEQ ID NO: 107201
  derived and/or modified CDS sequence (opt2) from hemagglutinin__InfluenzaA__AHL81409

SEQ ID NO: 107217 - RNA, 1701 nt, Artificial Sequence; identical to SEQ ID NO: 107171
  derived and/or modified CDS sequence (opt2) from hemagglutinin__InfluenzaA__AHL81419

SEQ ID NO: 107218 - RNA, 1701 nt, Artificial Sequence; identical to SEQ ID NO: 99869
  derived and/or modified CDS sequence (opt2) from hemagglutinin__InfluenzaA__AHL81430

SEQ ID NO: 107219 - RNA, 1701 nt, Artificial Sequence; identical to SEQ ID NO: 96666
  derived and/or modified CDS sequence (opt2) from hemagglutinin__InfluenzaA__AHL88951

SEQ ID NO: 107220 - RNA, 1701 nt, Artificial Sequence; identical to SEQ ID NO: 96666
  derived and/or modified CDS sequence (opt2) from hemagglutinin__InfluenzaA__AHL89030

SEQ ID NO: 107221 - RNA, 1701 nt, Artificial Sequence
  derived and/or modified CDS sequence (opt2) from hemagglutinin__InfluenzaA__AHL89042
augaagaccaucaucgcccucuccuacauccucugccucgucuucgcccagaagcuccccggcaacgacaacuccaccgccacccucugccucggccaccacgccguccccaacggcaccaucgucaagaccaucaccaacgaccagaucgaggucaccaacgccaccgagcucguccaguccuccuccaccggcgagaucugcgacuccccccaccagauccucgacggcgagaacugcacccucaucgacgcccuccucggcgacccccagugcgacggcuuccagaacaagaagugggaccucuucgucgagcgcuccaaggccuacuccaacugcuaccccuacgacguccccgacuacgccucccuccgcucccucgucgccuccuccggcacccucgaguucaacaacgagaacuucaacuggaccggcgucacccagaacggcaccuccuccgccugcaagcgccgcuccaacaacuccuucuucucccgccucaacuggcucacccaccucaaguucaaguaccccgcccucaacgucaccaugcccaacaacgagaaguucgacaagcucuacaucuggggcguccaccaccccggcaccgacaacgaccagaucuuccucuacgcccaggccuccggccgcaucaccgucuccaccaagcgcucccagcagaccgucauccccaacaucggcucccgcccccgcguccgcaacauccccucccgcaucuccaucuacuggaccaucgucaagcccggcgacauccuccucaucaacuccaccggcaaccucaucgccccccgcggcuacuucaagauccgcuccggcaaguccuccaucaugcgcuccgacgcccccaucggcaagugcaacuccgagugcaucacccccaacggcuccauccccaacgacaagcccuuccagaacgucaaccgcaucaccuacggcgccugcccccgcuacgucaagcagaacacccucaagcucgccaccggcaugcgcaacguccccgagaagcagacccgcggcaucuucggcgccaucgccggcuucaucgagaacggcugggagggcauggucgacggcugguacggcuuccgccaccagaacuccgagggcaucggccaggccgccgaccucaaguccacccaggccgccaucaaccagaucaacggcaagcucaaccgccucaucggcaagaccaacgagaaguuccaccagaucgagaaggaguucuccgaggucgagggccgcauccaggaccucgagaaguacgucgaggacaccaagaucgaccucugguccuacaacgccgagcuccucgucgcccucgagaaccagcacaccaucgaccucaccgacuccgagaugaacaagcucuucgagcgcaccaagaagcagcuccgcgagaacgccgaggacaugggcaacggcugcuucaagaucuaccacaagugcgacaacgccugcaucggcuccauccgcaacggcaccuacgaccacgacgucuaccgcgacgaggcccucaacaaccgcuuccagaucaagggcgucgagcucaaguccggcuacaaggacuggauccucuggaucuccuucgccaucuccugcuuccuccucugcgucgcccucgucggcuucaucaugugggccugccagaagggcaacauccgcugcaacaucugcaucuga

SEQ ID NO: 107222 - RNA, 1701 nt, Artificial Sequence
  derived and/or modified CDS sequence (opt2) from hemagglutinin__InfluenzaA__AHL89054
augaagaccaucaucgcccucuccuacauccucugccucgucuucgcccagaagcuccccggcaacgacaacuccaccgccacccucugccucggccaccacgccguccccaacggcaccaucgucaagaccaucaccaacgaccagaucgaggucaccaacgccaccgagcucguccaguccuccuccaccggcggcaucugcgacuccccccaccagauccucgacggcgagaacugcacccucaucgacgcccuccucggcgacccccagugcgacggcuuccagaacaagaagugggaccucuucgucgagcgcuccaaggccuacuccaacugcuaccccuacgacguccccgacuacgccucccuccgcucccucgucgccuccuccggcacccucgaguucaacaacgaguccuucaacuggaccggcgucacccagaacggcaccuccuccgccugcaagcgccgcuccaacaacuccuucuucucccgccucaacuggcucacccaccucaaguucaaguaccccgcccucaacgucaccaugcccaacaacgagaaguucgacaagcucuacaucuggggcguccaccaccccggcaccgacaacgaccagaucuuccucuacgcccaggccuccggccgcaucaccgucuccaccaagcgcucccagcagaccgucauccccaacaucggcucccgcccccgcguccgcaacauccccucccgcaucuccaucuacuggaccaucgucaagcccggcgacauccuccucaucaacuccaccggcaaccucaucgccccccgcggcuacuucaagauccgcuccggcaaguccuccaucaugcgcuccgacgcccccaucggcaagugcaacuccgagugcaucacccccaacggcuccauccccaacgacaagcccuuccagaacgucaaccgcaucaccuacggcgccugcccccgcuacgucaagcagaacacccucaagcucgccaccggcaugcgcaacguccccgagaagcagacccgcggcaucuucggcgccaucgccggcuucaucgagaacggcugggagggcauggucgacggcugguacggcuuccgccaccagaacuccgagggcaucggccaggccgccgaccucaaguccacccaggccgccaucaaccagaucaacggcaagcucaaccgccucaucggcaagaccaacgagaaguuccaccagaucgagaaggaguucuccgaggucgagggccgcauccaggaccucgagaaguacgucgaggacaccaagaucgaccucugguccuacaacgccgagcuccucgucgcccucgagaaccagcacaccaucgaccucaccgacuccgagaugaacaagcucuucgagcgcaccaagaagcagcuccgcgagaacgccgaggacaugggcaacggcugcuucaagaucuaccacaagugcgacaacgccugcaucggcuccauccgcaacggcaccuacgaccacgacgucuaccgcgacgaggcccucaacaaccgcuuccagaucaagggcgucgagcucaaguccggcuacaaggacuggauccucuggaucuccuucgccauguccugcuuccuccucugcgucgcccuccucggcuucaucaugugggccugccagaagggcaacauccgcugcaacaucugcaucuga

SEQ ID NO: 107223 - RNA, 1701 nt, Artificial Sequence; identical to SEQ ID NO: 97617
  derived and/or modified CDS sequence (opt2) from hemagglutinin__InfluenzaA__AHL89066

SEQ ID NO: 107224 - RNA, 1701 nt, Artificial Sequence
  derived and/or modified CDS sequence (opt2) from hemagglutinin__InfluenzaA__AHL89078
augaagaccaucaucgcccucuccuacauccucugccucgucuucgcccagaagcuccccggcgacgacaacuccaccgccacccucugccucggccaccacgccguccccaacggcaccgucgucaagaccaucaccaacgaccagaucgaggucaccaacgccaccgagcucguccaguccuccuccaccggcggcaucugcgacuccccccaccagauccucgacggcgagaacugcacccucaucgacgcccuccucggcgacccccagugcgacggcuuccagaacaagaagugggaccucuucgucgagcgcuccaaggccuacuccaacugcuaccccuacgacguccccgacuacgccucccuccgcucccucgucgccuccuccggcacccucgaguucaacaacgaguccuucaacuggaccggcgucacccagaacggcaccuccuccgccugcaagcgccgcuccaacaacuccuucuucucccgccucaacuggcucacccaccucaaguucaaguaccccgcccucaacgucaccaugcccaacaacgagaaguucgacaagcucuacaucuggggcguccaccaccccggcaccgacaacgaccagaucuuccucuacgcccaggccuccggccgcaucaccgucuccaccaagcgcucccagcagaccgucauccccaacaucggcucccgcccccgcguccgcaacauccccucccgcaucuccaucuacuggaccaucgucaagcccggcgacauccuccucaucaacuccaccggcaaccucaucgccccccgcggcuacuucaagauccgcuccggcaaguccuccaucaugcgcuccgacgcccccaucggcaagugcaacuccgagugcaucacccccaacggcuccauccccaacgacaagcccuuccagaacgucaaccgcaucaccuacggcgccugcccccgcuacgucaagcagaacacccucaagcucgccaccggcaugcgcaacguccccgagaagcagacccgcggcaucuucggcgccaucgccggcuucaucgagaacggcugggagggcauggucgacggcugguacggcuuccgccaccagaacuccgagggcaucggccaggccgccgaccucaaguccacccaggccgccaucaaccagaucaacggcaagcucaaccgccucaucggcaagaccaacgagaaguuccaccagaucgagaaggaguucuccgaggucgagggccgcauccaggaccucgagaaguacgucgaggacaccaagaucgaccucugguccuacaacgccgagcuccucgucgcccucgagaaccagcacaccaucgaccucaccgacuccgagaugaacaagcucuucgagcgcaccaagaagcagcuccgcgagaacgccgaggacaugggcaacggcugcuucaagaucuaccacaagugcgacaacgccugcaucggcuccauccgcaacggcaccuacgaccacgacgucuaccgcgacgaggcccucaacaaccgcuuccagaucaagggcgucgagcucaaguccggcuacaaggacuggauccucuggaucuccuucgccaucuccugcuuccuccucugcgucgcccuccucggcuucaucaugugggccugccagaagggcaacauccgcugcaacaucugcaucuga

SEQ ID NO: 107225 - RNA, 1701 nt, Artificial Sequence
  derived and/or modified CDS sequence (opt2) from hemagglutinin__InfluenzaA__AHL89090
augaagaccaucaucgcccucuccuacauccucugccucgucuucgcccagaagcuccccggcaacgacaacuccaccgccacccucugccucggccaccacgccguccccaacggcaccaucgucaagaccaucaccaacgaccagaucgaggucaccaacgccaccgagcucguccaguccuccuccaccggcggcaucugcgacucccccuaccagauccucgacggcgagaacugcacccucaucgacgcccuccucggcgacccccagugcgacggcuuccagaacaagaagugggaccucuucgucgagcgcuccaaggccuacuccaacugcuaccccuacgacguccccgacuacgccucccuccgcucccucgucgccuccuccggcacccucgaguucaacaacgaguccuucaacuggaccggcgucacccagaacggcaccuccuccgccugcaagcgccgcuccaacaacuccuucuucucccgccucaacuggcucacccaccucaaguucaaguaccccgcccucaacgucaccaugcccaacaacgagaaguucgacaagcucuacaucuggggcguccaccaccccggcaccgacaacgaccagaucuuccucuacgcccaggccuccggccgcaucaccgucuccaccaagcgcucccagcagaccgucauccccaacaucggcucccgcccccgcguccgcaacauccccucccgcaucuccaucuacuggaccaucgucaagcccggcgacauccuccucaucaacuccaccggcaaccucaucgccccccgcggcuacuucaagauccgcuccggcaaguccuccaucaugcgcuccgacgcccccaucggcaagugcaacuccgagugcaucacccccaacggcuccauccccaacgacaagcccuuccagaacgucaaccgcaucaccuacggcgccugcccccgcuacgucaagcagaacacccucaagcucgccaccggcaugcgcaacguccccgagaagcagacccgcggcaucuucggcgccaucgccggcuucaucgagaacggcugggagggcauggucgacggcugguacggcuuccgccaccagaacuccgagggcaucggccaggccgccgaccucaaguccacccaggccgccaucaaccagaucaacggcaagcucaaccgccucaucggcaagaccaacgagaaguuccaccagaucgagaaggaguucuccgaggucgagggccgcauccaggaccucgagaaguacgucgaggacaccaagaucgaccucugguccuacaacgccgagcuccucgucgcccucgagaaccagcacaccaucgaccucaccgacuccgagaugaacaagcucuucgagcgcaccaagaagcagcuccgcgagaacgccgaggacaugggcaacggcugcuucaagaucuaccacaagugcgacaacgccugcaucggcuccauccgcaacggcaccuacgaccacgacgucuaccgcgacgaggcccucaacaaccgcuuccagaucaagggcgucgagcucaaguccggcuacaaggacuggauccucuggaucuccuucgccaucuccugcuuccuccucugcgucgcccuccucggcuucaucaugugggccugccagaagggcaacauccgcugcaacaucugcaucuga

SEQ ID NO: 107226 - RNA, 1701 nt, Artificial Sequence; identical to SEQ ID NO: 96666
  derived and/or modified CDS sequence (opt2) from hemagglutinin__InfluenzaA__AHL89102

SEQ ID NO: 107227 - RNA, 1701 nt, Artificial Sequence; identical to SEQ ID NO: 96666
  derived and/or modified CDS sequence (opt2) from hemagglutinin__InfluenzaA__AHL89114

SEQ ID NO: 107228 - RNA, 1701 nt, Artificial Sequence
  derived and/or modified CDS sequence (opt2) from hemagglutinin__InfluenzaA__AHL89126
augaagaccaucaucgcccucuccuacauccucugccucgucuucgcccagaagcuccccggcaacgacaacuccaccgccacccucugccucggccaccacgccguccccaacggcaccaucgucaagaccaucaccaacgaccagaucgaggucaccaacgccaccgagcucguccaguccuccuccaccggcggcaucugcgacuccccccaccagauccucgacggcgagaacugcacccucaucgacgcccuccucggcgacccccagugcgacggcuuccagaacaagaagugggaccucuucgucgagcgcuccaaggccuacuccaacugcuaccccuacgacguccccgacuacgccucccuccgcucccucgucgccuccuccggcacccucgaguucaacaacgagaacuucaacuggaccggcgucacccagaacggcaccuccuccgccugcaagcgccgcuccaacaacuccuucuucucccgccucaacuggcucacccaccucaaguucaaguaccccgcccucaacgucaccaugcccaacaacgagaaguucgacaagcucuacaucuggggcguccaccaccccggcaccgacaacgaccagaucuuccucuacgcccaggccuccggccgcaucaccgucuccaccaagcgcucccagcagaccgucauccccaacaucggcucccgcccccgcguccgcaacauccccucccgcaucuccaucuacuggaccaucgucaagcccggcgacauccuccucaucaacuccaccggcaaccucaucgccccccgcggcuacuucaagauccgcuccggcaaguccuccaucaugcgcuccgacgcccccaucggcaagugcaacuccgagugcaucacccccaacggcuccauccccaacgacaagcccuuccagaacgucaaccgcaucaccuacggcgccugcccccgcuacgucaagcagaacacccucaagcucgccaccggcaugcgcaacguccccgagaagcagacccgcggcaucuucggcgccaucgccggcuucaucgagaacggcugggagggcauggucgacggcugguacggcuuccgccaccagaacuccgagggcaucggccaggccgccgaccucaaguccacccaggccgccaucaaccagaucaacggcaagcucaaccgccucaucggcaagaccaacgagaaguuccaccagaucgagaaggaguucuccgaggucgagggccgcauccaggaccucgagaaguacgucgaggacaccaagaucgaccucugguccuacaacgccgagcuccucgucgcccucgagaaccagcacaccaucgaccucaccgacuccgagaugaacaagcucuucgagcgcaccaagaagcagcuccgcgagaacgccgaggacaugggcaacggcugcuucaagaucuaccacaagugcgacaacgccugcaucggcuccauccgcaacggcaccuacgaccacgacgucuaccgcgacgaggcccucaacaaccgcuuccagaucaagggcgucgagcucaaguccggcuacaaggacuggauccucuggaucuccuucgccaucuccugcuuccuccucugcgucgcccuccucggcuucaucaugugggccugccagaagggcaacauccgcugcaacaucugcaucuga

SEQ ID NO: 107229 - RNA, 1701 nt, Artificial Sequence
  derived and/or modified CDS sequence (opt2) from hemagglutinin__InfluenzaA__AHL89138
augaagaccaucaucgcccucuccuacauccucugccucgucuucgcccagaagcuccccggcaacgacaacuccaccgccacccucugccucggccaccacgccguccccaacggcaccaucgucaagaccaucaccaacgaccagaucgaggucaccaacgccaccgagcucguccaguccuccuccaccggcgagaucugcgacuccccccaccagauccucgacggcgagaacugcacccucaucgacgcccuccucggcgacccccagugcgacggcuuccagaacaagaagugggaccucuucgucgagcgcuccaaggccuacuccaacugcuaccccuacgacguccccgacuacgccucccuccgcucccucgucgccuccuccggcacccucgaguucaacaacgaguccuucaacuggaccggcgucacccagaacggcaccuccuccgccugcaagcgccgcuccaacaacuccuucuucucccgccucaacuggcucacccaccucaaguucaaguaccccgcccucaacgucaccaugcccaacaacgagaaguucgacaagcucuacaucuggggcguccaccaccccggcaccgacaacgaccagaucuuccucuacgcccaguccuccggccgcaucaccgucuccaccaagcgcucccagcagaccgucauccccaacaucggcucccgcccccgcguccgcaacauccccucccgcaucuccaucuacuggaccaucgucaagcccggcgacauccuccucaucaacuccaccggcaaccucaucgccccccgcggcuacuucaagauccgcuccggcaaguccuccaucaugcgcuccgacgcccccaucggcaagugcaacuccgagugcaucacccccaacggcuccauccccaacgacaagcccuuccagaacgucaaccgcaucaccuacggcgccugcccccgcuacgucaagcagaacacccucaagcucgccaccggcaugcgcaacguccccgagaagcagacccgcggcaucuucggcgccaucgccggcuucaucgagaacggcugggagggcauggucgacggcugguacggcuuccgccaccagaacuccgagggcaucggccaggccgccgaccucaaguccacccaggccgccaucaaccagaucaacggcaagcucaaccgccucaucggcaagaccaacgagaaguuccaccagaucgagaaggaguucuccgaggucgagggccgcauccaggaccucgagaaguacgucgaggacaccaagaucgaccucugguccuacaacgccgagcuccucgucgcccucgagaaccagcacaccaucgaccucaccgacuccgagaugaacaagcucuucgagcgcaccaagaagcagcuccgcgagaacgccgaggacaugggcaacggcugcuucaagaucuaccacaagugcgacaacgccugcaucggcuccauccgcaacggcaccuacgaccacgacgucuaccgcgacgaggcccucaacaaccgcuuccagaucaagggcgucgagcucaaguccggcuacaaggacuggauccucuggaucuccuucgccaucuccugcuuccuccucugcgucgcccuccucggcuucaucaugugggccugccagaagggcaacauccgcugcaacaucugcaucuga

SEQ ID NO: 107230 - RNA, 1701 nt, Artificial Sequence
  derived and/or modified CDS sequence (opt2) from hemagglutinin__InfluenzaA__AHL89150
augaagaccaucaucgcccucuccuacauccucugccucgucuucgcccagaagcuccccggcaacgacaacuccaccgccacccucugccucggccaccacgccguccccaacggcaccaucgucaagaccaucaccaacgaccagaucgaggucaccaacgccaccgagcucguccaguccuccuccaccggcggcaucugcgacuccccccaccagauccucgacggcgagaacugcacccucaucgacgcccuccucggcgacccccagugcgacggcuuccagaacaagaagugggaccucuucgucgagcgcuccaaggccuacuccaacugcuaccccuacgacguccccgacuacgccucccuccgcucccucgucgccuccuccggcacccucgaguucaacaacgaguccuucaacuggaccggcgucacccagaacggcaccuccuccgccugcaagcgccgcuccaacaacuccuucuucucccgccucaacuggcucacccaccucaaguucaaguaccccgcccucaacgucaccaugcccaacaacgagaaguucgacaagcucuacaucuggggcguccaccaccccggcaccgacaacgaccagaucuuccucuacgcccaggccuccggccgcaucaccgucuccaccaagcgcucccagcagaccgucauccccaacaucggcucccgcccccgcguccgcaacauccccucccgcaucuccaucuacuggaccaucgucaagcccggcgacauccuccucaucaacuccaccggcaaccucaucgccccccgcggcuacuucaagauccgcuccggcaaguccuccaucaugcgcuccgacgcccccaucggcaagugcaacuccgagugcaucacccccaacggcuccauccccaacgacaagcccuuccagaacgucaaccgcaucaccuacggcgccugcccccgcuacgucaagcagaacacccucaagcucgccaccggcaugcgcaacguccccgagaagcagacccgcggcaucuucggcgccaucgccggcuucaucgagaacggcugggagggcauggucgacggcugguacggcuuccgccaccagaacuccgagggcaucggccaggccgccgaccucaaguccacccaggccgccaucaaccagaucaacggcaagcucaaccgccucaucggcaagaccaacgagaaguuccaccagaucgagaaggaguucuccgaggucgagggccgcauccaggaccucgagaaguacgucgaggacaccaagaucgaccucugguccuacaacgccgagcuccucgucgcccucgagaaccagcacaccaucgaccucaccgacuccgagaugaacaagcucuucgagcgcaccaagaagcagcuccgcgagaacgccgaggacaugggcaacggcugcuucaagaucuaccacaagugcgacaacgccugcaucggcuccauccgcaacggcaccuacgaccacgacgucuaccgcgacgaggcccucaacaaccgcuuccagaucaagggcgucgagcucaaguccggcuacaaggacuggauccucuggaucuccuucgccaucuccugcuuccuccucugcgucgcccuccucgucuucaucaugugggccugccagaagggcaacauccgcugcaacaucugcaucuga

SEQ ID NO: 107231 - RNA, 1701 nt, Artificial Sequence
  derived and/or modified CDS sequence (opt2) from hemagglutinin__InfluenzaA__AHL89162
augaagaccaucaucgcccucuccuacauccucugccucgucuucgcccagaagcuccccggcaacgacaacuccaccgccacccucugccucggccaccacgccguccccaacggcaccaucgucaagaccaucaccaacgaccagaucgaggucaccaacgccaccgagcucguccaguccuccuccaccggcggcaucugcgacuccccccaccagauccucgacggcgagaacugcacccucaucgacgcccuccucggcgacccccagugcgacggcuuccagaacaagaagugggaccucuucgucgagcgcuccaaggccuacuccaacugcuaccccuacgacguccccgacuacgccucccuccgcucccucgucgccuccuccggcacccucgaguucaacaacgaguccuucaacuggaccggcgucacccagaacggcaccuccuccgccugcaagcgccgcuccaacaacuccuucuucucccgccucaacuggcucacccaccucaaguucaaguaccccgcccucaacgucaccaugcccaacaacgagaaguucgacaagcucuacaucuggggcguccaccaccccggcaccgacaacgaccagaucuuccucuacgcccaggccuccggccgcaucaccgucuccaccaagcgcucccagcagaccgucauccccaacaucggcucccgcccccgcguccgcaacauccccucccgcaucuccaucuacuggaccaucgucaagcccggcgacauccuccucaucaacuccaccggcaaccucaucgccccccgcggcuacuucaagauccgcuccggcaaguccuccaucaugcgcuccgacgcccccaucggcaagugcaacuccgagugcaucacccccaacggcuccauccccaacgacaagcccuuccagaacgucaaccgcaucaccuacggcgccugcccccgcuacgucaagcagaacacccucaagcucgccaccggcaugcgcaacguccccgagaagcagacccgcggcaucuucggcgccaucgccggcuucaucgagaacggcugggagggcauggucgacggcugguacggcuuccgccaccagaacuccgagggcaccggccaggccgccgaccucaaguccacccaggccgccaccaaccagaucaacggcaagcucaaccgccucaucggcaagaccaacgagaaguuccaccagaucgagaaggaguucuccgaggucgagggccgcauccaggaccucgagaaguacgucgaggacaccaagaucgaccucugguccuacaacgccgagcuccucgucgcccucgagaaccagcacaccaucgaccucaccgacuccgagaugaacaagcucuucgagcgcaccaagaagcagcuccgcgagaacgccgaggacaugggcaacggcugcuucaagaucuaccacaagugcgacaacgccugcaucggcuccauccgcaacggcaccuacgaccacgacgucuaccgcgacgaggcccucaacaaccgcuuccagaucaagggcgucgagcucaaguccggcuacaaggacuggauccucuggaucuccuucgccaucuccugcuuccuccucugcgucgcccuccucggcuucaucaugugggccugccagaagggcaacauccgcugcaacaucugcaucuga

SEQ ID NO: 107232 - RNA, 1701 nt, Artificial Sequence
  derived and/or modified CDS sequence (opt2) from hemagglutinin__InfluenzaA__AHL89174
augaagaccaucaucgcccucuccuacacccucugccucgucuucgcccagaagcuccccggcaacgacaacuccaccgccacccucugccucggccaccacgccguccccaacggcaccaucgucaagaccaucaccaacgaccagaucgaggucaccaacgccaccgagcucguccaguccuccuccaccggcggcaucugcgacuccccccaccagauccucgacggcgagaacugcacccucaucgacgcccuccucggcgacccccagugcgacggcuuccagaacaagaagugggaccucuucgucgagcgcuccaaggccuacuccaacugcuaccccuacgacguccccgacuacgccucccuccgcucccucgucgccuccuccggcacccucgaguucaacaacgaguccuucaacuggaccggcgucacccagaacggcaccuccuccgccugcaagcgccgcuccaacaacuccuucuucucccgccucaacuggcucacccaccucaaguucaaguaccccgcccucaacgucaccaugcccaacaacgagaaguucgacaagcucuacaucuggggcguccaccaccccggcaccgacaacgaccagaucuuccucuacgcccaggccuccggccgcaucaccgucuccaccaagcgcucccagcagaccgucauccccaacaucggcucccgcccccgcguccgcaacauccccucccgcaucuccaucuacuggaccaucgucaagcccggcgacauccuccucaucaacuccaccggcaaccucaucgccccccgcggcuacuucaagauccgcuccggcaaguccuccaucaugcgcuccgacgcccccaucggcaagugcaacuccgagugcaucacccccaacggcuccauccccaacgacaagcccuuccagaacgucaaccgcaucaccuacggcgccugcccccgcuacgucaagcagaacacccucaagcucgccaccggcaugcgcaacguccccgagaagcagacccgcggcaucuucggcgccaucgccggcuucaucgagaacggcugggagggcauggucgacggcugguacggcuuccgccaccagaacuccgagggcaucggccaggccgccgaccucaaguccacccaggccgccaucaaccagaucaacggcaagcucaaccgccucaucggcaagaccaacgagaaguuccaccagaucgagaaggaguucuccgaggucgagggccgcauccaggaccucgagaaguacgucgaggacaccaagaucgaccucugguccuacaacgccgagcuccucgucgcccucgagaaccagcacaccaucgaccucaccgacuccgagaugaacaagcucuucgagcgcaccaagaagcagcuccgcgagaacgccgaggacaugggcaacggcugcuucaagaucuaccacaagugcgacaacgccugcaucggcuccauccgcaacggcaccuacgaccacgacgucuaccgcgacgaggcccucaacaaccgcuuccagaucaagggcgucgagcucaaguccggcuacaaggacuggauccucuggaucuccuucgccaucuccugcuuccuccucugcgucgcccuccucggcuucaucaugugggccugccagaagggcaacauccgcugcaacaucugcaucuga

SEQ ID NO: 107233 - RNA, 1701 nt, Artificial Sequence
  derived and/or modified CDS sequence (opt2) from hemagglutinin__InfluenzaA__AHL89210
augaagaccaucaucgcccucuccuacauccucugccucgucuucgcccagaagcuccccggcaacgacaacuccaccgccacccucugccucggccaccacgccguccccaacggcaccaucgucaagaccaucaccaacgaccagaucgaggucaccaacgccaccgagcucguccaguccuccuccaccggcgagaucugcgacuccccccaccagauccucgacggcgagaacugcacccucaucgacgcccuccucggcgacccccagugcgacggcuuccagaacaagaagugggaccucuucgucgagcgcuccaaggccuacuccaacugcuaccccuacgacguccccgacuacgccucccuccgcucccucgucgccuccuccggcacccucgaguucaacaacgaguccuucaacuggaccggcgucacccagaacggcaccuccuccgccugcaagcgccgcuccaacaacuccuucuucucccgccucaacuggcucacccaccucaaguucaaguaccccgcccucaacgucaccaugcccaacaacgagaaguucgacaagcucuacaucuggggcguccaccaccccggcaccgacaacgaccagaucuuccucuacgcccaggccuccggccgcaucaccgucuccaccaagcgcucccagcagaccgucauccccaacaucggcucccgcccccgcguccgcaacauccccucccgcaucuccaucuacuggaccaucgucaagcccggcgacauccuccucaucaacuccaccggcaaccucaucgccccccgcggcuacuucaagauccgcuccggcaaguccuccaucaugcgcuccgacgcccccaucggcaagugcaacuccgagugcaucacccccaacggcuccauccccaacgacaagcccuuccagaacgucaaccgcaucaccuacggcgccugcccccgcuacgucaagcagaacacccucaagcucgccaccggcaugcgcaacguccccgagaagcagacccgcggcaucuucggcgccaucgccggcuucaucgagaacggcugggagggcauggucgacggcugguacggcuuccgccaccagaacuccgagggcaucggccaggccgccgaccucaaguccacccaggccgccaucaaccagaucaacggcaagcucaaccgccucaucggcaagaccaacgagaaguuccaccagaucgagaaggaguucuccgaggucgagggccgcauccaggaccucgagaaguacgucgaggacaccaagaucgaccucugguccuacaacgccgagcuccucgucgcccucgagaaccagcacaccaucgaccucaccgacuccgagaugaacaagcucuucgagcgcaccaagaagcagcuccgcgagaacgccgaggacaugggcaacggcugcuucaagaucuaccacaagugcgacaacgccugcaucggcuccauccgcaacggcaccuacgaccacgacgucuaccgcgacgaggcccucaacaaccgcuuccagaucaagggcgucgagcucaaguccggcuacaaggacuggauccucuggaucuccuucgccaucuccugcuuccuccucugcgucgcccuccucggcuucaucaugugggccugccagaagggcaacauccgcugcaacaucugcaucuga

SEQ ID NO: 107234 - RNA, 1701 nt, Artificial Sequence; identical to SEQ ID NO: 107233
  derived and/or modified CDS sequence (opt2) from hemagglutinin__InfluenzaA__AHL89222

SEQ ID NO: 107235 - RNA, 1701 nt, Artificial Sequence
  derived and/or modified CDS sequence (opt2) from hemagglutinin__InfluenzaA__AHL89234
augaagaccaucaucgcccucuccuacauccucugccucgucuucgcccagaagcuccccggcaacgacaacuccaccgccacccucugccucggccaccacgccguccccaacggcaccaucgucaagaccaucaccaacgaccagaucgaggucaccaacgccaccgagcucguccaguccuccuccaccggcgagaucugcgacuccccccaccagauccucgacggcgagaacugcacccucaucgacgcccuccucggcgacccccagugcgacggcuuccagaacaagaagugggaccucuucgucgagcgcuccaaggccuacuccaacugcuaccccuacgacguccccgacuacgccucccuccgcucccucgucgccuccuccggcacccucgaguucaacaacgaguccuucaacuggaccggcgucacccagaacggcaccuccuccgccugcaagcgccgcuccaacaacuccuucuucucccgccucaacuggcucacccaccucaaguucaaguaccccgcccucaacgucaccaugcccaacaacgagaaguucgacaagcucuacaucuggggcguccaccaccccggcaccgacaacgaccagaucuuccucuacgcccaggccuccggccgcaucaccgucuccaccaagcgcucccagcagaccgucauccccaacaucggcucccgcccccgcguccgcaacauccccucccgcaucuccaucuacuggaccaucgucaagcccggcgacauccuccucaucaacuccaccggcaaccucaucgccccccgcggcuacuucaagauccgcuccggcaaguccuccaucaugcgcuccgacgcccccaucggcaagugcaacuccgagugcaucacccccaacggcuccauccccaacgacaagcccuuccagaacgucaaccgcaucaccuacggcgccugcccccgcuacgucaagcagaacacccucaagcucgccaccggcaugcgcaacguccccgagaagcagacccgcggcaucuucggcgccaucgccggcuucaucgagaacggcugggagggcauggucgacggcugguacggcuuccgccaccagaacuccgagggcaugggccaggccgccgaccucaaguccacccaggccgccaucaaccagaucaacggcaagcucaaccgccucaucggcaagaccaacgagaaguuccaccagaucgagaaggaguucuccgaggucgagggccgcauccaggaccucgagaaguacgucgaggacaccaagaucgaccucugguccuacaacgccgagcuccucgucgcccucgagaaccagcacaccaucgaccucaccgacuccgagaugaacaagcucuucgagcgcaccaagaagcagcuccgcgagaacgccgaggacaugggcaacggcugcuucaagaucuaccacaagugcgacaacgccugcaucggcuccauccgcaacggcaccuacgaccacgacgucuaccgcgacgaggcccucaacaaccgcuuccagaucaagggcgucgagcucaaguccggcuacaaggacuggauccucuggaucuccuucgccaucuccugcuuccuccucugcgucgcccuccucggcuucaucaugugggccugccagaagggcaacauccgcugcaacaucugcaucuga

SEQ ID NO: 107236 - RNA, 1701 nt, Artificial Sequence
  derived and/or modified CDS sequence (opt2) from hemagglutinin__InfluenzaA__AHL89246
augaagaccaucaucgcccucuccuacauccucugccucgucuucgcccagaagcuccccggcaacgacaacuccaccgccacccucugccucggccaccacgccguccccaacggcaccaucgucaagaccaucaccaacgaccagaucgaggucaccaacgccaccgagcucguccaguccuccuccaccggcgagaucugcgacuccccccaccagauccucgacggcgagaacugcacccucaucgacgcccuccucggcgacccccagugcgacggcuuccagaacaagaagugggaccucuucgucgagcgcuccaaggccuacuccaacugcuaccccuacgacguccccgacuacgccucccuccgcucccucgucgccuccuccggcacccucgaguucaacaacgaguccuucaacuggaccggcgucacccagaacggcaccuccuccgccugcaagcgccgcuccaacaacuccuucuucucccgccucaacuggcucacccaccucaaguucaaguaccccgcccucaacgucaccaugcccaacaacgagaaguucgacaagcucuacaucuggggcguccaccaccccggcaccgacaacgaccagaucuuccucuacgcccaggccuccggccgcaucaccgucuccaccaagcgcucccagcagaccgucauccccaacaucggcucccgcccccgcguccgcaacauccccucccgcaucuccaucuacuggaccaucgucaagcccggcgacauccuccucaucaacuccaccggcaaccucaucgccccccgcggcuacuucaagauccgcuccggcaaguccuccaucaugcgcuccgacgcccccaucggcaagugcaacuccgagugcaucacccccaacggcuccauccccaacgacaagcccuuccagaacgucaaccgcaucaccuacggcgccugcccccgcuacgucaagcagaacacccucaagcucgccaccggcaugcgcaacguccccgagaagcagacccgcggcaucuucggcgccaucgccggcuucaucgagaacggcugggagggcauggucgacggcugguacggcuuccgccaccagaacuccgagggcaucggccaggccgccgaccucaaguccacccaggccgccaucaaccagaucaacggcaagcucaaccgccucaucggcaagaccaacgagaaguuccaccagaucgagaaggaguucuccgaggucgagggccgcauccaggaccucgagaaguacgucgaggacaccaagaucgaccucugguccuacaacgccgagcuccucgucgcccucgagaaccagcacaccaucgaccucaccgacuccgagaugaacaagcucuucgagcgcaccaagaagcagcuccgcgagaacgccgaggacaugggcaacggcugcuucaagaucuaccacaagugcggcaacgccugcaucggcuccauccgcaacggcaccuacgaccacgacgucuaccgcgacgaggcccucaacaaccgcuuccagaucaagggcgucgagcucaaguccggcuacaaggacuggauccucuggaucuccuucgccaucuccugcuuccuccucugcgucgcccuccucggcuucaucaugugggccugccagaagggcaacauccgcugcaacaucugcaucuga

SEQ ID NO: 107237 - RNA, 1701 nt, Artificial Sequence
  derived and/or modified CDS sequence (opt2) from hemagglutinin__InfluenzaA__AHL89258
augaagaccaucaucgcccucuccuacauccucugccucgucuucgcccagaagcuccccggcaacgacaacuccaccgccacccucugccucggccaccacgccguccccaacggcaccaucgucaagaccaucaccaacgaccagaucgaggucaccaacgccaccgagcucguccaguccuccuccaccggcgagaucugcgacuccccccaccagauccucgacggcgagaacugcacccucaucgacgcccuccucggcgacccccagugcgacggcuuccagaacaagaagugggaccucuucgucgagcgcuccaaggccuacuccaacugcuaccccuacgacguccccgacuacgccucccuccgcucccucgucgccuccuccggcacccucgaguucaacaacgaguccuucaacuggaccggcgucacccagaacggcaccuccuccgccugcaagcgccgcuccaacaacuccuucuucucccgccucaacuggcucacccaccucaaguucaaguaccaggcccucaacgucaccaugcccaacaacgagaaguucgacaagcucuacaucuggggcguccaccaccccggcaccgacaacgaccagaucuuccucuacgcccaggccuccggccgcaucaccgucuccaccaagcgcucccagcagaccgucauccccaacaucggcucccgcccccgcguccgcaacauccccucccgcaucuccaucuacuggaccaucgucaagcccggcgacauccuccucaucaacuccaccggcaaccucaucgccccccgcggcuacuucaagauccgcuccggcaaguccuccaucaugcgcuccgacgcccccaucggcaagugcaacuccgagugcaucacccccaacggcuccauccccaacgacaagcccuuccagaacgucaaccgcaucaccuacggcgccugcccccgcuacgucaagcagaacacccucaagcucgccaccggcaugcgcaacguccccgagaagcagacccgcggcaucuucggcgccaucgccggcuucaucgagaacggcugggagggcauggucgacggcugguacggcuuccgccaccagaacuccgagggcaucggccaggccgccgaccucaaguccacccaggccgccaucaaccagaucaacggcaagcucaaccgccucaucggcaagaccaacgagaaguuccaccagaucgagaaggaguucuccgaggucgagggccgcauccaggaccucgagaaguacgucgaggacaccaagaucgaccucugguccuacaacgccgagcuccucgucgcccucgagaaccagcacaccaucgaccucaccgacuccgagaugaacaagcucuucgagcgcaccaagaagcagcuccgcgagaacgccgaggacaugggcaacggcugcuucaagaucuaccacaagugcgacaacgccugcaucggcuccauccgcaacggcaccuacgaccacgacgucuaccgcgacgaggcccucaacaaccgcuuccagaucaagggcgucgagcucaaguccggcuacaaggacuggauccucuggaucuccuucgccaucuccugcuuccuccucugcgucguccuccucggcuucaucaugugggccugccagaagggcaacauccgcugcaacaucugcaucuga

SEQ ID NO: 107238 - RNA, 1701 nt, Artificial Sequence; identical to SEQ ID NO: 107233
  derived and/or modified CDS sequence (opt2) from hemagglutinin__InfluenzaA__AHL89270

SEQ ID NO: 107239 - RNA, 1701 nt, Artificial Sequence; identical to SEQ ID NO: 107233
  derived and/or modified CDS sequence (opt2) from hemagglutinin__InfluenzaA__AHL89282

SEQ ID NO: 107240 - RNA, 1701 nt, Artificial Sequence; identical to SEQ ID NO: 107233
  derived and/or modified CDS sequence (opt2) from hemagglutinin__InfluenzaA__AHL89294

SEQ ID NO: 107241 - RNA, 1701 nt, Artificial Sequence; identical to SEQ ID NO: 107233
  derived and/or modified CDS sequence (opt2) from hemagglutinin__InfluenzaA__AHL89306

SEQ ID NO: 107242 - RNA, 1701 nt, Artificial Sequence; identical to SEQ ID NO: 97617
  derived and/or modified CDS sequence (opt2) from hemagglutinin__InfluenzaA__AHL89318

SEQ ID NO: 107243 - RNA, 1701 nt, Artificial Sequence
  derived and/or modified CDS sequence (opt2) from hemagglutinin__InfluenzaA__AHL89330
augaagaccaucaucgcccucuccuacauccucugccucgucuucgcccagaagcuccccggcaacgacaacuccaccgccacccucugccucggccaccacgccguccccaacggcaccaucgucaagaccaucaccaacgaccagaucgaggucaccaacgccaccgagcucguccaguccuccuccaccggcgagaucugcgacuccccccaccagauccucgacggcaagaacugcacccucaucgacgcccuccucggcgacccccagugcgacggcuuccagaacaagaagugggaccucuucgucgagcgcuccaaggccuacuccaacugcuaccccuacgacguccccgacuacgccucccuccgcucccucgucgccuccuccggcacccucgaguucaacaacgaguccuucaacuggaccggcgucacccagaacggcaccuccuccgccugcaagcgccgcuccaacaacuccuucuucucccgccucaacuggcucacccaccucaaguucaaguaccccgcccucaacgucaccaugcccaacaacgagaaguucgacaagcucuacaucuggggcguccaccaccccggcaccgacaacgaccagaucuuccucuacgcccaggccuccggccgcaucaccgucuccaccaagcgcucccagcagaccgucauccccaacaucggcucccgcccccgcguccgcaacauccccucccgcaucuccaucuacuggaccaucgucaagcccggcgacauccuccucaucaacuccaccggcaaccucaucgccccccgcggcuacuucaagauccgcuccggcaaguccuccaucaugcgcuccgacgcccccaucggcaagugcaacuccgagugcaucacccccaacggcuccauccccaacgacaagcccuuccagaacgucaaccgcaucaccuacggcgccugcccccgcuacgucaagcagaacacccucaagcucgccaccggcaugcgcaacguccccgagaagcagacccgcggcaucuucggcgccaucgccggcuucaucgagaacggcugggagggcauggucgacggcugguacggcuuccgccaccagaacuccgagggcaucggccaggccgccgaccucaaguccacccaggccgccaucaaccagaucaacggcaagcucaaccgccucaucggcaagaccaacgagaaguuccaccagaucgagaaggaguucuccgaggucgagggccgcauccaggaccucgagaaguacgucgaggacaccaagaucgaccucugguccuacaacgccgagcuccucgucgcccucgagaaccagcacaccaucgaccucaccgacuccgagaugaacaagcucuucgagcgcaccaagaagcagcuccgcgagaacgccgaggacaugggcaacggcugcuucaagaucuaccacaagugcgacaacgccugcaucggcuccauccgcaacggcaccuacgaccacgacgucuaccgcgacgaggcccucaacaaccgcuuccagaucaagggcgucgagcucaaguccggcuacaaggacuggauccucuggaucuccuucgccaucuccugcuuccuccucugcgucgcccuccucggcuucaucaugugggccugccagaagggcaacauccgcugcaacaucugcaucuga

SEQ ID NO: 107244 - RNA, 1701 nt, Artificial Sequence; identical to SEQ ID NO: 96666
  derived and/or modified CDS sequence (opt2) from hemagglutinin__InfluenzaA__AHL89342

SEQ ID NO: 107245 - RNA, 1701 nt, Artificial Sequence; identical to SEQ ID NO: 97597
  derived and/or modified CDS sequence (opt2) from hemagglutinin__InfluenzaA__AHL89354

SEQ ID NO: 107246 - RNA, 1701 nt, Artificial Sequence
  derived and/or modified CDS sequence (opt2) from hemagglutinin__InfluenzaA__AHL89366
augaagaccaucaucgcccucuccuacauccucugccucgucuucgcccagaagcuccccggcaacgacaacuccaccgccacccucugccucggccaccacgccguccccaacggcaccaucgucaagaccaucaccaacgaccagaucgaggucaccaacgccaccgagcucguccaguccuccuccaccggcgagaucugcgacuccccccaccagauccucgacggcgagaacugcacccucaucgacgcccuccucggcgacccccagugcgacggcuuccagaacaagaagugggaccucuucgucgagcgcuccaaggccuacuccaacugcuaccccuacgacguccccgacuacgccucccuccgcucccucgucgccuccuccggcacccucgaguucaacaacgaguccuucaacuggaccggcgucacccagaacggcaccuccuccgccugcaagcgccgcuccaacaacuccuucuucucccgccucaacuggcucacccaccucaaguucaaguaccccgcccucaacgucaccaugcccaacaacgagaaguucgacaagcucuacaucuggggcguccaccaccccggcaccgacaacgaccagaucuuccucuacgcccaggccuccggccgcaucaccgucuccaccaagcgcucccagcagaccgucauccccaacaucggcucccgcccccgcguccgcaacauccccucccgcaucuccaucuacuggaccaucgucaagcccggcgacauccuccucaucaacuccaccggcaaccucaucgccccccgcggcuacuucaagauccgcuccggcaaguccuccaucaugaaguccgacgcccccaucggcaagugcaacuccgagugcaucacccccaacggcuccauccccaacgacaagcccuuccagaacgucaaccgcaucaccuacggcgccugcccccgcuacgucaagcagaacacccucaagcucgccaccggcaugcgcaacguccccgagaagcagacccgcggcaucuucggcgccaucgccggcuucaucgagaacggcugggagggcauggucgacggcugguacggcuuccgccaccagaacuccgagggcaucggccaggccgccgaccucaaguccacccaggccgccaucaaccagaucaacggcaagcucaaccgccucaucggcaagaccaacgagaaguuccaccagaucgagaaggaguucuccgaggucgagggccgcauccaggaccucgagaaguacgucgaggacaccaagaucgaccucugguccuacaacgccgagcuccucgucgcccucgagaaccagcacaccaucgaccucaccgacuccgagaugaacaagcucuucgagcgcaccaagaagcagcuccgcgagaacgccgaggacaugggcaacggcugcuucaagaucuaccacaagugcgacaacgccugcaucggcuccauccgcaacggcaccuacgaccacgacgucuaccgcgacgaggcccucaacaaccgcuuccagaucaagggcaucgagcucaaguccggcuacaaggacuggauccucuggaucuccuucgccaucuccugcuuccuccucugcgucguccuccucggcuucaucaugugggccugccagaagggcaacauccgcugcaacaucugcaucuga

SEQ ID NO: 107247 - RNA, 1701 nt, Artificial Sequence; identical to SEQ ID NO: 107233
  derived and/or modified CDS sequence (opt2) from hemagglutinin__InfluenzaA__AHL89378

SEQ ID NO: 107248 - RNA, 1701 nt, Artificial Sequence; identical to SEQ ID NO: 97864
  derived and/or modified CDS sequence (opt2) from hemagglutinin__InfluenzaA__AHL89390

SEQ ID NO: 107249 - RNA, 1701 nt, Artificial Sequence; identical to SEQ ID NO: 107233
  derived and/or modified CDS sequence (opt2) from hemagglutinin__InfluenzaA__AHL89402

SEQ ID NO: 107250 - RNA, 1701 nt, Artificial Sequence; identical to SEQ ID NO: 97617
  derived and/or modified CDS sequence (opt2) from hemagglutinin__InfluenzaA__AHL89414

SEQ ID NO: 107251 - RNA, 1701 nt, Artificial Sequence
  derived and/or modified CDS sequence (opt2) from hemagglutinin__InfluenzaA__AHL89426
augaagaccaucaucgcccucuccuacauccucugccucgucuucgcccagaagcuccccggcaacgacaacuccaccgccacccucugccucggccaccacgccguccccaacggcaccaucgucaagaccaucaccaacgaccagaucgaggucaccaacgccaccgagcucguccaguccuccuccaccggcgagaucugcgacuccccccaccagauccucgacggcgagaacugcacccucaucgacgcccuccucggcgacccccagugcgacggcuuccagaacaagaagugggaccucuucgucgagcgcuccaaggccuacuccaacugcuaccccuacgacguccccgacuacgccucccuccgcucccucgucgccuccuccggcacccucgaguucaacaacgaguccuucaacuggaccggcgucacccagaacggcaccuccuccgccugcaagcgccgcuccaacaacuccuucuucucccgccucaacuggcucacccaccucaaguucaaguaccccgcccucaacgucaccaugcccaacaacgagaaguucgacaagcucuacaucuggggcguccaccaccccggcaccgacaacgaccagaucuuccucuacgcccaggccuccggccgcaucaccgucuccaccaagcgcucccagcagaccgucauccccaacaucggcucccgcccccgcguccgcaacauccccucccgcaucuccaucuacuggaccaucgucaagcccggcgacauccucuucaucaacuccaccggcaaccucaucgccccccgcggcuacuucaagauccgcuccggcaaguccuccaucaugcgcuccgacgcccccaucggcaagugcaacuccgagugcaucacccccaacggcuccauccccaacgacaagcccuuccagaacgucaaccgcaucaccuacggcgccugcccccgcuacgucaagcagaacacccucaagcucgccaccggcaugcgcaacguccccgagaagcagacccgcggcaucuucggcgccaucgccggcuucaucgagaacggcugggagggcauggucgacggcugguacggcuuccgccaccagaacuccgagggcaucggccaggccgccgaccucaaguccacccaggccgccaucaaccagaucaacggcaagcucaaccgccucaucggcaagaccaacgagaaguuccaccagaucgagaaggaguucuccgaggucgagggccgcauccaggaccucgagaaguacgucgaggacaccaagaucgaccucugguccuacaacgccgagcuccucgucgcccucgagaaccagcacaccaucgaccucaccgacuccgagaugaacaagcucuucgagcgcaccaagaagcagcuccgcgagaacgccgaggacaugggcaacggcugcuucaagaucuaccacaagugcgacaacgccugcaucggcuccauccgcaacggcaccuacgaccacgacgucuaccgcgacgaggcccucaacaaccgcuuccagaucaagggcgucgagcucaaguccggcuacaaggacuggauccucuggaucuccuucgccaucuccugcuuccuccucugcgucguccuccucggcuucaucaugugggccugccagaagggcaacauccgcugcaacaucugcaucuga

SEQ ID NO: 107252 - RNA, 1701 nt, Artificial Sequence; identical to SEQ ID NO: 107233
  derived and/or modified CDS sequence (opt2) from hemagglutinin__InfluenzaA__AHL89438

SEQ ID NO: 107253 - RNA, 1701 nt, Artificial Sequence; identical to SEQ ID NO: 107233
  derived and/or modified CDS sequence (opt2) from hemagglutinin__InfluenzaA__AHL89450

SEQ ID NO: 107254 - RNA, 1701 nt, Artificial Sequence; identical to SEQ ID NO: 107233
  derived and/or modified CDS sequence (opt2) from hemagglutinin__InfluenzaA__AHL89462

SEQ ID NO: 107255 - RNA, 1701 nt, Artificial Sequence; identical to SEQ ID NO: 107233
  derived and/or modified CDS sequence (opt2) from hemagglutinin__InfluenzaA__AHL89474

SEQ ID NO: 107256 - RNA, 1701 nt, Artificial Sequence; identical to SEQ ID NO: 97864
  derived and/or modified CDS sequence (opt2) from hemagglutinin__InfluenzaA__AHL89486

SEQ ID NO: 107257 - RNA, 1701 nt, Artificial Sequence; identical to SEQ ID NO: 97617
  derived and/or modified CDS sequence (opt2) from hemagglutinin__InfluenzaA__AHL89498

SEQ ID NO: 107258 - RNA, 1701 nt, Artificial Sequence; identical to SEQ ID NO: 97617
  derived and/or modified CDS sequence (opt2) from hemagglutinin__InfluenzaA__AHL89510

SEQ ID NO: 107259 - RNA, 1701 nt, Artificial Sequence; identical to SEQ ID NO: 97617
  derived and/or modified CDS sequence (opt2) from hemagglutinin__InfluenzaA__AHL89522

SEQ ID NO: 107260 - RNA, 1701 nt, Artificial Sequence
  derived and/or modified CDS sequence (opt2) from hemagglutinin__InfluenzaA__AHL89534
augaagaccaucaucgcccucuccuacauccucugccucgucuucgcccagaagcuccccggcaacgacaacuccaccgccacccucugccucggccaccacgccguccccaacggcaccaucgucaagaccaucaccaacgaccagaucgaggucaccaacgccaccgagcucguccaguccuccuccaccggcgagaucugcgacuccccccaccagauccucgacggcgagaacugcacccucaucgacgcccuccucggcgacccccagugcgacggcuuccagaacaagaagugggaccucuucgucgagcgcuccaaggccuacuccaacugcuaccccuacgacguccccgacuacgccucccuccgcucccucgucgccuccuccggcacccucgaguucaacaacgaguccuucaacuggaccggcgucacccagaacggcaccuccuccgccugcaagcgccgcuccaacaacuccuucuucucccgccucaacuggcucacccaccucaaguucaaguaccccgcccucaacgucaccaugcccaacaacgagaaguucgacaagcucuacaucuggggcguccaccaccccggcaccgacaacgaccagaucuuccucuacgcccaggccuccggccgcaucaccgucuccaccaagcgcucccagcagaccgucauccccaacaucggcucccgcccccgcguccgcaacauccccucccgcaucuccaucuacuggaccaucgucaagcccggcgacauccuccucaucaacuccaccggcaaccucaucgccccccgcggcuacuucaagauccgcuccggcaaguccuccaucaugcgcuccgacgcccccaucggcaagugcaacuccgagugcaucacccccaacggcuccauccccaacgacaagcccuuccagaacgucaaccgcaucaccuacggcgccugcccccgcuacgucaagcagaacacccucaagcucgccaccggcaugcgcaacguccccgagaagcagacccgcggcaucuucggcgccaucgccggcuucaucgagaacggcugggagggcauggucgacggcugguacggcuuccgccaccagaacuccgagggcaucggccaggccgccgaccucaaguccacccaggccgccaucaaccagaucaacggcaagcucaaccgccucaucggcaagaccaacgagaaguuccaccagaucgagaaggaguucuccgaggucgagggccgcauccaggaccucgagaaguacgucgaggacaccaagaucgaccucugguccuacaacgccgagcuccucgucgcccucgagaaccagcacaccaucgaccucaccgacuccgagaugaacaagcucuucgagcgcaccaagaagcagcuccgcgagaacgccgaggacaugggcaacggcugcuucaagaucuaccacaagugcgacaacgccugcaucggcuccauccgcaacggcaccuacgaccacgacgucuaccgcgacgaggcccucaacaaccgcuuccagaucaagggcaucgagcucaaguccggcuacaaggacuggauccucuggaucuccuucgccaucuccugcuuccuccucugcgucguccuccucggcuucaucaugugggccugccagaagggcaacauccgcugcaacaucugcaucuga

SEQ ID NO: 107261 - RNA, 1698 nt, Artificial Sequence
  derived and/or modified CDS sequence (opt2) from hemagglutinin__InfluenzaA__AHL89546
augaaggucaagcuccucguccuccucugcaccuucaccgccaccuacgccgacaccaucugcaucggcuaccacgccaacaacuccaccgacaccgucgacaccguccucgagaagaacgucaccgucacccacuccgucaaccuccucgaggacucccacaacggcaagcucugccuccucaagggcaucgccccccuccagcucggcaacugcuccgucgccggcuggauccucggcaaccccgagugcgagcuccucaucuccaaggaguccugguccuacaucgucgagacccccaaccccgagaacggcaccugcuaccccggcuacuucgccgacuacgaggagcuccgcgagcagcucuccuccgucuccuccuucgagcgcuucgagaucuuccccaaggaguccuccuggcccaaccacaccgucaccggcgucuccgccuccugcucccacaacggcaaguccuccuucuaccgcaaccuccucuggcucaccggcaagaacggccucuaccccaaccucuccaaguccuacgccaacaacaaggagaaggagguccucguccucuggggcguccaccacccccccaacaucggcgaccagcgcgcccucuaccacaccgaguccgccuacgucuccgucgucuccucccacuacucccgccgcuucacccccgagaucgccaagcgccccaagguccgcgaccaggagggccgcaucaacuacuacuggacccuccucgagcccggcgacaccaucaucuucgaggccaacggcaaccucaucgccccccgcuucgccuucgcccucucccgcggcuucggcuccggcaucaucaccuccaacgcccccauggacgagugcgacgccaagugccagaccccccagggcgccaucaacuccucccuccccuuccagaacguccaccccgucaccaucggcgagugccccaaguacguccgcuccgccaagcuccgcauggucaccggccuccgcaacauccccuccauccagucccgcggccucuucggcgccaucgccggcuucaucgagggcggcuggaccggcauggucgacggcugguacggcuaccaccaccagaacgagcagggcuccggcuacgccgccgaccagaaguccacccagaacgccaucaacggcaucaccaacaaggucaacuccgucaucgagaagaugaacacccaguucaccgccgucggcaaggaguucaacaagcucgagcgccgcauggagaaccucaacaagaaggucgacgacggcuuccucgacaucuggaccuacaacgccgagcuccucguccuccucgagaacgagcgcacccucgacuuccacgacuccaacgucaagaaccucuacgagaaggucaagucccagcucaagaacaacgccaaggagaucggcaacggcugcuucgaguucuaccacaagugcaacgacgagugcauggaguccgucaagaacggcaccuacgacuaccccaaguacuccgaggaguccaagcucaaccgcgagcgcaucgacggcgucaagcucgaguccaugggcgucuaccagauccucgccaucuacuccaccgucgccuccucccucguccuccucgucucccucggcgccaucuccuucuggaugugcuccaacggcucccuccagugccgcaucugcaucuga

SEQ ID NO: 107262 - RNA, 1698 nt, Artificial Sequence; identical to SEQ ID NO: 97950
  derived and/or modified CDS sequence (opt2) from hemagglutinin__InfluenzaA__AHL89558

SEQ ID NO: 107263 - RNA, 1698 nt, Artificial Sequence; identical to SEQ ID NO: 97950
  derived and/or modified CDS sequence (opt2) from hemagglutinin__InfluenzaA__AHL89570

SEQ ID NO: 107264 - RNA, 1698 nt, Artificial Sequence; identical to SEQ ID NO: 97966
  derived and/or modified CDS sequence (opt2) from hemagglutinin__InfluenzaA__AHL89582

SEQ ID NO: 107265 - RNA, 1698 nt, Artificial Sequence; identical to SEQ ID NO: 97966
  derived and/or modified CDS sequence (opt2) from hemagglutinin__InfluenzaA__AHL89594

SEQ ID NO: 107266 - RNA, 1698 nt, Artificial Sequence; identical to SEQ ID NO: 97966
  derived and/or modified CDS sequence (opt2) from hemagglutinin__InfluenzaA__AHL89606

SEQ ID NO: 107267 - RNA, 1698 nt, Artificial Sequence; identical to SEQ ID NO: 97950
  derived and/or modified CDS sequence (opt2) from hemagglutinin__InfluenzaA__AHL89618

SEQ ID NO: 107268 - RNA, 1698 nt, Artificial Sequence; identical to SEQ ID NO: 97966
  derived and/or modified CDS sequence (opt2) from hemagglutinin__InfluenzaA__AHL89630

SEQ ID NO: 107269 - RNA, 1698 nt, Artificial Sequence
  derived and/or modified CDS sequence (opt2) from hemagglutinin__InfluenzaA__AHL89642
augaaggucaagcuccucguccuccucugcaccuucaccgccaccuacgccgacaccaucugcaucggcuaccacgccaacaacuccaccgacaccgucgacaccguccucgagaagaacgucaccgucacccacuccgucaaccuccucgaggacaaccacaacggcaagcucugccuccucaagggcaucgccccccuccagcucggcaacugcuccgucgccggcuggauccucggcaaccccgagugcgagcuccucaucuccaaggaguccugguccuacaucgucgagacccccaaccccgagaacggcaccugcuaccccggcuacuucgccgacuacgaggagcuccgcgagcagcucuccuccgucuccuccuucgagcgcuucgagaucuuccccaaggaguccuccuggcccaaccacaccgucaccggcgucuccgccuccugcucccacaacggcaaguccuccuucuaccgcaaccuccucuggcucaccggcaagaacggccucuaccccaaccucuccaaguccuacgccaacaacaaggagaaggagguccucguccucuggggcguccaccacccccccaacaucggcgaccagcgcgcccucuaccacaccgagaacgccuacgucuccgucgucuccucccacuacucccgccgcuucacccccgagaucgccaagcgccccaagguccgcgaccaggagggccgcaucaacuacuacuggacccuccucgagcccggcgacaccaucaucuucgaggccaacggcaaccucaucgccccccgcuucgccuucgcccucucccgcggcuucggcuccggcaucaucaccuccaacgcccccaugggcgagugcgacgccaagugccagaccccccagggcgccaucaacuccucccuccccuuccagaacguccaccccgucaccaucggcgagugccccaaguacguccgcuccgccaagcuccgcauggucaccggccuccgcaacauccccuccauccagucccgcggccucuucggcgccaucgccggcuucaucgagggcggcuggaccggcauggucgacggcugguacggcuaccaccaccagaacgagcagggcuccggcuacgccgccgaccagaaguccacccagaacgccaucaacggcaucaccaacaaggucaacuccgucaucgagaagaugaacacccaguucaccgccgucggcaaggaguucaacaagcucgagcgccgcauggagaaccucaacaagaaggucgacgacggcuuccucgacaucuggaccuacaacgccgagcuccucguccuccucgagaacgagcgcacccucgacuuccacgacuccaacgucaagaaccucuacgagaaggucaagucccagcucaagaacaacgccaaggagaucggcaacggcugcuucgaguucuaccacaagugcaacgacgagugcauggaguccgucaagaacggcaccuacgacuaccccaaguacuccgaggaguccaagcucaaccgcgagaagaucgacggcgucaagcucgaguccaugggcgucuaccagauccucgccaucuacuccaccgucgccuccucccucguccuccucgucucccucggcgccaucuccuucuggaugugcuccaacggcucccuccagugccgcaucugcaucuga

SEQ ID NO: 107270 - RNA, 1698 nt, Artificial Sequence; identical to SEQ ID NO: 97981
  derived and/or modified CDS sequence (opt2) from hemagglutinin__InfluenzaA__AHL89654

SEQ ID NO: 107271 - RNA, 1698 nt, Artificial Sequence
  derived and/or modified CDS sequence (opt2) from hemagglutinin__InfluenzaA__AHL89666
augaaggucaagcuccucguccuccucugcaccuucaccgccaccuacgccgacaccaucugcaucggcuaccacgccaacaacuccaccgacaccgucgacaccguccucgagaagaacgucaccgucacccacuccgucaaccuccucgaggacaaccacaacggcaagcucugccuccucaagggcaucgccccccuccagcucggcaacugcuccgucgccggcuggauccucggcaaccccgagugcgagcuccucaucuccaaggaguccugguccuacaucgucgagacccccaaccccgagaacggcaccugcuaccccggcuacuucgccgacuacgaggagcuccgcgagcagcucuccuccgucuccuccuucgagcgcuucgagaucuuccccaaggaguccuccuggcccaaccacaccgucaccggcgucuccgccuccugcucccacaacggcaaguccuccuucuaccgcaaccuccucuggcucaccggcaagaacggccucuaccccaaccucuccaaguccuacgccaacaacaaggagaaggagguccucguccucuggggcguccaccacccccccaacaucggcgaccagcgcgcccucuaccacaccgagaacgccuacgucuccgucgucuccucccacuacucccgccgcuucacccccgagaucgccaagcgccccaagguccgcgaccaggagggccgcaucaacuacuacuggacccuccucgagcccggcgacaccaucaucuucgaggccaacggcaaccucaucgccccccgcuucgccuucgcccucucccgcggcuucggcuccggcaucaucaccuccaacgcccccaugggcgagugcgacgccaagugccagaccccccagggcgccaucaacuccucccuccccuuccagaacguccaccccgucaccaucggcgagugccccaaguacguccgcuccgccaagcuccgcauggucaccggccuccgcaacauccccuccauccagucccgcggccucuucggcgccaucgccggcuucaucgagggcggcuggaccggcauggucgacggcugguacggcuaccaccaccagaacgagcagggcuccggcuacgccgccgaccagaaguccacccagaacgccaucaacggcaucaccaacaaggucaacuccgucaucgagaagaugaacacccaguucaccgccgucggcaaggaguucaacaagcucgagcgccgcauggagaaccucaacaagaaggucgacgacggcuuccucgacaucuggaccuacaacgccgagcuccucguccuccucgagaacgagcgcacccucgacuuccacgacuccaacgucaagaaccucuacgagaaggucaagucccagcucaagaacaacgccgaggagaucggcaacggcugcuucgaguucuaccacaagugcaacgacgagugcauggaguccgucaagaacggcaccuacgacuaccccaaguacuccgaggaguccaagcucaaccgcgagaagaucgacggcgucaagcucgaguccaugggcgucuaccagauccucgccaucuacuccaccgucgccuccucccucguccuccucgucucccucggcgccaucuccuucuggaugugcuccaacggcucccuccagugccgcaucugcaucuga

SEQ ID NO: 107272 - RNA, 1698 nt, Artificial Sequence
  derived and/or modified CDS sequence (opt2) from hemagglutinin__InfluenzaA__AHL89678
augaaggucaagcuccucguccuccucugcaccuucaccgccaccuacgccgacaccaucugcaucggcuaccacgccaacaacuccaccgacaccgucgacaccguccucgagaagaacgucaccgucacccacuccgucaaccuccucgaggacucccacaacggcaagcucugccuccucaagggcaucgccccccuccagcucggcaacugcuccgucgccggcuggauccucggcaaccccgagugcgagcuccucaucuccaaggaguccugguccuacaucgucgagacccccaaccccgagaacggcaccugcuaccccggcuacuucgccgacuacgaggagcuccgcgagcagcucuccuccgucuccuccuucgagcgcuucgagaucuuccccaaggaguccuccuggcccaaccacaccgucaccggcgucuccgccuccugcucccacaacggcaaguccuccuucuaccgcaaccuccucuggcucaccggcaagaacggccucuaccccaaccucuccaaguccuacgccaacaacaaggagaaggagguccucguccucuggggcguccaccacccccccaacaucggcgaccagcgcgcccucuaccacaccgagaacgccuacgucuccgucgucuccucccacuacucccgccgcuucacccccgagaucgccaagcgccccaagguccgcgaccaggagggccgcaucaacuacuacuggacccuccucgagcccggcgacaccaucaucuucgaggccaacggcaaccucaucgccccccgcuucgccuucgcccucucccgcggcuucggcuccggcaucaucaccuccaacgcccccaugggcgagugcgacgccaagugccagaccccccagggcgccaucaacuccucccuccccuuccagaacguccaccccgucaccaucggcgagugccccaaguacguccgcuccgccaagcuccgcauggucaccggccuccgcaacauccccuccauccagucccgcggccucuucggcgccaucgccggcuucaucgagggcggcuggaccggcauggucgacggcugguacggcuaccaccaccagaacgagcagggcuccggcuacgccgccgaccagaaguccacccagaacgccaucaacggcaucaccaacaaggucaacuccgucaucgagaagaugaacacccaguucaccgccgucggcaaggaguucaacaagcucgagcgccgcauggagaaccucaacaagaaggucgacgacggcuuccucgacaucuggaccuacaacgccgagcuccucguccuccucgagaacgagcgcacccucgacuuccacgacuccaacgucaagaaccucuacgagaaggucaagucccagcucaagaacaacgccaaggagaucggcaacggcugcuucgaguucuaccacaagugcaacgacgagugcauggaguccgucaagaacggcaccuacgacuaccccaaguacuccgaggaguccaagcucaaccgcaagaagaucgacggcgucaagcucgaguccaugggcgucuaccagauccucgccaucuacuccaccgucgccuccucccucguccuccucgucucccucggcgccaucuccuucuggaugugcuccaacggcucccuccagugccgcaucugcaucuga

SEQ ID NO: 107273 - RNA, 1698 nt, Artificial Sequence
  derived and/or modified CDS sequence (opt2) from hemagglutinin__InfluenzaA__AHL89690
augaaggucaagcuccucguccuccucugcaccuucaccgccaccuacgccgacaccaucugcaucggcuaccacgccaacaacuccaccgacaccgucgacaccguccucgagaagaacgucaccgucacccacuccgucaaccuccucgaggacucccacaacggcaagcucugccuccucaagggcaucgccccccuccagcucggcaacugcuccgucgccggcuggauccucggcaaccccgagugcgagcuccucaucuccaaggaguccugguccuacaucgucgagaagcccgaccccgagaacggcaccugcuaccccggccacuucgccgacuacgaggagcuccgcgagcagcucuccuccgucuccuccuucgagcgcuucgagaucuuccccaaggaguccuccuggcccaaccacaccgucaccggcgucuccgccuccugcucccacaacggcaaguccuccuucuacaagaaccuccucuggcucaccggcaagaacggccucuaccccaaccucuccaaguccuacgccaacaacaaggagaaggagguccucguccucuggggcguccaccacccccccaacaucggcgaccagaaggcccucuaccacaccgagaacgccuacgucuccgucgucuccucccacuacucccgcaaguucacccccgagaucgccaagcgccccaagguccgcgaccaggagggccgcaucaacuacuacuggacccuccucgagcccggcgacaccaucaucuucgaggccaacggcaaccucaucgccccccgcuacgccuucgcccucucccgcggcuucggcuccggcaucaucaacuccaacgcccccauggacaagugcgacgccaagugccagaccccccagggcgccaucaacuccucccuccccuuccagaacguccaccccgucaccaucggcgagugccccaaguacguccgcuccgccaagcuccgcauggucaccggccuccgcaacauccccuccauccagucccgcggccucuucggcgccaucgccggcuucaucgagggcggcuggaccggcauggucgacggcugguacggcuaccaccaccagaacgagcagggcuccggcuacgccgccgaccagaaguccacccagaacgccaucaacggcaucaccaacaaggucaacuccgucaucgagaagaugaacacccaguucaccgccgucggcaaggaguucaacaagcucgagcgccgcauggagaaccucaacaagaaggucgacgacggcuucaucgacaucuggaccuacaacgccgagcuccucguccuccucgagaacgagcgcacccucgacuuccacgacuccaacgucaagaaccucuacgagaaggucaagucccagcucaagaacaacgccaaggagaucggcaacggcugcuucgaguucuaccacaagugcaacgacgagugcauggaguccgucaagaacggcaccuacgacuaccccaaguacuccgaggaguccaagcucaaccgcgagaagaucgacggcgucaagcucgaguccaugggcgucuaccagauccucgccaucuacuccaccgucgccuccucccucguccuccucgucucccucggcgccaucuccuucuggaugugcuccaacggcucccuccagugccgcaucugcaucuga

SEQ ID NO: 107274 - RNA, 1698 nt, Artificial Sequence; identical to SEQ ID NO: 97981
  derived and/or modified CDS sequence (opt2) from hemagglutinin__InfluenzaA__AHL89702

SEQ ID NO: 107275 - RNA, 1698 nt, Artificial Sequence; identical to SEQ ID NO: 97950
  derived and/or modified CDS sequence (opt2) from hemagglutinin__InfluenzaA__AHL89714

SEQ ID NO: 107276 - RNA, 1698 nt, Artificial Sequence
  derived and/or modified CDS sequence (opt2) from hemagglutinin__InfluenzaA__AHL89726
augaaggucaagcuccucguccuccucugcaccuucaccgccaccuacgccgacaccaucugcaucggcuaccacgccaacaacuccaccgacaccgucgacaccguccucgagaagaacgucaccgucacccacuccgucaaccuccucgaggacucccacaacggcaagcucugccuccucaagggcaucgccccccuccagcucggcaacugcuccgucgccggcuggauccucggcaaccccgagugcgagcuccucaucuccaaggaguccugguccuacaucgucgagacccccaaccccgagaacggcaccugcuaccccggcuacuucgccgacuacgaggagcuccgcgagcagcucuccuccgucuccuccuucgagcgcuucgagaucuuccccaaggaguccuccuggcccaaccacaccgucaccggcgucuccgccuccugcucccacaacggcaaguccuccuucuaccgcaaccuccucuggcucaccggcaagaacggccucuaccccaaccucuccaaguccuacgccaacaacaaggagaaggagguccucguccucuggggcguccaccacccccccaacaucggcgaccagaaggcccucuaccacaccgagaacgccuacgucuccgucgucuccucccacuacucccgccgcuucacccccgagaucgccaagcgccccaagguccgcgaccaggagggccgcaucaacuacuacuggacccuccucgagcccggcgacaccaucaucuucgaggccaacggcaaccucaucgccccccgcuucgccuucgcccucucccgcggcuucggcuccggcaucaucaccuccaacgcccccauggacgagugcgacgccaagugccagaccccccagggcgccaucaacuccucccuccccuuccagaacguccaccccgucaccaucggcgagugccccaaguacguccgcuccaccaagcuccgcauggucaccggccuccgcaacauccccuccauccagucccgcggccucuucggcgccaucgccggcuucaucgagggcggcuggaccggcauggucgacggcugguacggcuaccaccaccagaacgagcagggcuccggcuacgccgccgaccagaaguccacccagaacgccaucaacggcaucaccaacaaggucaacuccgucaucgagaagaugaacacccaguucaccgccgucggcaaggaguucaacaagcucgagcgccgcauggagaaccucaacaagaaggucgacgacggcuuccucgacaucuggaccuacaacgccgagcuccucguccuccucgagaacgagcgcacccucgacuuccacgacuccaacgucaagaaccucuacgagaaggucaagucccagcucaagaacaacgccaaggagaucggcaacggcugcuucgaguucuaccacaagugcaacgacgagugcauggaguccgucaagaacggcaccuacgacuaccccaaguacuccgaggaguccaagcucaaccgcgagaagaucgacggcgucaagcucgaguccaugggcgucuaccagauccucgccaucuacuccaccgucgccuccucccucguccuccucgucucccucggcgccaucuccuucuggaugugcuccaacggcucccuccagugccgcaucugcaucuga

SEQ ID NO: 107277 - RNA, 1698 nt, Artificial Sequence
  derived and/or modified CDS sequence (opt2) from hemagglutinin__InfluenzaA__AHL89750
augaaggucaagcuccucguccuccucugcaccuucaccgccaccuacgccgacaccaucugcaucggcuaccacgccaacaacuccaccgacaccgucgacaccguccucgagaagaacgucaccgucacccacuccgucaaccuccucgaggacucccacaacggcaagcucugccuccucaagggcaucgccccccuccagcucggcaacugcuccgucgccggcuggauccucggcaaccccgagugcgagcuccucaucuccaaggaguccugguccuacaucgucgagacccccaaccccgagaacggcaccugcuaccccggcuacuucgccgacuacgaggagcuccgcgagcagcucuccuccgucuccuccuucgagcgcuucgagaucuuccccaaggaguccuccuggcccaaccacaccgucaccggcgucuccgccuccugcucccacaacggcaaguccuccuucuaccgcaaccuccucuggcucaccggcaagaacggccucuaccccaaccucuccaaguccuacgccaacaacaaggagaaggagguccucguccucuggggcguccaccacccccccaacaucggcgaccagcgcgcccucuaccacaccgagaacgccuacgucuccgucgucuccucccacuacucccgccgcuucacccccgagaucgccaagcgccccaagguccgcgaccaggagggccgcaucaacuacuacuggacccuccucgagcccggcgacaccaucaucuucgaggccaacggcaaccucaucgccccccgcuucgccuucgcccucucccgcggcuucggcuccggcaucaucaccuccaacgcccccauggacggcugcgacgccaagugccagaccccccagggcgccaucaacuccucccuccccuuccagaacguccaccccgucaccaucggcgagugccccaaguacguccgcuccaccaagcuccgcauggucaccggccuccgcaacauccccuccauccagucccgcggccucuucggcgccaucgccggcuucaucgagggcggcuggaccggcauggucgacggcugguacggcuaccaccaccagaacgagcagggcuccggcuacgccgccgaccagaaguccacccagaacgccaucaacggcaucaccaacaaggucaacuccgucaucgagaagaugaacacccaguucaccgccgucggcaaggaguucaacaagcucgagcgccgcauggagaaccucaacaagaaggucgacgacggcuuccucgacaucuggaccuacaacgccgagcuccucguccuccucgagaacgagcgcacccucgacuuccacgacuccaacgucaagaaccucuacgagaaggucaagucccagcucaagaacaacgccaaggagaucggcaacggcugcuucgaguucuaccacaagugcaacgacgagugcauggaguccgucaagaacggcaccuacgacuaccccaaguacuccgaggaguccaagcucaaccgcgagaagaucgacggcgucaagcucgaguccaugggcgucuaccagauccucgccaucuacuccaccgucgccuccucccucguccuccucgucucccucggcgccaucuccuucuggaugugcuccaacggcucccuccagugccgcaucugcaucuga

SEQ ID NO: 107278 - RNA, 1698 nt, Artificial Sequence; identical to SEQ ID NO: 97946
  derived and/or modified CDS sequence (opt2) from hemagglutinin__InfluenzaA__AHL89762

SEQ ID NO: 107279 - RNA, 1698 nt, Artificial Sequence; identical to SEQ ID NO: 97992
  derived and/or modified CDS sequence (opt2) from hemagglutinin__InfluenzaA__AHL89774

SEQ ID NO: 107280 - RNA, 1698 nt, Artificial Sequence; identical to SEQ ID NO: 97981
  derived and/or modified CDS sequence (opt2) from hemagglutinin__InfluenzaA__AHL89786

SEQ ID NO: 107281 - RNA, 1698 nt, Artificial Sequence
  derived and/or modified CDS sequence (opt2) from hemagglutinin__InfluenzaA__AHL89798
augaaggucaagcuccucguccuccucugcaccuucaccgccaccuacgccgacaccaucugcaucggcuaccacgccaacaacuccaccgacaccgucgacaccguccucgagaagaacgucaccgucacccacuccgucaaccuccucgaggaccgccacaacggcaagcucugccuccucaagggcaucgccccccuccagcucggcaacugcuccgucgccggcuggauccucggcaaccccgagugcgagcuccucaucuccaaggaguccugguccuacaucgucgagacccccaaccccgagaacggcaccugcuaccccggcuacuucgccgacuacgaggagcuccgcgagcagcucuccuccgucuccuccuucgagcgcuucgagaucuuccccaaggaguccuccuggcccaaccacaccgucaccggcgucuccgccuccugcucccacaacggcaaguccuccuucuaccgcaaccuccucuggcucaccggcaagaacggccucuaccccaaccucucccgcuccuacgccaacaacaaggagaaggagguccucguccucuggggcguccaccacccccccuccaucggcgaccagcgcgcccucuaccacaccgagaacgccuacgucuccgucgucuccucccacuacucccgccgcuucacccccgagaucgccaagcgccccaagguccgcgaccaggagggccgcaucaacuacuacuggacccuccucgagcccggcgacaccaucaucuucgaggccaacggcaaccucaucgccccccgcuucgccuucgcccucucccgcggcuucggcuccggcaucaucaccuccaacgcccccauggacgagugcgacgccaagugccagaccccccagggcgccaucaacuccucccuccccuuccagaacguccaccccgucaccaucggcgagugccccaaguacguccgcuccgccaagcuccgcauggucaccggccuccgcaacauccccuccauccagucccgcggccucuucggcgccaucgccggcuucaucgagggcggcuggaccggcauggucgacggcugguacggcuaccaccaccagaacgagcagggcuccggcuacgccgccgaccagaaguccacccagaacgccaucaacggcaucaccaacaaggucaacuccgucaucgagaagaugaacacccaguucaccgccgucggcaaggaguucaacaagcucgagcgccgcauggagaaccucaacaagaaggucgacgacggcuuccucgacaucuggaccuacaacgccgagcuccucguccuccucgagaacgagcgcacccucgacuuccacgacuccaacgucaagaaccucuacgagaaggucaagucccagcucaagaacaacgccaaggagaucggcaacggcugcuucgaguucuaccacaagugcaacgacgagugcauggaguccgucaagaacggcaccuacgacuaccccaaguacuccgaggaguccaagcucaaccgcgagaagaucgacggcgucaagcucgaguccaugggcgucuaccagauccucgccaucuacuccaccgucgccuccucccucguccuccucgucucccucggcgccaucuccuucuggaugugcuccaacggcucccuccagugccgcaucugcaucuga

SEQ ID NO: 107282 - RNA, 1698 nt, Artificial Sequence
  derived and/or modified CDS sequence (opt2) from hemagglutinin__InfluenzaA__AHL89810
augaaggucaagcuccucguccuccucugcaccuucaccgccaccuacgccgacaccaucugcaucggcuaccacgccaacaacuccaccgacaccgucgacaccguccucgagaagaacgucaccgucacccacuccgucaaccuccucgaggacucccacaacggcaagcucugccuccucaagggcaucgccccccuccagcucggcaacugcuccgucgccggcuggauccucggcaaccccgagugcgagcuccucaucuccaaggaguccugguccuacaucgucgagacccccaaccccgagaacggcaccugcuaccccggcuacuucgccgacuacgaggagcuccgcgagcagcucuccuccgucuccuccuucgagcgcuucgagaucuuccccaaggaguccuccuggcccaaccacaccgucaccggcgucuccgccuccugcucccacaacggcaaguccuccuucuaccgcaaccuccucuggcucaccggcaagaacggccucuaccccaaccucuccaaguccuacgccaacaacaaggagaaggagguccucguccucuggggcguccaccacccccccaacaucggcgaccagcgcgcccucuaccacaccgagaacgccuacgucuccgucgucuccucccacuacucccgccgcuucacccccgagaucgccaagcgccccaagguccgcgaccaggagggccgcaucaacuacuacuggacccuccucgagcccggcgacaccaucaucuucgaggccaacggcaaccucaucgccccccgcuucgccuucgcccucucccgcggcuucggcuccggcaucaucaccuccaacgcccccaugggcgagugcgacgccgagugccagaccccccagggcgccaucaacuccucccuccccuuccagaacguccaccccgucaccaucggcgagugccccaaguacguccgcuccgccaagcuccgcauggucaccggccuccgcaacauccccuccauccagucccgcggccucuucggcgccaucgccggcuucaucgagggcggcuggaccggcauggucgacggcugguacggcuaccaccaccagaacgagcagggcuccggcuacgccgccgaccagaaguccacccagaacgccaucaacggcaucaccaacaaggucaacuccgucaucgagaagaugaacacccaguucaccgccgucggcaaggaguucaacaagcucgagcgccgcauggagaaccucaacaagaaggucgacgacggcuuccucgacaucuggaccuacaacgccgagcuccucguccuccucgagaacgagcgcacccucgacuuccacgacuccaacgucaagaaccucuacgagaaggucaagucccagcucaagaacaacgccaaggagaucggcaacggcugcuucgaguucuaccacaagugcaacgacgagugcauggaguccgucaagaacggcaccuacgacuaccccaaguacuccgaggaguccaagcucaaccgcgagaagaucgacggcgucaagcucgaguccaugggcgucuaccagauccucgccaucuacuccaccgucgccuccucccucguccuccucgucucccucggcgccaucuccuucuggaugugcuccaacggcucccuccagugccgcaucugcaucuga

SEQ ID NO: 107283 - RNA, 1698 nt, Artificial Sequence
  derived and/or modified CDS sequence (opt2) from hemagglutinin__InfluenzaA__AHL89822
augaaggucaagcuccucguccuccucugcaccuucaccgccaccuacgccgacaccaucugcaucggcuaccacgccaacaacuccaccgacaccgucgacaccguccucgagaagaacgucaccgucacccacuccgucaaccuccucgaggaccgccacaacggcaagcucugccuccucaagggcaucgccccccuccagcucggcaacugcuccgucgccggcuggauccucggcaaccccgagugcgagcuccucaucuccaaggaguccugguccuacaucgucgagacccccaaccccgagaacggcaccugcuaccccggcuacuucgccgacuacgaggagcuccgcgagcagcucuccuccgucuccuccuucgagcgcuucgagaucuuccccaaggaguccuccuggcccaaccacaccgucaccggcgucuccgccuccugcucccacaacggcaaguccuccuucuaccgcaaccuccucuggcucaccggcaagaacggccucuaccccaaccucuccaaguccuacgccaacaacaaggagaaggagguccucguccucuggggcguccaccacccccccaacaucggcgaccagcgcgcccucuaccacaccgagaacgccuacgucuccgucgucuccucccacuacucccgccgcuucacccccgagaucgccaagcgccccaagguccgcgaccaggagggccgcaucaacuacuacuggacccuccucgagcccggcgacaccaucaucuucgaggccaacggcaaccucaucgccccccgcuucgccuucgcccucucccgcggcuucggcuccggcaucaucaccuccaacgcccccauggacgagugcgacgccaagugccagaccccccagggcgccaucaacuccucccuccccuuccagaacguccaccccgucaccaucggcgagugccccaaguacguccgcuccgccaagcuccgcauggucaccggccuccgcaacauccccuccauccagucccgcggccucuucggcgccaucgccggcuucaucgagggcggcuggaccggcauggucgacggcugguacggcuaccaccaccagaacgagcagggcuccggcuacgccgccgaccagaaguccacccagaacgccaucaacggcaucaccaacaaggucaacuccgucaucgagaagaugaacacccaguucaccgccgucggcaaggaguucaacaagcucgagcgccgcauggagaaccucaacaagaaggucgacgacggcuuccucgacaucuggaccuacaacgccgagcuccucguccuccucgagaacgagcgcacccucgacuuccacgacuccaacgucaagaaccucuacgagaaggucaagucccagcucaagaacaacgccaaggagaucggcaacggcugcuucgaguucuaccacaagugcaacgacgagugcauggaguccgucaagaacggcaccuacgacuaccccaaguacuccgaggaguccaagcucaaccgcgagaagaucgacggcgucaagcucgaguccaugggcgucuaccagauccucgccaucuacuccaccgucgccuccucccucguccuccucgucucccucggcgccaucuccuucuggaugugcuccaacggcucccuccagugccgcaucugcaucuga

SEQ ID NO: 107284 - RNA, 1698 nt, Artificial Sequence
  derived and/or modified CDS sequence (opt2) from hemagglutinin__InfluenzaA__AHL89834
augaaggucaagcuccucguccuccucugcaccuucaccgccaccuacgccgacaccaucugcaucggcuaccacgccaacaacuccaccgacaccgucgacaccguccucgagaagaacgucaccgucacccacuccgucaaccuccucgaggacucccacaacggcaagcucugccuccucaagggcaucgccccccuccagcucggcaacugcuccgucgccggcuggauccucggcaaccccgagugcgagcuccucaucuccaaggaguccugguccuacaucgucgagacccccaaccccgagaacggcaccugcuaccccggcaacuucgccgacuacgaggagcuccgcgagcagcucuccuccgucuccuccuucgagcgcuucgagaucuuccccaaggaguccuccuggcccaaccacaccgucaccggcgucuccgccuccugcucccacaacggcaaguccuccuucuaccgcaaccuccucuggcucaccggcaagaacggccucuaccccaaccucuccaaguccuacgccaacaacaaggagaaggagguccucguccucuggggcguccaccacccccccaacaucggcgaccagcgcgcccucuaccacaccgagaacgccuacgucuccgucgucuccucccacuacucccgccgcuucacccccgagaucgccaagcgccccaagguccgcgaccaggagggccgcaucaacuacuacuggacccuccucgagcccggcgacaccaucaucuucgaggccaacggcaaccucaucgccccccgcuucgccuucgcccucucccgcggcuucggcuccggcaucaucaccuccaacgcccccauggacgagugcgacgccaagugccagaccccccagggcgccaucaacuccucccuccccuuccagaacguccaccccgucaccaucggcgagugccccaaguacguccgcuccgccaagcuccgcauggucaccggccuccgcaacauccccuccauccagucccgcggccucuucggcgccaucgccggcuucaucgagggcggcuggaccggcauggucgacggcugguacggcuaccaccaccagaacgagcagggcuccggcuacgccgccgaccagaaguccacccagaacgccaucaacggcaucaccaacaaggucaacuccgucaucgagaagaugaacacccaguucaccgccgucggcaaggaguucaacaagcucgagcgccgcauggagaaccucaacaagaaggucgacgacggcuuccucgacaucuggaccuacaacgccgagcuccucguccuccucgagaacgagcgcacccucgacuuccacgacuccaacgucaagaaccucuacgagaaggucaagucccagcucaagaacaacgccaaggagaucggcgacggcugcuucgaguucuaccacaagugcaacgacgagugcauggaguccgucaagaacggcaccuacgacuaccccaaguacuccgaggaguccaagcucaaccgcgagaagaucgacggcgucaagcucgaguccaugggcgucuaccagauccucgccaucuacuccaccgucgccuccucccucguccuccucgucucccucggcgccaucuccuucuggaugugcuccaacggcucccuccagugccgcaucugcaucuga

SEQ ID NO: 107285 - RNA, 1698 nt, Artificial Sequence; identical to SEQ ID NO: 97992
  derived and/or modified CDS sequence (opt2) from hemagglutinin__InfluenzaA__AHL89846

SEQ ID NO: 107286 - RNA, 1701 nt, Artificial Sequence; identical to SEQ ID NO: 97964
  derived and/or modified CDS sequence (opt2) from hemagglutinin__InfluenzaA__AHL89858

SEQ ID NO: 107287 - RNA, 1701 nt, Artificial Sequence; identical to SEQ ID NO: 97964
  derived and/or modified CDS sequence (opt2) from hemagglutinin__InfluenzaA__AHL89870

SEQ ID NO: 107288 - RNA, 1701 nt, Artificial Sequence
  derived and/or modified CDS sequence (opt2) from hemagglutinin__InfluenzaA__AHL89882
augaagaccaucaucgcccucuccuacauccucugccucgucuucgcccagaagcuccccggcaacgacaacuccaccgccacccucugccucggccaccacgccguccccaacggcaccaucgucaagaccaucaccaacgaccagaucgaggucaccaacgccaccgagcucguccaguccuccuccaccggcggcaucugcgacuccccccaccagauccucgacggcgagaacugcacccucaucgacgcccuccucggcgacccccagugcgacggcuuccagaacaagaagugggaccucuucgucgagcgcuccaaggccuacuccaacugcuaccccuacgacguccccgacuacgccucccuccgcucccucgucgccuccuccggcacccucgaguucaacaacgaguccuucaacuggaccggcgucacccagaacggcaccuccuccgccugcaagcgcggcuccgacaacuccuucuucucccgccucaacuggcucacccaccucaaguucaaguaccccgcccucaacgucaccaugcccaacaacgagaaguucgacaagcucuacaucuggggcguccaccaccccggcaccgacaacgaccagaucuuccucuacgcccaggccuccggccgcaucaccgucuccaccaagcgcucccagcagaccgucauccccaacaucggcucccgcccccgcguccgcaacauccccucccgcaucuccaucuacuggaccaucgucaagcccggcgacauccuccucaucaacuccaccggcaaccucaucgccccccgcggcuacuucaagauccgcuccggcaaguccuccaucaugcgcuccgacgcccccaucggcaagugcaacuccgagugcaucacccccaacggcuccauccccaacgacaagcccuuccagaacgucaaccgcaucaccuacggcgccugcccccgcuacgucaagcagaacacccucaagcucgccaccggcaugcgcaacguccccgagaagcagacccgcggcaucuucggcgccaucgccggcuucaucgagaacggcugggagggcauggucgacggcugguacggcuuccgccaccagaacuccgagggcaucggccaggccgccgaccucaaguccacccaggccgccaucaaccagaucaacggcaagcucaaccgccucaucggcaagaccaacgagaaguuccaccagaucgagaaggaguucuccgaggucgagggccgcauccaggaccucgagaaguacgucgaggacaccaagaucgaccucugguccuacaacgccgagcuccucgucgcccucgagaaccagcacaccaucgaccucaccgacuccgagaugaacaagcucuucgagcgcaccaagaagcagcuccgcgagaacgccgaggacaugggcaacggcugcuucaagaucuaccacaagugcgacaacgccugcaucggcuccauccgcaacggcaccuacgaccacgacgucuaccgcgacgaggcccucaacaaccgcuuccagaucaagggcgucgagcucaaguccggcuacaaggacuggauccucuggaucuccuucgccaucuccugcuuccuccucugcgucgcccuccucggcuucaucaugugggccugccagaagggcaacauccgcugcaacaucugcaucuga

SEQ ID NO: 107289 - RNA, 1701 nt, Artificial Sequence; identical to SEQ ID NO: 97964
  derived and/or modified CDS sequence (opt2) from hemagglutinin__InfluenzaA__AHL89894

SEQ ID NO: 107290 - RNA, 1701 nt, Artificial Sequence
  derived and/or modified CDS sequence (opt2) from hemagglutinin__InfluenzaA__AHL89906
augaagaccaucaucgcccucuccuacauccucugccucgucuacgcccagaagcuccccggcaucgacaacuccaccgccacccucugccucggccaccacgccguccccaacggcaccaucgucaagaccaucaccaacgaccagaucgaggucaccaacgccaccgagcucguccaguccuccuccaccggcgagaucugcgacuccccccaccagauccucgacggcgagaacugcacccucaucgacgcccuccucggcgacccccagugcgacggcuuccagaacaagaagugggaccucuucgucgagcgcuccaaggccuacuccaacugcuaccccuacgacguccccgacuacgccucccuccgcucccucgucgccuccuccggcacccucgaguucaacaacgaguccuucaacugggccggcgucacccagaacggcaccuccuccgccugcaagcgcggcuccaacaacuccuucuucucccgccucaacuggcucacccacuccaaguucaaguaccccgcccucaacgucaccaugcccaacaacgaggaguucgacaagcucuacaucuggggcguccaccaccccggcaccgacaacgaccagaucuuccucuacgcccaggccuccggccgcaucaccgucuccaccaagcgcucccagcagaccgucauccccaacaucggcucccgcccccgcguccgcaacauccccucccgcaucuccaucuacuggaccaucgucaagcccggcgacauccuccucaucaacuccaccggcaaccucaucgccccccgcggcuacuucaagauccgcuccggcaaguccuccaucaugcgcuccgacgcccccaucggcaagugcaacuccgagugcaucacccccaacggcuccauccccaacgacaagcccuuccagaacgucaaccgcaucaccuacggcgccugcccccgcuacguccgccagaacacccucaagcucgccaccggcaugcgcaacguccccgagaagcagacccgcggcaucuucggcgccaucgccggcuucaucgagaacggcugggagggcauggucgacggcugguacggcuuccgccaccagaacuccgagggcaucggccaggccgccgaccucaaguccacccaggccgccaucgaccagaucaacggcaagcucaaccgccucaucggcaagaccaacgagaaguuccaccagaucgagaaggaguucuccgaggucgagggccgcauccaggaccucgagaaguacgucgaggacaccaagaucgaccucugguccuacaacgccgagcuccucgucgcccucgagaaccagcacaccaucgaccucaccgacuccgagaugaacaagcucuucgagaagaccaagaagcagcuccgcgagaacgccgaggacaugggcaacggcugcuucaagaucuaccacaagugcgacaacgccugcaucggcuccauccgcaacggcaccuacgaccacgacgucuaccgcgacgaggcccucaacaaccgcuuccagaucaagggcgucgagcucaaguccggcuacaaggacuggauccucuggaucuccuucgccaucuccugcuuccuccucugcgucgcccuccucggcuucaucaugugggccugccagaagggcaacauccgcugcaacaucugcaucuga

SEQ ID NO: 107291 - RNA, 1701 nt, Artificial Sequence
  derived and/or modified CDS sequence (opt2) from hemagglutinin__InfluenzaA__AHL89918
augaagaccaucaucgcccucuccuacauccucugccucgucuucgcccagaagcuccccggcaacgacaacuccaccgccacccucugccucggccaccacgccguccccaacggcaccaucgucaagaccaucaccaacgaccagaucgaggucaccaacgccaccgagcucguccaguccuccuccaccggcgagaucugcgacuccccccaccagauccucgacggcgagaacugcacccucaucgacgcccuccucggcgacccccagugcgacggcuuccagaacaagaagugggaccucuucgucgagcgcuccaaggccuacuccaacugcuaccccuacgacguccccgacuacgccucccuccgcucccucgucgccuccuccggcacccucgaguucaacaacgaguccuucaacuggaccggcgucacccagaacggcaccuccuccgccugcauccgccgcuccaacaacuccuucuucucccgccucaacuggcucacccaccucaaguucaaguaccccgcccucaacgucaccaugcccaacaacgagaaguucgacaagcucuacaucuggggcguccaccaccccggcaccgacaacgaccagaccuuccucuacgcccaggccuccggccgcaucaccgucuccaccaagcgcucccagcagaccgucauccccaacaucggcucccgcccccgcguccgcaacauccccucccgcaucuccaucuacuggaccaucgucaagcccggcgacauccuccucaucaacuccaccggcaaccucaucgccccccgcggcuacuucaagauccaguccggcaaguccuccaucaugcgcuccgacgcccccaucggcaagugcaacuccgagugcaucacccccaacggcuccauccccaacgacaagcccuuccagaacgucaaccgcaucaccuacggcgccugcccccgcuacgucaagcagaacacccucaagcucgccaccggcaugcgcaacguccccgagaagcagacccgcggcaucuucggcgccaucgccggcuucaucgagaacggcugggagggcauggucgacggcugguacggcuuccgccaccagaacuccgagggcaucggccaggccgccgaccucaaguccacccaggccgccaucgaccagaucaacggcaagcucaaccgccucaucggcaagaccaacgagaaguuccaccagaucgagaaggaguucuccgaggucgagggccgcauccaggaccucgagaaguacgucgaggacaccaagaucgaccucugguccuacaacgccgagcuccucgucgcccucgagaaccagcacaccaucgaccucaccgacuccgagaugaacaagcucuucgagaagaccaagaagcagcuccgcgagaacgccgaggacaugggcaacggcugcuucaagaucuaccacaagugcgacaacgccugcaucggcuccauccgcaacggcaccuacgaccacgacgucuaccgcgacgaggcccucaacaaccgcuuccagaucaagggcgucgagcucaaguccggcuacaaggacuggauccucuggaucuccuucgccaucuccugcuuccuccucugcgucgcccuccucggcuucaucaugugggccugccagaagggcaacauccgcugcaacaucugcaucuga

SEQ ID NO: 107292 - RNA, 1701 nt, Artificial Sequence
  derived and/or modified CDS sequence (opt2) from hemagglutinin__InfluenzaA__AHL89930
augaagaccaucaucgcccucuccuacauccucugccucgucuucgcccagaagcuccccggcaucgacaacuccaccgccacccucugccucggccaccacgccguccccaacggcaccaucgucaagaccaucaccaacgaccagaucgaggucaccaacgccaccgagcucguccaguccuccuccaccggcggcaucugcgacuccccccaccagauccucgacggcgagaacugcacccucaucgacgcccuccucggcgacccccagugcgacggcuuccagaacaagaagugggaccucuucgucgagcgcuccaaggccuacuccaacugcuaccccuacgacguccccgacuacgccucccuccgcucccucgucgccuccuccggcacccucgaguucaacaacgaguccuucaacugggccggcgucacccagaacggcaccuccuccgccugcaagcgcggcuccaacaacuccuucuucucccgccucaacuggcucacccacuccaaguucaaguaccccgcccucaacgucaccaugcccaacaacgaggaguucgacaagcucuacaucuggggcguccaccaccccggcaccgacaacgaccagaucuuccucuacgcccaggccuccggccgcaucaccgucuccaccaagcgcucccagcagaccgucauccccaacaucggcucccgcccccgcguccgcaacauccccucccgcaucuccaucuacuggaccaucgucaagcccggcgacauccuccucaucaacuccaccggcaaccucaucgccccccgcggcuacuucaagauccgcuccggcaaguccuccaucaugcgcuccgacgcccccaucuccaagugcaacuccgagugcaucacccccaacggcuccauccccaacgacaagcccuuccagaacgucaaccgcaucaccuacggcgccugcccccgcuacgucaagcagaacacccucaagcucgccaccggcaugcgcaacguccccgagaagcagacccgcggcaucuucggcgccaucgccggcuucaucgagaacggcugggagggcauggucgacggcugguacggcuuccgccaccagaacuccgagggcaugggccaggccgccgaccucaaguccacccaggccgccaucgaccagaucaacggcaagcucaaccgccucaucggcaagaccaacgagaaguuccaccagaucgagaaggaguucuccgaggucgagggccgcauccaggaccucgagaaguacgucgaggacaccaagaucgaccucugguccuacaacgccgagcuccucgucgcccucgagaaccagcacaccaucgaccucaccgacuccgagaugaacaagcucuucgagaagaccaagaagcagcuccgcgagaacgccgaggacaugggcaacggcugcuucaagaucuaccacaagugcgacaacgccugcaucggcuccauccgcaacggcaccuacgaccacgacgucuaccgcgacgaggcccucaacaaccgcuuccagaucaagggcgucgagcucaaguccggcuacaaggacuggauccucuggaucuccuucgccaucuccugcuuccuccucugcgucgcccuccucggcuucaucaugugggccugccagaagggcaacauccgcugcaacaucugcaucuga

SEQ ID NO: 107293 - RNA, 1701 nt, Artificial Sequence; identical to SEQ ID NO: 97951
  derived and/or modified CDS sequence (opt2) from hemagglutinin__InfluenzaA__AHL89942

SEQ ID NO: 107294 - RNA, 1701 nt, Artificial Sequence
  derived and/or modified CDS sequence (opt2) from hemagglutinin__InfluenzaA__AHL89954
augaagaccaucaucgcccucuccuacauccucugccucgucuucgcccagaagcuccccggcaacgacaacuccaccgccacccucugccucggccaccacgccguccccaacggcaccaucgucaagaccaucaccaacgaccagaucgaggucaccaacgccaccgagcucguccaguccuccuccaccggcgagaucugcgacuccccccaccagauccucgacggcgagaacugcacccucaucgacgcccuccucggcgacccccagugcgacggcuuccagaacaagaagugggaccucuucgucgagcgcuccaaggccuacuccaacugcuaccccuacgacguccccgaccacgccucccuccgcucccucgucgccuccuccggcacccucgaguucaacaacgaguccuucaacuggaccggcgucacccagaacggcaccuccuccgccugcauccgccgcuccaacaacuccuucuucucccgccucaacuggcucacccaccucaaguucaaguaccccgcccucaacgucaccaugcccaacaacgagaaguucgacaagcucuacaucuggggcguccaccaccccggcaccgacaacgaccagaucuuccucuacgcccaggccuccggccgcaucaccgucuccaccaagcgcucccagcagaccgucauccccaacaucggcucccgcccccgcguccgcaacauccccucccgcaucuccaucuacuggaccaucgucaagcccggcgacauccuccucaucaacuccaccggcaaccucaucgccccccgcggcuacuucaagauccgcuccggcaaguccuccaucaugcgcuccgacgcccccaucggcaagugcaacuccgagugcaucacccccaacggcuccauccccaacgacaagcccuuccagaacgucaaccgcaucaccuacggcgccugcccccgcuacgucaagcagaacacccucaagcucgccaccggcaugcgcaacguccccgagaagcagacccgcggcaucuucggcgccaucgccggcuucaucgagaacggcugggagggcauggucgacggcugguacggcuuccgccaccagaacuccgagggcaucggccaggccgccgaccucaaguccacccaggccgccaucgaccagaucaacggcaagcucaaccgccucaucggcaagaccaacgagaaguuccaccagaucgagaaggaguucuccgaggucgagggccgcauccaggaccucgagaaguacgucgaggacaccaagaucgaccucugguccuacaacgccgagcuccucgucgcccucgagaaccagcacaccaucgaccucaccgacuccgagaugaacaagcucuucgagaagaccaagaagcagcuccgcgagaacgccgaggacaugggcaacggcugcuucaagaucuaccacaagugcgacaacgccugcaucggcuccauccgcaacggcaccuacgaccacgacgucuaccgcgacgaggcccucaacaaccgcuuccagaucaagggcgucgagcucaaguccggcuacaaggacuggauccucuggaucuccuucgccaucuccugcuuccuccucugcgucgcccuccucggcuucaucaugugggccugccagaagggcaacauccgcugcaacaucugcaucuga

SEQ ID NO: 107295 - RNA, 1701 nt, Artificial Sequence; identical to SEQ ID NO: 97964
  derived and/or modified CDS sequence (opt2) from hemagglutinin__InfluenzaA__AHL89966

SEQ ID NO: 107296 - RNA, 1701 nt, Artificial Sequence; identical to SEQ ID NO: 97964
  derived and/or modified CDS sequence (opt2) from hemagglutinin__InfluenzaA__AHL89978

SEQ ID NO: 107297 - RNA, 1701 nt, Artificial Sequence; identical to SEQ ID NO: 98023
  derived and/or modified CDS sequence (opt2) from hemagglutinin__InfluenzaA__AHL89990

SEQ ID NO: 107298 - RNA, 1701 nt, Artificial Sequence
  derived and/or modified CDS sequence (opt2) from hemagglutinin__InfluenzaA__AHL90002
augaagaccaucaucgcccucuccuacauccucugccucgucuucgcccagaagcuccccggcaucgacaacuccaccgccacccucugccucggccaccacgccguccccaacggcaccaucgucaagaccaucaccaacgaccagaucgaggucaccaacgccaccgagcucguccaguccuccuccaccggcggcaucugcgacuccccccaccagauccucgacggcgagaacugcacccucaucgacgcccuccucggcgacccccagugcgacggcuuccagaacaagaagugggaccucuucgucgagcgcuccaaggccuacuccaacugcuaccccuacgacguccccgacuacgccucccuccgcucccucgucgccuccuccggcacccucgaguucaacaacgaguccuucaacugggccggcgucacccagaacggcaccuccuccgccugcaagcgcggcuccaacaacuccuucuucucccgccucaacuggcucacccacuccaaguucaaguaccccgcccucaacgucaccaugcccaacaacgaggaguucgacaagcucuacaucuggggcguccaccaccccggcaccgacaacgaccagaucuuccucuacgcccaggccuccggccgcaucaccgucuccaccaagcgcucccagcagaccgucauccccaacaucggcucccgcccccgcguccgcaacauccccucccgcaucuccaucuacuggaccaucgucaagcccggcgacauccuccucaucaacuccaccggcaaccucaucgccccccgcggcuacuucaagauccgcuccggcaaguccuccaucaugcgcuccgacgcccccaucggcaagugcaacuccgagugcaucacccccaacggcuccauccccaacgacaagcccuuccagaacgucaaccgcaucaccuacggcgccugcccccgcuacgucaagcagaacacccucaagcucgccaccggcaugcgcaacguccccgagaagcagacccgcggcaucuucggcgccaucgccggcuucaucgagaacggcugggagggcauggucgacggcugguacggcuuccgccaccagaacuccgagggcaugggccaggccgccgaccucaaguccacccaggccgccaucgaccagaucaacggcaagcucaaccgccucaucggcaagaccaacgagaaguuccaccagaucgagaaggaguucuccgaggucgagggccgcauccaggaccucgagaaguacgucgaggacaccaagaucgaccucugguccuacaacgccgagcuccucgucgcccucgagaaccagcacaccaucgaccucaccgacuccgagaugaacaagcucuucgagaagaccaagaagcagcuccgcgagaacgccgaggacaugggcaacggcugcuucaagaucuaccacaagugcgacaacgccugcaucggcuccauccgcaacggcaccuacgaccacgacgucuaccgcgacgaggcccucaacaaccgcuuccagaucaagggcgucgagcucaaguccggcuacaaggacuggauccucuggaucuccuucgccaucuccugcuuccuccucugcgucgcccuccucggcuucaucaugugggccugccagaagggcaacauccgcugcaacaucugcaucuga

SEQ ID NO: 107299 - RNA, 1701 nt, Artificial Sequence
  derived and/or modified CDS sequence (opt2) from hemagglutinin__InfluenzaA__AHL90014
augaagaccaucaucgcccucuccuacauccucugccucgucuucgcccagaagcuccccggcaacgacaacuccaccgccacccucugccucggccaccacgccguccccaacggcaccaucgucaagaccaucaccaacgaccaggucgaggucaccaacgccaccgagcucguccaguccuccuccaccggcgagaucugcgacuccccccaccagauccucgacggcgagaacugcacccucaucgacgcccuccucggcgacccccagugcgacggcuuccagaacaagaagugggaccucuucgucgagcgcuccaaggccuacuccaacugcuaccccuacgacguccccgacuacgccucccuccgcucccucgucgccuccuccggcacccucgaguucaacaacgaguccuucaacuggaccggcgucacccagaacggcaccuccuccgccugcauccgccgcuccaacaacuccuucuucucccgccucaacuggcucacccaccucaaguucaaguaccccgcccucaacgucaccaugcccaacaacgagaaguucgacaagcucuacaucuggggcguccaccaccccggcaccgacaacgaccagaucuuccucuacgcccaggccuccggccgcaucaccgucuccaccaagcgcucccagcagaccgucauccccaacaucggcucccgcccccgcguccgcaacauccccucccgcaucuccaucuacuggaccaucgucaagcccggcgacauccuccucaucaacuccaccggcaaccucaucgccccccgcggcuacuucaagauccgcuccggcaaguccuccaucaugcgcuccgacgcccccaucggcaagugcaacuccgagugcaucacccccaacggcuccauccccaacgacaagcccuuccagaacgucaaccgcaucaccuacggcgccugcccccgcuacgucaagcagaacacccucaagcucgccaccggcaugcgcaacguccccgagaagcagacccgcggcaucuucggcgccaucgccggcuucaucgagaacggcugggagggcauggucgacggcugguacggcuuccgccaccagaacuccgagggcaucggccaggccgccgaccucaaguccacccaggccgccaucgaccagaucaacggcaagcucaaccgccucaucggcaagaccaacgagaaguuccaccagaucgagaaggaguucuccgaggucgagggccgcauccaggaccucgagaaguacgucgaggacaccaagaucgaccucugguccuacaacgccgagcuccucgucgcccucgagaaccagcacaccaucgaccucaccgacuccgagaugaacaagcucuucgagaagaccaagaagcagcuccgcgagaacgccgaggacaugggcaacggcugcuucaagaucuaccacaagugcgacaacgccugcaucggcuccauccgcaacggcaccuacgaccacgacgucuaccgcgacgaggcccucaacaaccgcuuccagaucaagggcgucgagcucaaguccggcuacaaggacuggauccucuggaucuccuucgccaucuccugcuuccuccucugcgucgcccuccucggcuucaucaugugggccugccagaagggcaacauccgcugcaacaucugcaucuga

SEQ ID NO: 107300 - RNA, 1701 nt, Artificial Sequence; identical to SEQ ID NO: 107299
  derived and/or modified CDS sequence (opt2) from hemagglutinin__InfluenzaA__AHL90026

SEQ ID NO: 107301 - RNA, 1701 nt, Artificial Sequence
  derived and/or modified CDS sequence (opt2) from hemagglutinin__InfluenzaA__AHL90050
augaagaccaucaucgcccucuccuacauccucugccucgucuucgcccagaagcuccccggcaacgacaacuccaccgccacccucugccucggccaccacgccguccccaacggcaccaucgucaagaccaucaccaacgaccagaucgaggucaccaacgccaccgagcucguccaguccuccuccaccggcgagaucugcgacuccccccaccagauccucgacggcgagaacugcacccucaucgacgcccuccucggcgacccccagugcgacggcuuccagaacaagaagugggaccucuucgucgagcgcuccaaggccuacuccaacugcuaccccuacgacguccccgacuacgccucccuccgcucccucgucgccuccuccggcacccucgaguucaacaacgaguccuucaacuggaccggcgucacccagaacggcaccuccuccgccugcauccgccgcuccaacaacuccuucuucucccgccucaacuggcucacccaccucaaguucaaguaccccgcccucaacgucaccaugcccaacaacgagaaguucgacaagcucuacaucuggggcguccaccaccccggcaccgacaacgaccagaucuuccucuacgcccaggccuccggccgcaucaccgucuccaccaagcgcucccagcagaccgucauccccaacaucggcucccgcccccgcguccgcaacauccccucccgcaucuccaucuacuggaccaucgucaagcccggcgacauccuccucaucaacuccaccggcaaccucaucgccccccgcggcuacuucaagauccgcuccggcaaguccuccaucaugcgcuccgacgcccccaucggcaagugcaacuccgagugcaucacccccaacggcuccauccccaacgacaagcccuuccagaacgucaaccgcaucaccuacggcgccugcccccgcuacgucaagcagaacacccucaagcucgccaccggcaugcgcaacguccccgagaagcagacccgcggcaucuucggcgccaucgccggcuucaucgagaacggcugggagggcauggucgacggcugguacggcuuccgccaccagaacuccgagggcaucggccaggccgccgaccucaaguccacccaggccgccaucgaccagaucaacggcaagcucaaccgccucaucggcaagaccaacgagaaguuccaccagaucgagaaggaguucuccgaggucgagggccgcauccaggaccucgagaaguacgucgaggacaccaagaucgaccucugguccuacaacgccgagcuccucgucgcccucgagaaccagcacaccaucgaccucaccgacgccgagaugaacaagcucuucgagaagaccaagaagcagcuccgcgagaacgccgaggacaugggcaacggcugcuucaagaucuaccacaagugcgacaacgccugcaucggcuccauccgcaacggcaccuacgaccacgacgucuaccgcgacgaggcccucaacaaccgcuuccagaucaagggcgucgagcucaaguccggcuacaaggacuggauccucuggaucuccuucgccaucuccugcuuccuccucugcgucgcccuccucggcuucaucaugugggccugccagaagggcaacauccgcugcaacaucugcaucuga

SEQ ID NO: 107302 - RNA, 1701 nt, Artificial Sequence
  derived and/or modified CDS sequence (opt2) from hemagglutinin__InfluenzaA__AHL90062
augaagaccaucaucgcccucuccuacauccucugccucgucuucgcccagaagcuccccgagaacgacaacuccaccgccacccucugccucggccaccacgccguccccaacggcaccaucgucaagaccaucaccaacgaccagaucgaggucaccaacgccaccgagcucguccaguccuccuccaccggcgagaucugcgacuccccccaccagauccucgacggcgagaacugcacccucaucgacgcccuccucggcgacccccagugcgacggcuuccagaacaagaagugggaccucuucgucgagcgcuccaaggccuacuccaacugcuaccccuacgacguccccgacuacgccucccuccgcucccucgucgccuccuccggcacccucgaguucaacaacgaguccuucaacuggaccggcgucacccagaacggcaccuccuccgccugcauccgccgcuccaacaacuccuucuucucccgccucaacuggcucacccaccucaaguucaaguaccccgcccucaacgucaccaugcccaacaacgagaaguucgacaagcucuacaucuggggcguccaccaccccggcaccgacaacgaccagaucuuccucuacgcccaggccuccggccgcaucaccgucuccaccaagcgcucccagcagaccgucauccccaacaucggcucccgcccccgcguccgcaacauccccucccgcaucuccaucuacuggaccaucgucaagcccggcgacauccuccucaucaacuccaccggcaaccucaucgccccccgcggcuacuucaagauccgcuccggcaaguccuccaucaugcgcuccgacgcccccaucggcaagugcaacuccgagugcaucacccccaacggcuccauccccaacuacaagcccuuccagaacgucaaccgcaucaccuacggcgccugcccccgcuacgucaagcagaacacccucaagcucgccaccggcaugcgcaacguccccgagaagcagacccgcggcaucuucggcgccaucgccggcuucaucgagaacggcugggagggcauggucgacggcugguacggcuuccgccaccagaacuccgagggcaucggccaggccgccgaccucaaguccacccaggccgccaucgaccagaucaacggcaagcucaaccgccucaucggcaagaccaacgagaaguuccaccagaucgagaaggaguucuccgaggucgagggccgcauccaggaccucgagaaguacgucgaggacaccaagaucgaccucugguccuacaacgccgagcuccucgucgcccucgagaaccagcacaccaucgaccucaccgacuccgagaugaacaagcucuucgagaagaccaagaagcagcuccgcgagaacgccgaggacaugggcaacggcugcuucaagaucuaccacaagugcgacaacgccugcaucggcuccauccgcaacggcaccuacgaccacgacgucuaccgcgacgaggcccucaacaaccgcuuccagaucaagggcgucgagcucaaguccggcuacaaggacuggauccucuggaucuccuucgccaucuccugcuuccuccucugcgucgcccuccucggcuucaucaugugggccugccagaagggcaacauccgcugcaacaucugcaucuga

SEQ ID NO: 107303 - RNA, 1701 nt, Artificial Sequence; identical to SEQ ID NO: 97964
  derived and/or modified CDS sequence (opt2) from hemagglutinin__InfluenzaA__AHL90074

SEQ ID NO: 107304 - RNA, 1701 nt, Artificial Sequence
  derived and/or modified CDS sequence (opt2) from hemagglutinin__InfluenzaA__AHL90086
augaagaccaucaucgcccucuccuacauccucugccucgucuucgcccagaagcuccccggcaacgacaacuccaccgccacccucugccucggccaccacgccguccccaacggcaccaucgucaagaccaucaccaacgaccagaucgaggucaccaacgccaccgagcucguccaguccuccuccaccggcgagaucugcgacuccccccaccagauccucgacggcgagaacugcacccucaucgacgcccuccucggcgacccccagugcgacggcuuccagaacaagaagugggaccucuucgucgagcgcuccaaggccuacuccaacugcuaccccuacgacguccccgacuacgccucccuccgcucccucgucgccuccuccggcacccucgaguucaacaacgaguccuucaacuggaccggcgucacccagaacggcaccuccuccgccugcauccgccgcuacaacaacuccuucuucucccgccucaacuggcucacccaccucaaguucaaguaccccgcccucaacgucaccaugcccaacaacgagaaguucgacaagcucuacaucuggggcguccaccaccccggcaccgacaacgaccagaucuuccucuacgcccaggccuccggccgcaucaccgucuccaccaagcgcucccagcagaccgucauccccaacaucggcucccgcccccgcguccgcaacauccccucccgcaucuccaucuacuggaccaucgucaagcccggcgacauccuccucaucaacuccaccggcaaccucaucgccccccgcggcuacuucaagauccgcuccggcaaguccuccaucaugcgcuccgacgcccccaucggcaagugcaacuccgagugcaucacccccaacggcuccauccccaacgacaagcccuuccagaacgucaaccgcaucaccuacggcgccugcccccgcuacgucaagcagaacacccucaagcucgccaccggcaugcgcaacguccccgagaagcagacccgcggcaucuucggcgccaucgccggcuucaucgagaacggcugggagggcauggucgacggcugguacggcuuccgccaccagaacuccgagggcaucggccaggccgccgaccucaaguccacccaggccgccaucgaccagaucaacggcaagcucaaccgccucaucggcaagaccaacgagaaguuccaccagaucgagaaggaguucuccgaggucgagggccgcauccaggaccucgagaaguacgucgaggacaccaagaucgaccucugguccuacaacgccgagcuccucgucgcccucgagaaccagcacaccaucgaccucaccgacuccgagaugaacaagcucuucgagaagaccaagaagcagcuccgcgagaacgccgaggacaugggcaacggcugcuucaagaucuaccacaagugcgacaacgccugcaucggcuccauccgcaacggcaccuacgaccacgacgucuaccgcgacgaggcccucaacaaccgcuuccagaucaagggcgucgagcucaaguccggcuacaaggacuggauccucuggaucuccuucgccaucuccugcuuccuccucugcgucgcccuccucggcuucaucaugugggccugccagaagggcaacauccgcugcaacaucugcaucuga

SEQ ID NO: 107305 - RNA, 1701 nt, Artificial Sequence
  derived and/or modified CDS sequence (opt2) from hemagglutinin__InfluenzaA__AHL90098
augaagaccaucaucgcccucuccuacauccucugccucgucuucgcccagaagcuccccggcaacgacaacuccaccgccacccucugccucggccaccacgccguccccaacggcaccaucgucaagaccaucaccaacgaccagaucgaggucaccaacgccaccgagcucguccaguccuccuccaccggcggcaucugcgacuccccccaccagauccucgacggcgagaacugcacccucaucgacgcccuccucggcgacccccagugcgacggcuuccagaacaagaagugggaccucuucgucgagcgcuccaaggccuacuccaacugcuaccccuacgacguccccgacuacgccucccuccgcucccucgucgccuccuccggcacccucgaguucaacaacgaguccuucaacuggaccggcgucacccagaacggcaccuccuccgccugcaagcgcggcuccgacaacuccuucuucucccgccucaacuggcucacccaccucaaguucaaguaccccgcccucaacgucaccaugcccaacaacgagaaguucgacaagcucuacaucuggggcguccaccaccccggcaccgacaacgaccagaucuuccucuacgcccaggccuccggccgcaucaccgucuccaccaagcgcucccagcagaccgucauccccaacaucggcucccgcccccgcguccgcaacauccccucccgcaucuccaucuacuggaccaucgucaagcccggcgacauccuccucaucaacuccaccggcaaccucaucgccccccgcggcuacuucaagauccgcuccggcaaguccuccaucaugcgcuccgacgcccccaucgacaagugcaacuccgagugcaucacccccaacggcuccauccccaacgacaagcccuuccagaacgucaaccgcaucaccuacggcgccugcccccgcuacgucaagcagaacacccucaagcucgccaccggcaugcgcaacguccccgagaagcagacccgcggcaucuucggcgccaucgccggcuucaucgagaacggcugggagggcauggucgacggcugguacggcuuccgccaccagaacuccgagggcaucggccaggccgccgaccucaaguccacccaggccgccaucaaccagaucaacggcaagcucaaccgccucaucggcaagaccaacgagaaguuccaccagaucgagaaggaguucuccgaggucgagggccgcauccaggaccucgagaaguacgucgaggacaccaagaucgaccucugguccuacaacgccgagcuccucgucgcccucgagaaccagcacaccaucgaccucaccgacuccgagaugaacaagcucuucgagcgcaccaagaagcagcuccgcgagaacgccgaggacaugggcaacggcugcuucaagaucuaccacaagugcgacaacgccugcaucggcuccauccgcaacggcaccuacgaccacgacgucuaccgcgacgaggcccucaacaaccgcuuccagaucaagggcgucgagcucaaguccggcuacaaggacuggauccucuggaucuccuucgccaucuccugcuuccuccucugcgucgcccuccucggcuucaucaugugggccugccagaagggcaacauccgcugcaacaucugcaucuga

SEQ ID NO: 107306 - RNA, 1701 nt, Artificial Sequence
  derived and/or modified CDS sequence (opt2) from hemagglutinin__InfluenzaA__AHL90110
augaagaccaucaucgcccucuccuacauccucugccucgucuucgcccagaagcuccccggcaacgacaacuccaccgccacccucugccucggccaccacgccguccccaacggcaccaucgucaagaccaucaccaacgaccagaucgaggucaccaacgccaccgagcucguccaguccuccuccaccggcgagaucugcgacuccccccaccagauccucgacggcgagaacugcacccucaucgacgcccuccucggcgacccccagugcgacggcuuccagaacaagaagugggaccucuucgucgagcgcuccaaggccuacuccaacugcuaccccuacgacguccccgacuacgccucccuccgcucccucgucgccuccuccggcacccucgaguucaacaacgaguccuucaacuggaccggcgucacccagaacggcaccuccuccgccugcauccgccgcuccaacaacuccuucuucucccgccucaacuggcucacccaccucaaguucaaguaccccgcccucaacgucaccaugcccaacaacgagaaguucgacaagcucuacaucuggggcguccaccaccccggcaccgacaacgaccagaucuuccucuacgcccaggccuccggccgcaucaccgucuccaccaagcgcucccagcagaccgucauccccaacaucggcucccgcccccgcguccgcaacauccccucccgcaucuccaucuacuggaccaucgucaagcccggcgacauccuccucaucaacuccaccggcaaccucaucgccccccgcggcuacuucaagauccaguccggcaaguccuccgucaugcgcuccgacgcccccaucggcaagugcaacuccgagugcaucacccccaacggcuccauccccaacgacaagcccuuccagaacgucaaccgcaucaccuacggcgccugcccccgcuacgucaagcagaacacccucaagcucgccaccggcaugcgcaacguccccgagaagcagacccgcggcaucuucggcgccaucgccggcuucaucgagaacggcugggagggcauggucgacggcugguacggcuuccgccaccagaacuccgagggcaucggccaggccgccgaccucaaguccacccaggccgccaucgaccagaucaacggcaagcucaaccgccucaucggcaagaccaacgagaaguuccaccagaucgagaaggaguucuccgaggucgagggccgcauccaggaccucgagaaguacgucgaggacaccaagaucgaccucugguccuacaacgccgagcuccucgucgcccucgagaaccagcacaccaucgaccucaccgacuccgagaugaacaagcucuucgagaagaccaagaagcagcuccgcgagaacgccgaggacaugggcaacggcugcuucaagaucuaccacaagugcgacaacgccugcaucggcuccauccgcaacggcaccuacgaccacgacgucuaccgcgacgaggcccucaacaaccgcuuccagaucaagggcgucgagcucaaguccggcuacaaggacuggauccucuggaucuccuucgccaucuccugcuuccuccucugcgucgcccuccucggcuucaucaugugggccugccagaagggcaacauccgcugcaacaucugcaucuga

SEQ ID NO: 107307 - RNA, 1698 nt, Artificial Sequence; identical to SEQ ID NO: 100131
  derived and/or modified CDS sequence (opt2) from hemagglutinin__InfluenzaA__AHL90122

SEQ ID NO: 107308 - RNA, 1698 nt, Artificial Sequence; identical to SEQ ID NO: 98524
  derived and/or modified CDS sequence (opt2) from hemagglutinin__InfluenzaA__AHL90133

SEQ ID NO: 107309 - RNA, 1698 nt, Artificial Sequence; identical to SEQ ID NO: 100131
  derived and/or modified CDS sequence (opt2) from hemagglutinin__InfluenzaA__AHL90145

SEQ ID NO: 107310 - RNA, 1698 nt, Artificial Sequence
  derived and/or modified CDS sequence (opt2) from hemagglutinin__InfluenzaA__AHL90157
augaaggucaagcuccucguccuccucugcaccuucaccgccaccuacgccgacaccaucugcaucggcuaccacgccaacaacuccaccgacaccgucgacaccguccucgagaagaacgucaccgucacccacuccgucaaccuccucgagaacucccacaacggcaagcucugccuccucaagggcaucgccccccuccagcucggcaacugcuccgucgccggcuggauccucggcaaccccgagugcgagcuccucaucuccaaggaguccugguccuacaucgucgagaagcccaaccccgagaacggcaccugcuaccccggccacuucgccgacuacgaggagcuccgcgagcagcucuccuccgucuccuccuucgagcgcuucgagaucuuccccaaggaguccuccuggcccaaccacaccgucaccggcgucuccgccuccugcucccacaacggcgaguccuccuucuaccgcaaccuccucuggcucaccggcaagaacggccucuaccccaaccucuccaaguccuacgccaacaacaaggagaaggagguccucguccucuggggcguccaccacccccccaacaucggcgaccagaaggcccucuaccacaccgagaacgccuacgucuccgucgucuccucccacuacucccgcaaguucacccccgagaucgccaagcgccccaagguccgcgaccaggagggccgcaucaacuacuacuggacccuccucgagcccggcgacaccaucaucuucgaggccaacggcaaccucaucgccccccgcuacgccuucgcccucucccgcggcuucggcuccggcaucaucaacuccaacgcccccauggacaagugcgacgccaagugccagaccccccagggcgccaucaacuccucccuccccuuccagaacguccaccccgucaccaucggcgagugccccaaguacguccgcuccgccaagcuccgcauggucaccggccuccgcaacauccccuccauccagucccgcggccucuucggcgccaucgccggcuucaucgagggcggcuggaccggcauggucgacggcugguacggcuaccaccaccagaacgagcagggcuccggcuacgccgccgaccagaaguccacccagaacgccaucaacggcaucaccaacaaggucaacuccgucaucgagaagaugaacacccaguucaccgccgucggcaaggaguucaacaagcucgagcgccgcauggagaaccucaacaagaaggucgacgacggcuucaucgacaucuggaccuacaacgccgagcuccucguccuccucgagaacgagcgcacccucgacuuccacgacuccaacgucaagaaccucuacgagaaggucaagauccagcucaagaacaacgccaaggagaucggcaacggcugcuucgaguucuaccacaagugcaacgacgagugcauggaguccgucaagaacggcaccuacgacuaccccaaguacuccgaggaguccaagcucaaccgcgagaagaucgacggcgucaagcucgaguccaugggcgucuaccagauccucgccaucuacuccaccaucgccuccucccucguccuccucgucucccucggcgccaucuccuucuggaugugcuccaacggcucccuccagugccgcaucugcaucuga

SEQ ID NO: 107311 - RNA, 1698 nt, Artificial Sequence; identical to SEQ ID NO: 100131
  derived and/or modified CDS sequence (opt2) from hemagglutinin__InfluenzaA__AHL90169

SEQ ID NO: 107312 - RNA, 1698 nt, Artificial Sequence
  derived and/or modified CDS sequence (opt2) from hemagglutinin__InfluenzaA__AHL90181
augaaggucaagcuccucguccuccucugcaccuucgccgccaccuacgccgacaccaucugcaucggcuaccacgccaacaacuccaccgacaccgucgacaccguccucgagaagaacgucaccgucacccacuccgucaaccuccucgagaacucccacaacggcaagcucugccuccucaagggcaucgccccccuccagcucggcaacugcuccgucgccggcuggauccucggcaaccccgagugcgagcuccucaucuccaaggaguccugguccuacaucgucgagaagcccaaccccaagaacggcaccugcuaccccggccacuucgccgacuacgaggagcuccgcgagcagcucuccuccgucuccuccuucgagcgcuucgagaucuuccccaaggaguccuccuggcccaaccacaccgucaccggcgucuccgccuccugcucccacaacggcgaguccuccuucuaccgcaaccuccucuggcucaccggcaagaacggccucuaccccaaccucuccaaguccuacgccaacaacaaggagaaggagguccucguccucuggggcguccaccacccccccaacaucggcgaccagaaggcccucuaccacaccgagaacgccuacgucuccgucgucuccucccacuacucccgcaaguucacccccgagaucgccaagcgccccaagguccgcgaccaggagggccgcaucaacuacuacuggacccuccucgagcccggcgacaccaucaucuucgaggccaacggcaaccucaucgccccccgcuacgccuucgcccucucccgcggcuucggcuccggcaucaucaacuccaacgcccccauggacaagugcgacgccaagugccagaccccccagggcgccaucaacuccucccuccccuuccagaacguccaccccgucaccaucggcgagugccccaaguacguccgcuccgccaagcuccgcauggucaccggccuccgcaacauccccuccauccagucccgcggccucuucggcgccaucgccggcuucaucgagggcggcuggaccggcauggucgacggcugguacggcuaccaccaccagaacgagcagggcuccggcuacgccgccgaccagaaguccacccagaacgccaucaacggcaucaccaacaaggucaacuccgucaucgagaagaugaacacccaguucaccgccgucggcaaggaguucaacaagcucgagcgccgcauggagaaccucaacaagaaggucgacgacggcuucaucgacaucuggaccuacaacgccgagcuccucguccuccucgagaacgagcgcacccucgacuuccacgacuccaacgucaagaaccucuacgagaaggucaagucccagcucaagaacaacgccaaggagaucggcaacggcugcuucgaguucuaccacaagugcaacgacgagugcauggaguccgucaagaacggcaccuacgacuaccccaaguacuccgaggaguccaagcucaaccgcgagaagaucgacggcgucaagcucgaguccaugggcgucuaccagauccucgccaucuacuccaccgucgccuccucccucguccuccucgucucccucggcgccaucuccuucuggaugugcuccaacggcucccuccagugccgcaucugcaucuga

SEQ ID NO: 107313 - RNA, 1698 nt, Artificial Sequence; identical to SEQ ID NO: 99206
  derived and/or modified CDS sequence (opt2) from hemagglutinin__InfluenzaA__AHL90217

SEQ ID NO: 107314 - RNA, 1698 nt, Artificial Sequence; identical to SEQ ID NO: 99206
  derived and/or modified CDS sequence (opt2) from hemagglutinin__InfluenzaA__AHL90229

SEQ ID NO: 107315 - RNA, 1698 nt, Artificial Sequence
  derived and/or modified CDS sequence (opt2) from hemagglutinin__InfluenzaA__AHL90241
augaaggucaagcuccucguccuccucugcaccuucaccgccaccuacgccgacaccaucugcaucggcuaccacgccaacaacuccaccgacaccgucgacaccguccucgagaagaacgucaccgucacccacuccgucaaccuccucgagaacucccacaacggcaagcucugccuccucaagggcaucgccccccuccagcucggcaacugcuccgucgccggcuggauccucggcaaccccgagugcgagcuccucauccccaaggaguccugguccuacaucgucgagaagcccaaccccgagaacggcaccugcuaccccggccacuucgccgacuacgaggagcuccgcgagcagcucuccuccgucuccuccuucgagcgcuucgagaucuuccccaaggaguccuccuggcccaaccacaccgucaccggcgucuccgccuccugcucccacaacggcgaguccuccuucuaccgcaaccuccucuggcucaccggcaagaacggccucuaccccaaccucuccaaguccuacgccaacaacaaggagaaggagguccucguccucuggggcguccaccacccccccaacaucggcgaccagaaggcccucuaccacaccgagaacgccuacgucuccgucgucuccucccacuacucccgcaaguucacccccgagaucgccaagcgccccaagguccgcgaccaggagggccgcaucaacuacuacuggacccuccucgagcccggcgacaccaucaucuucgaggccaacggcaaccucaucgccccccgcuacgccuucgcccucucccgcggcuucggcuccggcaucaucaacuccaacgcccccauggacaagugcgacgccaagugccagaccccccagggcgccaucaacuccucccuccccuuccagaacguccaccccgucaccaucggcgagugccccaaguacguccgcuccgccaagcuccgcauggucaccggccuccgcaacauccccuccauccagucccgcggccucuucggcgccaucgccggcuucaucgagggcggcuggaccggcauggucgacggcugguacggcuaccaccaccagaacgagcagggcuccggcuacgccgccgaccagaaguccacccagaacgccaucaacggcaucaccaacaaggucaacuccgucaucgagaagaugaacacccaguucaccgccgucggcaaggaguucaacaagcucgagcgccgcauggagaaccucaacaagaaggucgacgacggcuucaucgacaucuggaccuacaacgccgagcuccucguccuccucgagaacgagcgcacccucgacuuccacgacuccaacgucaagaaccucuacgagaaggucaagucccagcucaagaacaacgccaaggagaucggcaacggcugcuucgaguucuaccacaagugcaacgacgagugcauggaguccgucaagaacggcaccuacgacuaccccaaguacuccgaggaguccaagcucaaccgcgagaagaucgacggcgucaagcucgaguccaugggcgucuaccagauccucgccaucuacuccaccgucgccuccucccucguccuccucgucucccucggcgccaucuccuucuggaugugcuccaacggcucccuccagugccgcaucugcaucuga

SEQ ID NO: 107316 - RNA, 1698 nt, Artificial Sequence
  derived and/or modified CDS sequence (opt2) from hemagglutinin__InfluenzaA__AHL90253
augaaggucaagcuccucguccuccucugcaccuucaccgccaccuacgccgacaccaucugcaucggcuaccacgccaacaacuccaccgacaccgucgacaccguccucgagaagaacgucaccgucacccacuccgucaaccuccucgagaacucccacaacggcaagcucugccuccucaagggcaucgccccccuccagcucggcaacugcuccgucgccggcuggauccucggcaaccccgagugcgagcuccucaucuccaaggaguccugguccuacaucgucgagaagcccaaccccgagaacggcaccugcuaccccggccacuucgccgacuacgaggagcuccgcgagcagcucuccuccgucuccuccuucgagcgcuucgagaucuuccccaagggcuccuccuggcccaaccacaccgucaccggcgucuccgccuccugcucccacaacggcgaguccuccuucuaccgcaaccuccucuggcucaccggcaagaacggccucuaccccaaccucuccaaguccuacgccaacaacaaggagaaggagguccucguccucuggggcguccaccacccccccaacaucggcgaccagaagacccucuaccacaccgagaacgccuacgucuccgucgucuccucccacuacucccgcaaguucacccccgagaucgccaagcgccccaagguccgcgaccaggagggccgcaucaacuacuacuggacccuccucgagcccggcgacaccaucaucuucgaggccaacggcaaccucaucgccccccgcuacgccuucgcccucucccgcggcuucggcuccggcaucaucaacuccaacgcccccauggacaagugcgacgccaagugccagaccccccagggcgccaucaacuccucccuccccuuccagaacguccaccccgucaccaucggcgagugccccaaguacguccgcuccgccaagcuccgcauggucaccggccuccgcaacauccccuccauccagucccgcggccucuucggcgccaucgccggcuucaucgagggcggcuggaccggcauggucgacggcugguacggcuaccaccaccagaacgagcagggcuccggcuacgccgccgaccagaaguccacccagaacgccaucaacggcaucaccaacaaggucaacuccgucaucgagaagaugaacacccaguucaccgccgucggcaaggaguucaacaagcucgagcgccgcauggagaaccucaacaagaaggucgacgacggcuucaucgacaucuggaccuacaacgccgagcuccucguccuccucgagaacgagcgcacccucgacuuccacgacuccaacgucaagaaccucuacgagaaggucaagucccagcucaagaacaacgccaaggagaucggcaacggcugcuucgaguucuaccacaagugcaacgacgagugcauggaguccgucaagaacggcaccuacgacuaccccaaguacuccgaggucuccaagcucaaccgcgagaagaucgacggcgucaagcucgaguccaugggcgucuaccagauccucgccaucuacuccaccgucgccuccucccucguccuccucgucucccucggcgccaucuccuucuggaugugcuccaacggcucccuccagugccgcaucugcaucuga

SEQ ID NO: 107317 - RNA, 1698 nt, Artificial Sequence; identical to SEQ ID NO: 98524
  derived and/or modified CDS sequence (opt2) from hemagglutinin__InfluenzaA__AHL90265

SEQ ID NO: 107318 - RNA, 1698 nt, Artificial Sequence
  derived and/or modified CDS sequence (opt2) from hemagglutinin__InfluenzaA__AHL90277
augaaggucaagcuccucguccuccucugcaccuucaccgccaccuacgccgacaccaucugcaucggcuaccacgccaacaacuccaccgacaccgucgacaccguccucgagaagaacgucaccgucacccacuccgucaaccuccucgagaacucccacaacggcaagcucugccuccucaagggcaucgccccccuccagcucggcaacugcuccgucgccggcuggauccucggcaaccccgagugcgagcuccucaucuccaaggaguccugguccuacaucgucgagaagcccaaccccgagaacggcaccugcuaccccggccacuucgccgacuacgaggagcuccgcgagcagcucuccuccgucuccuccuucgagcgcuucgagaucuuccccaaggaguccuccuggcccaaccacaccgucaccggcgucuccgccuccugcucccacaacggcgaguccuccuucuaccgcaaccuccucuggcucaccggcaagaacggccucuaccccaaccucuccaaguccuacgccaacaacaaggagaaggagguccucguccucuggggcguccaccacccccccaacaucgucgaccagaagacccucuaccacaccgagaacgccuacgucuccgucgucuccucccacuacucccgcaaguucacccccgagaucgccaagcgccccaagguccgcgaccaggagggccgcaucaacuacuacuggacccuccucgagcccggcgacaccaucaucuucgaggccaacggcaaccucaucgccccccgcuacgccuucgcccucucccgcggcuucggcuccggcaucaucaacuccaacgcccccauggacaagugcgacgccaagugccagaccccccagggcgccaucaacuccucccuccccuuccagaacguccaccccgucaccaucggcgagugccccaaguacguccgcuccgccaagcuccgcauggucaccggccuccgcaacauccccuccauccagucccgcggccucuucggcgccaucgccggcuucaucgagggcggcuggaccggcauggucgacggcugguacggcuaccaccaccagaacgagcagggcuccggcuacgccgccgaccagaaguccacccagaacgccaucaacggcaucaccaacaaggucaacuccgucaucgagaagaugaacacccaguucaccgccgucggcaaggaguucaacaagcucgagcgccgcauggagaaccucaacaagaaggucgacgacggcuucaucgacaucuggaccuacaacgccgagcuccucguccuccucgagaacgagcgcacccucgacuuccacgacuccaacgucaagaaccucuacgagaaggucaagucccagcucaagaacaacgccaaggagaucggcaacggcugcuucgaguucuaccacaagugcaacgacgagugcauggaguccgucaagaacggcaccuacgacuaccccaaguacuccgaggaguccaagcucaaccgcgagaagaucgacggcgucaagcucgaguccaugggcgucuaccagauccucgccaucuacuccaccgucgccuccucccucguccuccucgucucccucggcgccaucuccuucuggaugugcuccaacggcucccuccagugccgcaucugcaucuga

SEQ ID NO: 107319 - RNA, 1698 nt, Artificial Sequence
  derived and/or modified CDS sequence (opt2) from hemagglutinin__InfluenzaA__AHL90289
augaaggucaagcuccucguccuccucugcaccuucaccgccaccuacgccgacaccaucugcaucggcuaccacgccaacaacuccaccgacaccgucgacaccguccucgagaagaacgucaccgucacccacuccgucaaccuccucgagaacucccacaacggcaagcucugccuccucaagggcaucgccccccuccagcucggcaacugcuccgucgccggcuggauccucggcaaccccgagugcgagcuccucaucuccaaggaguccugguccuacaucgucgagaagcccaaccccgagaacggcaccugcuaccccggccacuucgccgacuacgaggagcuccgcgagcagcucuccuccgucuccuccuucgagcgcuucgagaucuuccccaaggaguccuccuggcccaaccacaccgucaccggcgucuccgccuccugcucccacaacggcgaguccuccuucuaccgcaaccuccucuggcucaccggcaagaacggccucuaccccaaccucuccaaguccuacgccaacaacaaggagaaggagguccucguccucuggggcguccaccacccccccaacaucggcgaccagaaggcccucuaccacaccgagaacgccuacgucuccgucgucuccucccacuacucccgcaaguucacccccgagaucgccaagcgccccaagguccgcgaccaggagggccgcaucaacuacuacuggacccuccucgagccccgcgacaccaucaucuucgaggccaacggcaaccucaucgccccccgcuacgccuucgcccucucccgcggcuucggcuccggcaucaucaacuccaacgcccccauggacaagugcgacgccaagugccagaccccccagggcgccaucaacuccucccuccccuuccagaacguccaccccgucaccaucggcgagugccccaaguacguccgcuccgccaagcuccgcauggucaccggccuccgcaacauccccuccauccagucccgcggccucuucggcgccaucgccggcuucaucgagggcggcuggaccggcauggucgacggcugguacggcuaccaccaccagaacgagcagggcuccggcuacgccgccgaccagaaguccacccagaacgccaucaacggcaucaccaacaaggucaacuccgucaucgagaagaugaacacccaguucaccgccgucggcaaggaguucaacaagcucgagcgccgcauggagaaccucaacaagaaggucgacgacggcuucaucgacaucuggaccuacaacgccgagcuccucguccuccucgagaacgagcgcacccucgacuuccacgacuccaacgucaagaaccucuacgagaaggucaagucccagcucaagaacaacgccaaggagaucggcaacggcugcuucgaguucuaccacaagugcaacgacgagugcauggaguccgucaagaacggcaccuacgacuaccccaaguacuccgaggaguccaagcucaaccgcgagaagaucgacggcgucaagcucgaguccaugggcgucuaccagauccucgccaucuacuccaccgucgccuccucccucguccuccucgucucccucggcgccaucuccuucuggaugugcuccaacggcucccuccagugccgcaucugcaucuga

SEQ ID NO: 107320 - RNA, 1698 nt, Artificial Sequence; identical to SEQ ID NO: 107319
  derived and/or modified CDS sequence (opt2) from hemagglutinin__InfluenzaA__AHL90301

SEQ ID NO: 107321 - RNA, 1698 nt, Artificial Sequence
  derived and/or modified CDS sequence (opt2) from hemagglutinin__InfluenzaA__AHL90325
augaaggucaagcuccucguccuccucugcaccuucaccgccaccuacgccgacaccaucugcaucggcuaccacgccaacaacuccaccgacaccgucgacaccguccucgagaagaacgucaccgucacccacuccgucaaccuccucgagaacucccacaacggcaagcucugccuccucaagggcaucgccccccuccagcucggcaacugcuccgucgccggcuggauccucggcaaccccgagugcgagcuccucaucuccaaggaguccugguccuacaucgucgagaagcccaaccccgagaacggcaccugcuaccccggccacuucgccgacuacgaggagcuccgcgagcagcucuccuccgucuccuccuucgagcgcuucgagaucuuccccaaggaguccuccuggcccaaccacaccgucaccggcgucuccgccuccugcucccacaacggcgaguccuccuucuaccgcaaccuccucuggcucaccggcaagaacggccucuaccccaaccucuccaaguccuacgccaacaacaaggagaaggagguccucguccucuggggcguccaccacccccccaacaucggcgaccagaaggcccucuaccacaccgagaacgccuacgucuccgucgucuccucccacuacucccgcaaguucacccccgagaucgccaagcgccccaagguccgcgaccaggagggccgcaucaacuacuacuggacccuccucgagcccggcgacaccaucaucuucgaggccaacggcaaccucaucgccccccgcuacgccuucgcccucucccgcggcuucggcuccggcaucaucaacuccaacgcccccauggacaagugcgacgccaagugccagaccccccagggcgccaucaacuccucccuccccuuccagaacguccaccccgucaccaucggcgagugccccaaguacguccgcuccgccaagcuccgcauggucaccggccuccgcaacauccccuccauccagucccgcggccucuucggcgccaucgccggcuucaucgagggcggcuggaccggcauggucgacggcugguacggcuaccaccaccagaacgagcagggcuccggcuacgccgccgaccagaaguccacccagaacgccaucaacggcaucaccaacaaggucaacuccgucaucgagaagaugaacacccaguucaccgccgucggcaaggaguucaacaagcucgagcgccgcauggagaaccucaacaagaaggucgacgacggcuucaucgacaucuggaccuacaacgccgagcuccucguccuccucgagaacgagcgcacccucgacuuccacgacuccaacgucaagaaccucuacgagaaggucaagucccagcucaagaacaacgccaaggagaugggcaacggcugcuucgaguucuaccacaagugcaacgacgagugcauggaguccgucaagaacggcaccuacgacuaccccaaguacuccgaggaguccaagcucaaccgcgagaagaucgacggcgucaagcucgaguccaugggcgucuaccagauccucgccaucuacuccaccgucgccuccucccucguccuccucgucucccucggcgccaucuccuucuggaugugcuccaacggcucccuccagugccgcaucugcaucuga

SEQ ID NO: 107322 - RNA, 1698 nt, Artificial Sequence; identical to SEQ ID NO: 107321
  derived and/or modified CDS sequence (opt2) from hemagglutinin__InfluenzaA__AHL90337

SEQ ID NO: 107323 - RNA, 1698 nt, Artificial Sequence; identical to SEQ ID NO: 98524
  derived and/or modified CDS sequence (opt2) from hemagglutinin__InfluenzaA__AHL90349

SEQ ID NO: 107324 - RNA, 1698 nt, Artificial Sequence; identical to SEQ ID NO: 98524
  derived and/or modified CDS sequence (opt2) from hemagglutinin__InfluenzaA__AHL90361

SEQ ID NO: 107325 - RNA, 1698 nt, Artificial Sequence; identical to SEQ ID NO: 107318
  derived and/or modified CDS sequence (opt2) from hemagglutinin__InfluenzaA__AHL90373

SEQ ID NO: 107326 - RNA, 1701 nt, Artificial Sequence
  derived and/or modified CDS sequence (opt2) from hemagglutinin__InfluenzaA__AHL90385
augaagaccaucaucgcccucuccuacauccagugccucgucuucgcccagaaguuccccggcaacgacaacuccaccgccacccucugccucggccaccacgccguccccaacggcaccaucgucaagaccaucaccaacgaccagaucgaggucaccaacgccaccgagcucguccaguccuccuccaccggcgagaucugcgacuccccccaccagauccucgacggcgagaacugcacccucaucgacgcccuccucggcgacccccagugcgacggcuuccagaacaagaacugggaccucuucgucgagcgcuccaaggccuacuccaacugcuaccccuacgacguccccgacuacgccucccuccgcucccucgucgccuccuccggcacccucgaguucaacaacgaguccuucaacuggaccggcgucacccagaacggcaccuccuccgccugcauccgccgcuccaacaacuccuucuucucccgccucaacuggcucacccacuccaaguucaaguaccccgcccucaacgucaccaugcccaacaacgagaacuucgacaagcucuacaucuggggcguccaccaccccggcaccgacaacgaccagaucuuccucuacgcccaggccuccggccgcaucaccgucuccaccaagcgcucccagcagaccgucauccccaacaucggcucccgcccccgcguccgcaacauccccucccgcaucuccaucuacuggaccaucgucaagcccggcgacauccuccucaucaacuccaccggcaaccucaucgccccccgcggcuacuucaagauccgcuccggcaaguccuccaucaugcgcuccgacgcccccaucggcaagugcaacuccgagugcaucacccccaacggcuccauccccaacgacaagcccuuccagaacgucaaccgcaucaccuacggcgccugcccccgcuacgucaagcagaacacccucaagcucgccaccggcaugcgcaacguccccgagaagcagacccgcggcaucuucggcgccaucgccggcuucaucgagaacggcugggagggcauggucgacggcugguacggcuuccgccaccagaacuccgagggcaucggccaggccgccgaccucaaguccacccaggccgccaucgaccagaucaacggcaagcucaaccgccucaucggccgcaccaacgagaaguuccaccagaucgagaaggaguucuccgaggucgagggccgcauccaggaccucgagaaguacgucgaggacaccaagaucgaccucugguccuacaacgccgagcuccucgucgcccucgagaaccagcacaccaucgaccucaccgacuccgagaugaacaagcucuucgagaagaccaagaagcagcuccgcgagaacgccgaggacaugggcaacggcugcuucaagaucuaccacaagugcgacaacgccugcaucggcuccauccgcaacggcaccuacgaccacgacgucuaccgcgacgaggcccucaacaaccgcuuccagaucaagggcgucgagcucaaguccggcuacaaggacuggauccucuggaucuccuucgccaucuccugcuuccuccucugcaucgcccuccucggcuucaucaugugggccugccagaagggcaacauccgcugcaacaucugcaucuga

SEQ ID NO: 107327 - RNA, 1701 nt, Artificial Sequence
  derived and/or modified CDS sequence (opt2) from hemagglutinin__InfluenzaA__AHL90397
augaagaccaucaucgcccucuccuacauccucugccucgucuucgcccagaagcuccccggcaacgacaacuccaccgccacccucugccucggccaccacgccguccccaacggcaccaucgucaagaccaucaccaacgaccagaucgaggucaccaacgccaccgagcucguccaguccuccuccaccggcgagaucugcgacuccccccaccagauccucgacggcgagaacugcacccucaucgacgcccuccucggcgacccccagugcgacggcuuccagaacaagaagugggaccucuucgucgagcgcuccaaggccuacuccaacugcuaccccuacgacguccccgacuacgccucccuccgcucccucgucgccuccuccggcacccucgaguucaacaacgaguccuucaacuggaccggcgucacccagaacggcaccuccuccgccugcauccgccgcuccaacaacuccuucuucucccgccucaacuggcucacccaccucaaguucaaguaccccgcccucaacgucaccaugcccaacaacgagcaguucgacaagcucuacaucuggggcguccaccaccccggcaccgacaacgaccagaucuuccucuacgcccaggccuccggccgcaucaccgucuccaccaagcgcucccagcagaccgucauccccaacaucggcucccgcccccgcguccgcaacauccccucccgcaucuccaucuacuggaccaucgucaagcccggcgacauccuccucaucaacuccaccggcaaccucaucgccccccgcggcuacuucaagauccgcuccggcaaguccuccaucaugcgcuccgacgcccccaucggcaagugcuccuccgagugcaucacccccaacggcuccauccccaacgacaagcccuuccagaacgucaaccgcaucaccuacggcgccugcccccgcuacgucaagcagaacacccucaagcucgccaccggcaugcgcaacguccccgagaagcagacccgcggcaucuucggcgccaucgccggcuucaucgagaacggcugggagggcauggucgacggcugguacggcuuccgccaccagaacuccgagggccgcggccaggccgccgaccucaaguccacccaggccgccaucgaccagaucaacggcaagcucaaccgccucaucggcaagaccaacgagaaguuccaccagaucgagaaggaguucuccgaggucgagggccgcauccaggaccucgagaaguacgucgaggacaccaagaucgaccucugguccuacaacgccgagcuccucgucgcccucgagaaccagcacaccaucgaccucaccgacuccgagaugaacaagcucuucgagaagaccaagaagcagcuccgcgagaacgccgaggacaugggcaacggcugcuucaagaucuaccacaagugcgacaacgccugcaucggcuccauccgcaacggcaccuacgaccacgacgucuaccgcgacgaggcccucaacaaccgcuuccagaucaagggcgucgagcucaaguccggcuacaaggacuggauccucuggaucuccuucgccaucuccugcuuccuccucugcgucgcccuccucggcuucaucaugugggccugccagaagggcaacauccgcugcaacaucugcaucuga

SEQ ID NO: 107328 - RNA, 1701 nt, Artificial Sequence; identical to SEQ ID NO: 98470
  derived and/or modified CDS sequence (opt2) from hemagglutinin__InfluenzaA__AHL90410

SEQ ID NO: 107329 - RNA, 1701 nt, Artificial Sequence
  derived and/or modified CDS sequence (opt2) from hemagglutinin__InfluenzaA__AHL90422
augaagaccaucaucgcccucuccuacauccucugccucgucuucgcccagaagcuccccggcaacgacaacuccaccgccacccucugccucggccaccacgccguccccaacggcaccaucgucaagaccaucaccaacgaccagaucgaggucaccaacgccaccgagcucguccaguccuccuccaccggcgagaucugcgacuccccccaccagauccucgacggcgagaacugcacccucaucgacgcccuccucggcgacccccagugcgacggcuuccagaacaagaagugggaccucuucgucgagcgcuccaaggccuacuccaacugcuaccccuacgacguccccgacuacgccucccuccgcucccucgucgccuccuccggcacccucgaguucaacaacgaguccuucaacuggaccggcgucacccagaacggcaccuccuccgccugcauccgccgcuccaacaacuccuucuucucccgccucaacuggcucacccacuccaaguucaaguaccccgcccucaacgucaccaugcccaacaacgaggaguucgacaagcucuacaucuggggcguccaccaccccggcaccgacaacgaccagaucuuccucuacgcccaggccuccggccgcaucaccgucuccaccaagcgcucccagcagaccgucauccccaacaucggcucccgcccccgcguccgcaacauccccucccgcaucuccaucuacuggaccaucgucaagcccggcgacauccuccucaucaacuccaccggcaaccucaucgccccccgcggcuacuucaagauccgcuccggcaaguccuccaucaugcgcuccgacgcccccaucggcaagugcaacuccgagugcaucacccccaacggcuccauccccaacgacaagcccuuccagaacgucaaccgcaucaccuacggcgccugcccccgcuacgucaagcagaacacccucaagcucgccaccggcaugcgcaacguccccgagaagcagacccgcggcaucuucggcgccaucgccggcuucaucgagaacggcugggagggcauggucgacggcugguacggcuuccgccaccagaacuccgagggcaucggccaggccgccgaccucaaguccacccaggccgccaucgaccagaucaacggcaagcucaaccgccucaucggcaagaccaacgagaaguuccaccagaucgagaaggaguucuccgaggucgagggccgcauccaggaccucgagaaguacgucgaggacaccaagaucgaccucugguccuacaacgccgagcuccucgucgcccucgagaaccagcacaccaucgaccucaccgacuccgagauguccaagcucuucgagaagaccaagaagcagcuccgcgagaacgccgaggacaugggcaacggcugcuucaagaucuaccacaagugcgacaacaccugcaucggcuccauccgcaacggcaccuacgaccacaacgucuaccgcgacgaggcccucaacaaccgcuuccagaucaagggcgucgagcucaaguccggcuacaaggacuggauccucuggaucuccuucgccaucuccugcuuccuccucugcgucgcccuccucggcuucaucaugugggccugccagaagggcaacauccgcugcaacaucugcaucuga

SEQ ID NO: 107330 - RNA, 1701 nt, Artificial Sequence; identical to SEQ ID NO: 98470
  derived and/or modified CDS sequence (opt2) from hemagglutinin__InfluenzaA__AHL90434

SEQ ID NO: 107331 - RNA, 1701 nt, Artificial Sequence; identical to SEQ ID NO: 98470
  derived and/or modified CDS sequence (opt2) from hemagglutinin__InfluenzaA__AHL90446

SEQ ID NO: 107332 - RNA, 1701 nt, Artificial Sequence
  derived and/or modified CDS sequence (opt2) from hemagglutinin__InfluenzaA__AHL90458
augaagaccaucaucgcccucuccuacauccucugccucgucuucgcccagaagcuccccggcaacgacaacuccaccgccacccucugccucggccaccacgccguccccaacggcaccaucgucaagaccaucaccaacgaccagaucgaggucaccaacgccaccgagcucguccaguccuccuccaccggcgagaucugcgacuccccccaccagauccucgacggcgagaacugcgcccucaucgacgcccuccucggcgacccccagugcgacggcuuccagaacaagaagugggaccucuucgucgagcgcuccaaggccuacuccaacugcuaccccuacgacguccccgacuacgccucccuccgcucccucgucgccuccuccggcacccucgaguucaacaacgaguccuucaacuggaccggcgucacccagaacggcaccuccuccgccugcauccgccgcuccaacaacuccuucuucucccgccucaacuggcucacccaccucaaguucaaguaccccgcccucaacgucaccaugcccaacaacgagcaguucgacaagcucuacaucuggggcguccaccaccccggcaccgacaacgaccagaucuuccucuacgcccaggccuccggccgcaucaccgucuccaccaagcgcucccagcagaccgucauccccaacaucggcucccgcccccgcguccgcaacauccccucccgcaucuccaucuacuggaccaucgucaagcccggcgacauccuccucaucaacuccaccggcaaccucaucgccccccgcggcuacuucaagauccgcuccggcaaguccuccaucaugcgcuccgacgcccccaucggcaagugcaacuccgagugcaucacccccaacggcuccauccccaacgacaagcccuuccagaacgucaaccgcaucaccuacggcgccugcccccgcuacgucaagcagaacacccucaagcucgccaccggcaugcgcaacguccccgagaagcagacccgcggcaucuucggcgccaucgccggcuucaucgagaacggcugggagggcauggucgacggcugguacggcuuccgccaccagaacuccgagggccgcggccaggccgccgaccucaaguccacccaggccgccaucgaccagaucaacggcaagcucaaccgccucaucggcaagaccaacgagaaguuccaccagaucgagaaggaguucuccgaggucgagggccgcauccaggaccucgagaaguacgucgaggacaccaagaucgaccucugguccuacaacgccgagcuccucgucgcccucgagaaccagcacaccaucgaccucaccgacuccgagaugaacaagcucuucgagaagaccaagaagcagcuccgcgagaacgccgaggacaugggcaacggcugcuucaagaucuaccacaagugcgacaacgccugcaucggcuccauccgcaacggcaccuacgaccacgacgucuaccgcgacgaggcccucaacaaccgcuuccagaucaagggcgucgagcucaaguccggcuacaaggacuggauccucuggaucuccuucgccaucuccugcuuccuccucugcgucgcccuccucggcuucaucaugugggccugccagaagggcaacauccgcugcaacaucugcaucuga

SEQ ID NO: 107333 - RNA, 1701 nt, Artificial Sequence; identical to SEQ ID NO: 98470
  derived and/or modified CDS sequence (opt2) from hemagglutinin__InfluenzaA__AHL90470

SEQ ID NO: 107334 - RNA, 1701 nt, Artificial Sequence; identical to SEQ ID NO: 98470
  derived and/or modified CDS sequence (opt2) from hemagglutinin__InfluenzaA__AHL90482

SEQ ID NO: 107335 - RNA, 1701 nt, Artificial Sequence; identical to SEQ ID NO: 98573
  derived and/or modified CDS sequence (opt2) from hemagglutinin__InfluenzaA__AHL90494

SEQ ID NO: 107336 - RNA, 1701 nt, Artificial Sequence; identical to SEQ ID NO: 98573
  derived and/or modified CDS sequence (opt2) from hemagglutinin__InfluenzaA__AHL90506

SEQ ID NO: 107337 - RNA, 1701 nt, Artificial Sequence
  derived and/or modified CDS sequence (opt2) from hemagglutinin__InfluenzaA__AHL90518
augaagaccaucaucgcccucuccuacauccucugccucgucuucgcccagaagcuccccggcaacgacaacuccaccgccacccucugccucggccaccacgccguccccaacggcaccaucgucaagaccaucaccaacgaccagaucgaggucaccaacgccaccgagcucguccaguccuccuccaccggcgagaucugcgacuccccccaccagauccucgacggcgagaacugcacccucaucgacgcccuccucggcgacccccagugcgacggcuuccagaacaagaagugggaccucuucgucgagcgcuccaaggccuacuccaacugcuaccccuacgacguccccgacuacgccucccuccgcucccucgucgccuccuccggcacccucgaguucaagaacgaguccuucaacuggaccggcgucacccagaacggcaccuccuccgccugcauccgccgcuccaacaacuccuucuucucccgccucaacuggcucacccaccucaaguucaaguaccccgcccucaacgucaccaugcccaacaaggagaaguucgacaagcucuacaucuggggcguccaccaccccggcaccgacaacgaccagaucuuccucuacgcccaggccuccggccgcaucaccgucuccaccaagcgcucccagcagaccgucauccccaacaucggcucccgcccccgcguccgcaacauccccucccgcaucuccaucuacuggaccaucgucaagcccggcgacauccuccucaucaacuccaccggcaaccucaucgccccccgcggcuacuucaagauccgcuccggcaaguccuccaucaugcgcuccgacgcccccaucggcaagugcaacuccgagugcaucacccccaacggcuccauccccaacgacaagcccuuccagaacgucaaccgcaucaccuacggcgccugcccccgcuacgucaagcagaacacccucaagcucgccaccggcaugcgcaacguccccgagaagcagacccgcggcaucuucggcgccaucgccggcuucaucgagaacggcugggagggcauggucgacggcugguacggcuuccgccaccagaacuccgagggcaccggccaggccgccgaccucaaguccacccaggccgccaucgaccagaucaacggcaagcucaaccgccucaucggcaagaccaacgagaaguuccaccagaucgagaaggaguucuccgaggucgagggccgcauccaggaccucgagaaguacgucgaggacaccaagaucgaccucugguccuacaacgccgagcuccucgucgcccucgagaaccagcacaccaucgaccucaccgacuccgagaugaacaagcucuucgagaagaccaagaagcagcuccgcgagaacgccgaggacaugggcaacggcugcuucaagaucuaccacaagugcgacaacgccugcaucggcuccauccgcaacggcaccuacgaccacgacgucuaccgcgacgaggcccucaacaaccgcuuccagaucaagggcgucgagcucaaguccggcuacaaggacuggauccucuggaucuccuucgccaucuccugcuuccuccucugcgucgcccuccucggcuucaucaugugggccugccagaagggcaacauccgcugcaacaucugcaucuga

SEQ ID NO: 107338 - RNA, 1701 nt, Artificial Sequence; identical to SEQ ID NO: 99249
  derived and/or modified CDS sequence (opt2) from hemagglutinin__InfluenzaA__AHL90530

SEQ ID NO: 107339 - RNA, 1701 nt, Artificial Sequence; identical to SEQ ID NO: 98470
  derived and/or modified CDS sequence (opt2) from hemagglutinin__InfluenzaA__AHL90542

SEQ ID NO: 107340 - RNA, 1701 nt, Artificial Sequence; identical to SEQ ID NO: 98470
  derived and/or modified CDS sequence (opt2) from hemagglutinin__InfluenzaA__AHL90554

SEQ ID NO: 107341 - RNA, 1701 nt, Artificial Sequence; identical to SEQ ID NO: 98470
  derived and/or modified CDS sequence (opt2) from hemagglutinin__InfluenzaA__AHL90566

SEQ ID NO: 107342 - RNA, 1701 nt, Artificial Sequence; identical to SEQ ID NO: 98470
  derived and/or modified CDS sequence (opt2) from hemagglutinin__InfluenzaA__AHL90578

SEQ ID NO: 107343 - RNA, 1701 nt, Artificial Sequence; identical to SEQ ID NO: 98573
  derived and/or modified CDS sequence (opt2) from hemagglutinin__InfluenzaA__AHL90590

SEQ ID NO: 107344 - RNA, 1701 nt, Artificial Sequence; identical to SEQ ID NO: 98470
  derived and/or modified CDS sequence (opt2) from hemagglutinin__InfluenzaA__AHL90602

SEQ ID NO: 107345 - RNA, 1701 nt, Artificial Sequence; identical to SEQ ID NO: 98470
  derived and/or modified CDS sequence (opt2) from hemagglutinin__InfluenzaA__AHL90614

SEQ ID NO: 107346 - RNA, 1701 nt, Artificial Sequence
  derived and/or modified CDS sequence (opt2) from hemagglutinin__InfluenzaA__AHL90638
augaagaccaucaucgcccucuccuacauccucugccucgucuucgcccagaagcuccccggcaacgacaacuccaccgccacccucugccucggccaccacgccguccccaacggcaccaucgucaagaccaucaccaacgaccagaucgaggucaccaacgccaccgagcucguccaguccuccuccaccggcgagaucugcgacuccccccaccagauccucgacggcgagaacugcacccucaucgacgcccuccucggcgacccccagugcgacggcuuccagaacaagaagugggaccucuucgucgagcgcuccaaggccuacuccaacugcuaccccuacgacguccccgacuacgccucccuccgcucccucgucgccuccuccggcacccucgaguucaacaacgaguccuucaacuggaccggcgucacccagaacggcaccuccuccgccugcauccgccgcuccaacaacuccuucuucucccgccucaacuggcucacccaccucaaguucaaguaccccgcccucaacgucaccaugcccaacaacgagcaguucgacaagcucuacaucuggggcguccaccaccccggcaccgacaacgaccagaucuuccucuacgcccaggccuccggccgcaucaccgucuccaccaagcgcucccagcagaccgucauccccaacaucggcucccgcccccgcguccgcaacauccccucccgcaucuccaucuacuggaccaucgucaagcccggcgacauccuccucaucaacuccaccggcaaccucaucgccccccgcggcuacuucaagauccgcucccgcaaguccuccaucaugcgcuccgacgcccccaucggcaagugcaacuccgagugcaucacccccaacggcuccauccccaacgacaagcccuuccagaacgucaaccgcaucaccuacggcgccugcccccgcuacgucaagcagaacacccucaagcucgccaccggcaugcgcaacguccccgagaagcagacccgcggcaucuucggcgccaucgccggcuucaucgagaacggcugggagggcauggucgacggcugguacggcuuccgccaccagaacuccgagggccgcggccaggccgccgaccucaaguccacccaggccgccaucgaccagaucaacggcaagcucaaccgccucaucggcaagaccaacgagaaguuccaccagaucgagaaggaguucuccgaggucgagggccgcauccaggaccucgagaaguacgucgaggacaccaagaucgaccucugguccuacaacgccgagcuccucgucgcccucgagaaccagcacaccaucgaccucaccgacuccgagaugaacaagcucuucgagaagaccaagaagcagcuccgcgagaacgccgaggacaugggcaacggcugcuucaagaucuaccacaagugcgacaacgccugcaucggcuccauccgcaacggcaccuacgaccacgacgucuaccgcgacgaggcccucaacaaccgcuuccagaucaagggcgucgagcucaaguccggcuacaaggacuggauccucuggaucuccuucgccaucuccugcuuccuccucugcgucgcccuccucggcuucaucaugugggccugccagaagggcaacauccgcugcaacaucugcaucuga

SEQ ID NO: 107347 - RNA, 1701 nt, Artificial Sequence
  derived and/or modified CDS sequence (opt2) from hemagglutinin__InfluenzaA__AHL90650
augaagaccaucaucgcccucuccuacauccucugccucgucuucgcccagaagcuccccggcaacgacaacuccaccgccacccucugccucggccaccacgccguccccaacggcaccaucgucaagaccaucaccaacgaccagaucgaggucaccaacgccaccgagcucguccaguccuccuccaccggcgagaucugcgacuccccccaccagauccucgacggcgagaacugcacccucaucgacgcccuccucggcgacccccagugcgacggcuuccagaacaagaagugggaccucuucgucgagcgcuccaaggccuacuccaacugcuaccccuacgacguccccgacuacgccucccuccgcucccucgucgccuccuccggcacccucgaguucaacaacgaguccuucaacuggaccggcgucacccagaacggcaccuccuccgccugcauccgccgcuccaacaacuccuucuucucccgccucaacuggcucacccaccucaaguucaaguaccccgcccucaacgucaccaugcccaacaacgagcaguucgacaagcucuacaucuggggcguccaccaccccggcaccgacaacgaccagaccuuccucuacgcccaggccuccggccgcaucaccgucuccaccaagcgcucccagcagaccgucauccccaacaucggcucccgcccccgcguccgcaacauccccucccgcaucuccaucuacuggaccaucgucaagcccggcgacauccuccucaucaacuccaccggcaaccucaucgccccccgcggcuacuucaagauccgcuccggcaaguccuccaucaugcgcuccgacgcccccaucggcaagugcaacuccgagugcaucacccccaacggcuccauccccaacgacaagcccuuccagaacgucaaccgcaucaccuacggcgccugcccccgcuacgucaagcagaacacccucaagcucgccaccggcaugcgcaacguccccgagaagcagacccgcggcaucuucggcgccaucgccggcuucaucgagaacggcugggagggcauggucgacggcugguacggcuuccgccaccagaacuccgagggccgcggccaggccgccgaccucaaguccacccaggccgccaucgaccagaucaacggcaagcucaaccgccucaucggcaagaccaacgagaaguuccaccagaucgagaaggaguucuccgaggucgagggccgcauccaggaccucgagaaguacgucgaggacaccaagaucgaccucugguccuacaacgccgagcuccucgucgcccucgagaaccagcacaccaucgaccucaccgacuccgagaugaacaagcucuucgagaagaccaagaagcagcuccgcgagaacgccgaggacaugggcaacggcugcuucaagaucuaccacaagugcgacaacgccugcaucggcuccauccgcaacggcaccuacgaccacgacgucuaccgcgacgaggcccucaacaaccgcuuccagaucaagggcgucgagcucaaguccggcuacaaggacuggauccucuggaucuccuucgccaucuccugcuuccuccucugcgucgcccuccucggcuucaucaugugggccugccagaagggcaacauccgcugcaacaucugcaucuga

SEQ ID NO: 107348 - RNA, 1701 nt, Artificial Sequence; identical to SEQ ID NO: 98470
  derived and/or modified CDS sequence (opt2) from hemagglutinin__InfluenzaA__AHL90662

SEQ ID NO: 107349 - RNA, 1701 nt, Artificial Sequence
  derived and/or modified CDS sequence (opt2) from hemagglutinin__InfluenzaA__AHL90674
augaagaccaucaucgcccucuccuacauccucugccucgucuucgcccagaagcuccccggcaacgacaacuccaccgccacccucugccucggccaccacgccguccccaacggcaccaucgucaagaccaucaccaacgaccagaucgaggucaccaacgccaccgagcucguccaguccuccuccaccggcgagaucugcgacuccccccaccagauccucgacggcgagaacugcacccucaucgacgcccuccucggcgacccccagugcgacggcuuccagaacaagaagugggaccucuucgucgagcgcuccaaggccuacuccaacugcuaccccuacgacguccccgacuacgccucccuccgcucccucgucgccuccuccggcacccucgaguucaacaacgaguccuucaacuggaccggcgucacccagaacggcaccuccuccgccugcauccgccgcuccaacaacuccuucuucucccgccucaacuggcucacccaccucaaguucaaguaccccgcccucaacgucaccaugcccaacaacgagaaguucgacaagcucuacaucuggggcguccaccaccccggcaccgacaacgaccagaucuuccucuacgcccaggccuccggccgcaucaccgucuccaccaagcgcucccagcagaccgucauccccaacaucggcucccgcccccgcguccgcaacauccccucccgcaucuccaucuacuggaccaucgucaagcccggcgacauccuccucaucaacuccaccggcaaccucaucgccccccgcggcuacuucaagauccgcuccggcaaguccuccaucaugcgcuccgacgcccccaucggcaagugcaacuccgagugcaucacccccaacggcuccauccccaacgacaagcccuuccagaacgucaaccgcaucaccuacggcgccugcccccgcuacgucaagcagaacacccucaagcucgccaccggcaugcgcaacguccccgagaagcagacccgcggcaucuucggcgccaucgccggcuucaucgagaacggcugggagggcauggucgacggcugguacggcuuccgccaccagaacuccgagggcaucggccaggccgccgaccucaaguccacccaggccgccaucgaccagaucaacggcaagcucaaccgccucaucggcaagaccaacgagaaguuccaccagaucgagaaggaguucuccgaggucgagggccgcauccaggaccucgagaaguacgucgaggacaccaagaucgaccucugguccuacaacgccgagcuccucgucgcccucgagaaccagcacaccaucgaccucaccgacuccgagaugaacaagcucuucgagaagaccaagaagcagcuccgcgagaacgccgaggacaugggcaacggcugcuucaagaucuaccacaagugcgacaacgucugcaucggcuccauccgcaacggcaccuacgaccacgacgucuaccgcgacgaggcccucaacaaccgcuuccagaucaagggcgucgagcucaaguccggcuacaaggacuggauccucuggaucuccuucgccaucuccugcuuccuccucugcgucgcccuccucggcuucaucaugugggccugccagaagggcaacauccgcugcaacaucugcaucuga

SEQ ID NO: 107350 - RNA, 1701 nt, Artificial Sequence
  derived and/or modified CDS sequence (opt2) from hemagglutinin__InfluenzaA__AHL90686
augaagaccaucaucgcccucuccuacauccucugccucgucuucgcccagaagcuccccggcaacgacaacuccaccgccacccucugccucggccaccacgccguccccaacggcaccaucgucaagaccaucaccaacgaccagaucgaggucaccaacgccaccgagcucguccaguccuccuccaccggcgagaucugcgacuccccccaccagauccucgacggcgagaacugcacccucaucgacgcccuccucggcgacccccagugcgacggcuuccagaacaagaagugggaccucuucgucgagcgcuccaaggccuacuccaacugcuaccccuacgacguccccgacuacgccucccuccgcucccucgucgccuccuccggcacccucgaguucaacaacgaguccuucaacuggaccggcgucacccagaacggcaccuccuccgccugcauccgccgcuccaacaacuccuucuucucccgccucaacuggcucacccaccucaaguucaaguaccccgcccucaacgucaccaugcccaacaacgagcaguucgacaagcucuacaucuggggcguccaccaccccggcaccgacaacgaccagaucuuccucuacgcccaggccuccggccgcaucaccgucuccaccaagcgcucccagcagaccgucauccccaacaucggcucccgcccccgcguccgcaacauccccucccgcaucuccaucuacuggaccaucgucaagcccggcgacauccuccucaucaacuccaccggcaaccucaucgccccccgcggcuacuucaagauccgcuccggcaaguccuccaucaugcgcuccgacgcccccaucggcaagugcaacuccgagugcaucacccccaacggcuccauccccaacgacaagcccuuccagaacgucaaccgcaucaccuacggcgccugcccccgcuacgucaagcagaacacccucaagcucgccaccggcaugcgcaacguccccgagaagcagacccgcggcaucuucggcgccaucgccggcuucaucgagaacggcugggagggcauggucgacggcugguacggcuuccgccaccagaacuccgagggccgcggccaggccgccgaccucaaguccacccaggccgccaucgaccagaucaacggcaagcucaaccgccucaucggcaagaccaacgagaaguuccaccagaucgagaaggaguucuccgaggucgagggccgcauccaggaccucgagaaguacgucgaggacaccaagaucgaccucugguccuacaacgccgagcuccucgucgccauggagaaccagcacaccaucgaccucaccgacuccgagaugaacaagcucuucgagaagaccaagaagcagcuccgcgagaacgccgaggacaugggcaacggcugcuucaagaucuaccacaagugcgacaacgccugcaucggcuccauccgcaacggcaccuacgaccacgacgucuaccgcgacgaggcccucaacaaccgcuuccagaucaagggcgucgagcucaaguccggcuacaaggacuggauccucuggaucuccuucgccaucuccugcuuccuccucugcgucgcccuccucggcuucaucaugugggccugccagaagggcaacauccgcugcaacaucugcaucuga

SEQ ID NO: 107351 - RNA, 1701 nt, Artificial Sequence; identical to SEQ ID NO: 98470
  derived and/or modified CDS sequence (opt2) from hemagglutinin__InfluenzaA__AHL90698

SEQ ID NO: 107352 - RNA, 1701 nt, Artificial Sequence; identical to SEQ ID NO: 98470
  derived and/or modified CDS sequence (opt2) from hemagglutinin__InfluenzaA__AHL90710

SEQ ID NO: 107353 - RNA, 1698 nt, Artificial Sequence; identical to SEQ ID NO: 102008
  derived and/or modified CDS sequence (opt2) from hemagglutinin__InfluenzaA__AHL90722

SEQ ID NO: 107354 - RNA, 1698 nt, Artificial Sequence
  derived and/or modified CDS sequence (opt2) from hemagglutinin__InfluenzaA__AHL90746
augaaggucaagcuccucguccuccucugcaccuucaccgccaccuacgccgacaccaucugcaucggcuaccacgccaacaacuccaccgacaccgucgacaccguccucgagaagaacgucaccgucacccacuccgucaaccuccucgagaacucccacaacggcaagcucugccuccucaagggcaucgccccccuccagcucggcaacugcuccgucgccggcuggauccucggcaaccccgagugcgagcuccucaucuccaaggaguccugguccuacaucgucgagaagcccaaccccgagaacggcaccugcuaccccggccacuucgccgacuacgaggagcuccgcgagcagcucuccuccgucuccuccuucaagcgcuucgagaucuuccccaaggaguccuccuggcccaaccacaccgucaccggcgucuccgccuccugcucccacaacggcgaguccuccuucuaccgcaaccuccucuggcucaccggcaagaacggccucuaccccaaccucuccaaguccuacgccaacaacaaggagaaggagguccucguccucuggggcguccaccacccccccaacaucgucgaccagaagacccucuaccgcaccgagaacgccuacgucuccgucgucuccucccacuacucccgcaaguucacccccgagaucgccaagcgccccaagguccgcgaccaggagggccgcaucaacuacuacuggacccuccucgagcccggcgacaccaucaucuucgaggccaacggcaaccucaucgccccccgcuacgccuucgcccucucccgcggcuucggcuccggcaucaucaacuccaacgcccccaugggcaagugcgacgccaagugccagaccccccagggcgccaucaacuccucccuccccuuccagaacguccaccccgucaccaucggcgagugccccaaguacguccgcuccgccaagcuccgcauggucaccggccuccgcaacauccccuccauccagucccgcggccucuucggcgccaucgccggcuucaucgagggcggcuggaccggcauggucgacggcugguacggcuaccaccaccagaacgagcagggcuccggcuacgccgccgaccagaaguccacccagaacgccaucaacggcaucaccaacaaggucaacuccgucaucgagaagaugaacacccaguucaccgccgucggcaaggaguucaacaagcucgagcgccgcauggagaaccucaacaagaaggucgacgacggcuucaucgacaucuggaccuacaacgccgagcuccucguccuccucgagaacgagcgcacccucgacuuccacgacuccaacgucaagaaccucuacgagaaggucaagucccagcucaagaacaacgccaaggagaucggcaacggcugcuucgaguucuaccacaagugcaacgacgagugcauggaguccgucaagaacggcaccuacgacuaccccaaguacuccgaggaguccaagcucaaccgcgagaagaucgacggcgucaagcucgaguccaugggcgucuaccagauccucgccaucuacuccaccgucgccuccucccucguccuccucgucucccucggcgccaucuccuucuggaugugcuccaacggcucccuccagugccgcaucugcaucuga

SEQ ID NO: 107355 - RNA, 1698 nt, Artificial Sequence; identical to SEQ ID NO: 99167
  derived and/or modified CDS sequence (opt2) from hemagglutinin__InfluenzaA__AHL90758

SEQ ID NO: 107356 - RNA, 1698 nt, Artificial Sequence
  derived and/or modified CDS sequence (opt2) from hemagglutinin__InfluenzaA__AHL90770
augaaggucaagcuccucguccuccucugcaccuucaccgccaccuacgccgacaccaucugcaucggcuaccacgccaacaacuccaccgacaccgucgacaccguccucgagaagaacgucaccgucacccacuccgucaaccuccucgagaacucccacaacggcaagcucugccuccucaagggcaucgccccccuccagcucggcaacugcuccgucgccggcuggauccucggcaaccccgagugcgagcuccucaucuccaaggaguccugguccuacaucgucgagaagcccaaccccgagaacggcaccugcuaccccggccacuucgccgacuacgaggagcuccgcgagcagcucuccuccgucuccuccuucgagcgcuucgagaucuuccccaaggacuccuccuggcccaaccacaccgucaccggcgucuccgccuccugcucccacaacggcgaguccuccuucuaccgcaaccuccucuggcucaccggcaagaacggccucuaccccaaccucuccaaguccuacgccaacaacaaggagaaggagguccucguccucuggggcguccaccacccccccuccaucaacgaccagaagacccucuaccacaccgagaacgccuacgucuccgucgucuccucccaccacucccgcaaguucacccccgagaucgccaagcgccccaagguccgcgaccaggagggccgcaucaacuacuacuggacccuccucgagcccggcgacaccaucaucuucgaggccaacggcaaccucaucgccccccgcuacgccuucgcccucucccgcggcuucggcuccggcaucaucaacuccaacgcccccauggacaagugcgacgccaagugccagaccccccagggcgccaucaacuccucccuccccuuccagaacguccaccccgucaccaucggcgagugccccaaguacguccgcuccgccaagcuccgcauggucaccggccuccgcaacauccccuccauccagucccgcggccucuucggcgccaucgccggcuucaucgagggcggcuggaccggcauggucgacggcugguacggcuaccaccaccagaacgagcagggcuccggcuacgccgccgaccagaaguccacccagaacgccaucaacggcaucaccaacaaggucaacuccgucaucgagaagaugaacacccaguucaccgccgucggcaaggaguucaacaagcucgagcgccgcauggagaaccucaacaagaaggucgacgacggcuucaucgacaucuggaccuacaacgccgagcuccucguccuccucgagaacgagcgcacccucgacuuccacgacuccaacgucaagaaccucuacgagaaggucaagucccagcucaagaacaacgccaaggagaucggcaacggcugcuucgaguucuaccacaagugcaacgacgagugcauggaguccgucaagaacggcaccuacgacuaccccaaguacuccgaggaguccaagcucaaccgcgagaagaucgacggcgucaagcucgaguccaugggcgucuaccagauccucaccaucuacuccaccgucgccuccucccucguccuccucgucucccucggcgccaucuccuucuggaugugcuccaacggcucccuccagugccgcaucugcaucuga

SEQ ID NO: 107357 - RNA, 1698 nt, Artificial Sequence; identical to SEQ ID NO: 99652
  derived and/or modified CDS sequence (opt2) from hemagglutinin__InfluenzaA__AHL90782

SEQ ID NO: 107358 - RNA, 1698 nt, Artificial Sequence
  derived and/or modified CDS sequence (opt2) from hemagglutinin__InfluenzaA__AHL90794
augaaggucaagcuccucguccuccucugcaccuucaccgccaccuacgccgacaccaucugcaucggcuaccacgccaacaacuccaccgacaccgucgacaccguccucgagaagaacgucaccgucacccacuccgucaaccuccucgagaacucccacaacggcaagcucugccuccucaagggcaucgccccccuccagcucggcaacugcuccgucgccggcuggauccucggcaaccccgagugcgagcuccucaucuccaaggaguccugguccuacaucgucgagaagcccaaccccgagaacggcaccugcuaccccggccacuucgccgacuacgaggagcuccgcgagcagcucuccuccgucuccuccuucgagcgcuucgagaucuuccccaaggaguccuccuggcccaaccacaccgucaccggcgucuccgccuccugcucccacaacggcgaguccuccuucuaccgcaaccuccucuggcucaccggcaagaacggccucuaccccaaccucuccaaguccuacgccaacaacaaggagaaggagguccucguccucuggggcguccaccacccccccaacaucggcgaccagaacacccucuaccacaccgagaacgccuacgucuccgucgucuccucccacuacucccgcaaguucacccccgagaucgccaagcgccccaagguccgcgaccaggagggccgcaucaacuacuacuggacccuccucgagcccggcgacaccaucaucuucgaggccaacggcaaccucaucgccccccgcuacgccuucgcccucucccgcggcuucggcuccggcaucaucaacuccaacgcccccauggacaagugcgacgccaagugccagaccccccagggcgccaucaacuccucccuccccuuccagaacguccaccccgucaccaucggcgagugccccaaguacguccgcuccgccaagcuccgcauggucaccggccuccgcaacauccccuccauccagucccgcggccucuucggcgccaucgccggcuucaucgagggcggcuggaccggcauggucgacggcugguacggcuaccaccaccagaacgagcagggcuccggcuacgccgccgaccagaaguccacccagaacgccaucaacggcaucaccaacaaggucaacuccgucaucgagaagaugaacacccaguucaccgccgucggcaaggaguucaacaagcucgagcgccgcauggagaaccucaacaagaaggucgacgacggcuucaucgacaucuggaccuacaacgccgagcuccucguccuccucgagaacgagcgcacccucgacuuccacgacuccaacgucaagaaccucuacgagaaggucaagucccagcucaagaacaacgccaaggagaucggcaacggcugcuucgaguucuaccacaagugcaacgacgagugcauggaguccgucaagaacggcaccuacgacuaccccaaguacuccgaggaguccaagcucaaccgcgagaagaucgacggcgucaagcucgaguccaugggcgucuaccagauccucgccaucuacuccaccgucgccuccucccucguccuccucgucucccucggcgccaucuccuucuggaugugcuccaacggcucccuccagugccgcaucugcaucuga

SEQ ID NO: 107359 - RNA, 1698 nt, Artificial Sequence
  derived and/or modified CDS sequence (opt2) from hemagglutinin__InfluenzaA__AHL90806
augaaggucaagcuccucguccuccucugcaccuucaccgccaccuacgccgacaccaucugcaucggcuaccacgccaacaacuccaccgacaccgucgacaccguccucgagaagaacgucaccgucacccacuccgucaaccuccucgagaacucccacaacggcaagcucugccuccucaagggcaucgccccccuccagcucggcaacugcuccgucgccggcuggauccucggcaaccccgagugcgagcuccucaucuccaaggaguccugguccuacaucgucgagaagcccaaccccgagaacggcaccugcuaccccggccacuucgccgacuacgaggagcuccgcgagcagcucuccuccgucuccuccuucgagcgcuucgagaucuuccccaaggaguccuccuggcccaaccacaccgucaccggcgucuccgccuccugcucccacaacggcgaguccuccuucuaccgcaaccuccucuggcucaccggcaagaacggccucuaccccaaccucuccaaguccuacgccaacaacaaggagaaggagguccucguccucuggggcguccaccacccccccaacaucgucgaccagaagacccucuaccgcaccgagaacgccuacgucuccgucgucuccucccacuacucccgcaaguucacccccgagaucgccaagcgccccaagguccgcgaccaggagggccgcaucaacuacuacuggacccuccucgagcccggcgacaccaucaucuucgaggccaacggcaaccucaucgccccccgcuacgccuucgcccucucccgcggcuucggcuccggcaucaucaacuccaacgcccccauggacaagugcgacgccaagugccagaccccccagggcgccaucaacuccucccuccccuuccagaacguccaccccgucaccaucggcgagugccccaaguacguccgcuccgccaagcuccgcauggucaccggccuccgcaacauccccuccauccagucccgcggccucuucggcgccaucgccggcuucaucgagggcggcuggaccggcauggucgacggcugguacggcuaccaccaccagaacgagcagggcuccggcuacgccgccgaccagaaguccacccagaacgccaucaacggcaucaccaacaaggucaacuccgucaucgagaagaugaacacccaguucaccgccgucggcaaggaguucaacaagcucgagcgccgcauggagaaccucaacaagaaggucgacgacggcuucaucgacaucuggaccuacaacgccgagcuccucguccuccucgagaacgagcgcacccucgacuuccacgacuccaacgucaagaaccucuacgagaaggucaagucccagcucaagaacaacgccaaggagaucggcaacggcugcuucgaguucuaccacaagugcaacgacgagugcauggaguccgucaagaacggcaccuacgacuaccccaaguacuccgaggaguccaagcucaaccgcgagaagaucgacggcgucaagcucgaguccaugggcgucuaccagauccucgccaucuacuccaccgucgccuccucccucguccuccucaucucccucggcgccaucuccuucuggaugugcuccaacggcucccuccagugccgcaucugcaucuga

SEQ ID NO: 107360 - RNA, 1698 nt, Artificial Sequence; identical to SEQ ID NO: 102008
  derived and/or modified CDS sequence (opt2) from hemagglutinin__InfluenzaA__AHL90818

SEQ ID NO: 107361 - RNA, 1698 nt, Artificial Sequence; identical to SEQ ID NO: 102008
  derived and/or modified CDS sequence (opt2) from hemagglutinin__InfluenzaA__AHL90830

SEQ ID NO: 107362 - RNA, 1698 nt, Artificial Sequence; identical to SEQ ID NO: 99167
  derived and/or modified CDS sequence (opt2) from hemagglutinin__InfluenzaA__AHL90842

SEQ ID NO: 107363 - RNA, 1698 nt, Artificial Sequence; identical to SEQ ID NO: 101549
  derived and/or modified CDS sequence (opt2) from hemagglutinin__InfluenzaA__AHL90854

SEQ ID NO: 107364 - RNA, 1698 nt, Artificial Sequence; identical to SEQ ID NO: 99167
  derived and/or modified CDS sequence (opt2) from hemagglutinin__InfluenzaA__AHL90866

SEQ ID NO: 107365 - RNA, 1698 nt, Artificial Sequence; identical to SEQ ID NO: 101549
  derived and/or modified CDS sequence (opt2) from hemagglutinin__InfluenzaA__AHL90878

SEQ ID NO: 107366 - RNA, 1698 nt, Artificial Sequence; identical to SEQ ID NO: 102008
  derived and/or modified CDS sequence (opt2) from hemagglutinin__InfluenzaA__AHL90890

SEQ ID NO: 107367 - RNA, 1698 nt, Artificial Sequence; identical to SEQ ID NO: 101549
  derived and/or modified CDS sequence (opt2) from hemagglutinin__InfluenzaA__AHL90902

SEQ ID NO: 107368 - RNA, 1698 nt, Artificial Sequence; identical to SEQ ID NO: 99167
  derived and/or modified CDS sequence (opt2) from hemagglutinin__InfluenzaA__AHL90914

SEQ ID NO: 107369 - RNA, 1698 nt, Artificial Sequence; identical to SEQ ID NO: 101549
  derived and/or modified CDS sequence (opt2) from hemagglutinin__InfluenzaA__AHL90938

SEQ ID NO: 107370 - RNA, 1698 nt, Artificial Sequence; identical to SEQ ID NO: 101549
  derived and/or modified CDS sequence (opt2) from hemagglutinin__InfluenzaA__AHL90950

SEQ ID NO: 107371 - RNA, 1698 nt, Artificial Sequence; identical to SEQ ID NO: 101549
  derived and/or modified CDS sequence (opt2) from hemagglutinin__InfluenzaA__AHL90962

SEQ ID NO: 107372 - RNA, 1698 nt, Artificial Sequence
  derived and/or modified CDS sequence (opt2) from hemagglutinin__InfluenzaA__AHL90974
augaaggucaagcuccucguccuccucugcaccuucaccgccaccuacgccgacaccaucugcaucggcuaccacgccaacaacuccaccgacaccgucgacaccguccucgagaagaacgucaccgucacccacuccgucaaccuccucgagaacucccacaacggcaagcucugccuccucaagggcaucgccccccuccagcucggcaacugcuccgucgccggcuggauccucggcaaccccgagugcgagcuccucaucuccaaggaguccugguccuacaucgucgagaagcccaaccccgagaacggcaccugcuaccccggccacuucgccgacuacgaggagcuccgcgagcagcucuccuccgucuccuccuucgagcgcuucgagaucuuccccaaggaguccuccuggcccaaccacaccgucaccggcgucuccgccuccugcucccacaacggcgaguccuccuucuaccgcaaccuccucuggcucaccggcaagaacggccucuaccccaaccucuccaaguccuacgccaacaacaaggagaaggagguccucguccucuggggcguccaccacccccccuccaucuccgaccagaagacccucuaccacaccgagaacgccuacgucuccgucgucuccucccacuacucccgcaaguucacccccgaggucgccaagcgccccaagguccgcgaccaggagggccgcaucaacuacuacuggacccuccucgagcccggcgacaccaucaucuucgaggccaacggcaaccucaucgccccccgcuacgccuucgcccucucccgcggcuucggcuccggcaucaucaacuccaacgcccccauggacaagugcgacgccaagugccagaccccccagggcgccaucaacuccucccuccccuuccagaacguccaccccgucaccaucggcgagugccccaaguacguccgcuccgccaagcuccgcauggucaccggccuccgcaacauccccuccauccagucccgcggccucuucggcgccaucgccggcuucaucgagggcggcuggaccggcauggucgacggcugguacggcuaccaccaccagaacgagcagggcuccggcuacgccgccgaccagaaguccacccagaacgccaucaacggcaucaccaacaaggucaacuccgucaucgagaagaugaacacccaguucaccgccgucggcaaggaguucaacaagcucgagcgccgcauggagaaccucaacaagaaggucgacgacggcuucaucgacaucuggaccuacaacgccgagcuccucguccuccucgagaacgagcgcacccucgacuuccacgacuccaacgucaagaaccucuacgagaaggucaagggccagcucaagaacaacgccaaggagaucggcaacggcugcuucgaguucuaccacaagugcaacgacgagugcauggaguccgucaagaacggcaccuacgacuaccccaaguacuccgaggaguccaagcucaaccgcgagaagaucgacggcgucaagcucgaguccaugggcgucuaccagauccucgccaucuacuccaccgucgccuccucccucguccuccucgucucccucggcgccaucuccuucuggaugugcuccaacggcucccuccagugccgcaucugcaucuga

SEQ ID NO: 107373 - RNA, 1698 nt, Artificial Sequence
  derived and/or modified CDS sequence (opt2) from hemagglutinin__InfluenzaA__AHL90986
augaaggucaagcuccucguccuccucugcaccuucaccgccaccuacgccgacaccaucugcaucggcuaccacgccaacaacuccaccgacaccgucgacaccguccucgagaagaacgucaccgucacccacuccgucaaccuccucgagaacucccacaacggcaagcucugccuccucaagggcaucgccccccuccagcucggcaacugcuccgucgccggcuggauccucggcaaccccgagugcgagcuccucaucuccaaggaguccugguccuacaucgucgagaagcccaaccccgagaacggcaccugcuaccccggccacuucgccgacuacgaggagcuccgcgagcagcucuccuccgucuccuccuucgagcgcuucgagaucuuccccaaggaguccuccuggcccaaccacaccgucaccggcgucuccgccuccugcucccacaacggcgaguccuccuucuaccgcaaccuccucuggcucaccgucaagaacggccucuaccccaaccucuccaaguccuacgccaacaacaaggagaaggagguccucguccucuggggcguccaccacccccccaacaucgucgaccagaagacccucuaccgcaccgagaacgccuacgucuccgucgucuccucccacuacucccgcaaguucacccccgagaucgccaagcgccccaagguccgcgaccaggagggccgcaucaacuacuacuggacccuccucgagcccggcgacaccaucaucuucgaggccaacggcaaccucaucgccccccgcuacgccuucgcccucuccaagggcuucggcuccggcaucaucaacuccaacgcccccauggacaagugcgacgccaagugccagaccccccgcggcgccaucaacuccucccuccccuuccagaacguccaccccgucaccaucggcgagugccccaaguacguccgcuccgccaagcuccgcauggucaccggccuccgcaacauccccuccauccagucccgcggccucuucggcgccaucgccggcuucaucgagggcggcuggaccggcauggucgacggcugguacggcuaccaccaccagaacgagcagggcuccggcuacgccgccgaccagaaguccacccagaacgccaucaacggcaucaccaacaaggucaacuccgucaucgagaagaugaacacccaguucaccgccgucggcaaggaguucaacaagcucgagcgccgcauggagaaccucaacaagaaggucgacgacggcuucaucgacaucuggaccuacaacgccgagcuccucguccuccucgagaacgagcgcacccucgacuuccacgacuccaacgucaagaaccucuacgagaaggucaagucccagcucaagaacaacgccaaggagaucggcaacggcugcuucgaguucuaccacaagugcaacgacgagugcauggaguccgucaagaacggcaccuacgacuaccccaaguacuccgaggaguccaagcucaaccgcgagaagaucgacggcgucaagcucgaguccaugggcgucuaccagauccucgccaucuacuccaccgucgccuccucccucguccuccucgucucccucggcgccaucuccuucuggaugugcuccaacggcucccuccagugccgcaucugcaucuga

SEQ ID NO: 107374 - RNA, 1698 nt, Artificial Sequence
  derived and/or modified CDS sequence (opt2) from hemagglutinin__InfluenzaA__AHL91010
augaaggucaagcuccucguccuccucugcaccuucaccgccaccuacgccgacaccaucugcaucggcuaccacgccaacaacuccaccgacaccgucgacaccguccucgagaagaacgucaccgucacccacuccgucaaccuccucgagaacucccacaacggcaagcucugccuccucaagggcaucgccccccuccagcucggcaacugcuccgucgccggcuggauccucggcaaccccgagugcgagcuccucaucuccaaggaguccugguccuacaucgucgagaagcccaaccccgagaacggcaccugcuaccccggccacuucgccgacuacgaggagcuccgcgagcagcucuccuccgucuccuccuucgagcgcuucgagaucuuccccaaggacuccuccuggcccaaccacaccgucaccggcgucuccgccuccugcucccacaacggcgaguccuccuucuaccgcaaccuccucuggcucaccggcaagaacggccucuaccccaaccucuccaaguccuacgccaacaacaaggagaaggagguccucguccucuggggcguccaccacccccccuccaucaacgaccagaagacccucuaccacaccgagaacgccuacgucuccgucgucuccucccacuacucccgcaaguucacccccgagaucgccaagcgccccaagguccgcgaccaggagggccgcaucaacuacuacuggacccuccucgagcccggcgacaccaucaucuucgaggccaacggcaaccucaucgccccccgcuacgccuucgcccucucccgcggcuucggcuccggcaucaucaacuccaacgcccccauggacaagugcgacgccaagugccagaccccccagggcgccaucaacuccucccuccccuuccagaacguccaccccgucaccaucggcgagugccccaaguacguccgcuccgccaagcuccgcauggucaccggccuccgcaacauccccuccauccagucccgcggccucuucggcgccaucgccggcuucaucgagggcggcuggaccggcauggucgacggcugguacggcuaccaccaccagaacgagcagggcuccggcuacgccgccgaccagaaguccacccagaacgccaucaacggcaucaccaacaaggucaacuccgucaucgagaagaugaacacccaguucaccgccgucggcaaggaguucaacaagcucgagcgccgcauggagaaccucaacaagaaggucgacgacggcuucaucgacaucuggaccuacaacgccgagcuccucguccuccucgagaacgagcgcacccucgacuuccacgacuccaacgucaagaaccucuacgagaaggucaagucccagcucaagaacaacgccaaggagaucggcaacggcugcuucgaguucuaccacaagugcaacgacgagugcauggaguccgucaagaacggcaccuacgacuaccccaaguacuccgaggaguccaagcucaaccgcgagaagaucgacggcgucaagcucgaguccaugggcgucuaccagauccucaccaucuacuccaccgucgccuccucccucguccuccucgucucccucggcgccaucuccuucuggaugugcuccaacggcucccuccagugccgcaucugcaucuga

SEQ ID NO: 107375 - RNA, 1698 nt, Artificial Sequence
  derived and/or modified CDS sequence (opt2) from hemagglutinin__InfluenzaA__AHL91022
augaaggucaagcuccucguccuccucugcaccuucaccgccaccuacgccgacaccaucugcaucggcuaccacgccaacaacuccaccgacaccgucgacaccguccucgagaagaacgucaccgucacccacuccgucaaccuccucgagaacucccacaacggcaagcucugccuccucaagggcaucgccccccuccagcucggcaacugcuccgucgccggcuggauccucggcaaccccgagugcgagcuccucaucuccaaggaguccugguccuacaucgucgagaagcccaaccccgagaacggcaccugcuaccccggccacuucgccgacuacgaggagcuccgcgagcagcucuccuccgucuccuccuucgagcgcuucgagaucuuccccaaggacuccuccuggcccaaccacaccgucaccggcgucuccgccuccugcucccacaacggcgagaacuccuucuaccgcaaccuccucuggcucaccggcaagaacggccucuaccccaaccucuccaaguccuacgccaacaacaaggagaaggagguccucguccucuggggcguccaccacccccccuccaucaacgaccagaagacccucuaccacaccgagaacgccuacgucuccgucgucuccucccacuacucccgcaaguucacccccgagaucgccaagcgccccaagguccgcgaccaggagggccgcaucaacuacuacuggacccuccucgagcccggcgacaccaucaucuucgaggccaacggcaaccucaucgccccccgcuacgccuucgcccucucccgcggcuucggcuccggcaucaucaacuccaacgcccccauggacaagugcgacgccaagugccagaccccccagggcgccaucaacuccucccuccccuuccagaacguccaccccgucaccaucggcgagugccccaaguacguccgcuccgccaagcuccgcauggucaccggccuccgcaacauccccuccauccagucccgcggccucuucggcgccaucgccggcuucaucgagggcggcuggaccggcauggucgacggcugguacggcuaccaccaccagaacgagcagggcuccggcuacgccgccgaccagaaguccacccagaacgccaucaacggcaucaccaacaaggucaacuccgucaucgagaagaugaacacccaguucaccgccgucggcaaggaguucaacaagcucgagcgccgcauggagaaccucaacaagaaggucgacgacggcuucaucgacaucuggaccuacaacgccgagcuccucguccuccucgagaacgagcgcacccucgacuuccacgacuccaacgucaagaaccucuacgagaaggucaagucccagcucaagaacaacgccaaggagaucggcaacggcugcuucgaguucuaccacaagugcaacgacgagugcauggaguccgucaagaacggcaccuacgacuaccccaaguacuccgaggaguccaagcucaaccgcgagaagaucgacggcgucaagcucgaguccaugggcgucuaccagauccucaccaucuacuccaccgucgccuccucccucguccuccucgucucccucggcgccaucuccuucuggaugugcuccaacggcucccuccagugccgcaucugcaucuga

SEQ ID NO: 107376 - RNA, 1701 nt, Artificial Sequence; identical to SEQ ID NO: 98470
  derived and/or modified CDS sequence (opt2) from hemagglutinin__InfluenzaA__AHL91034

SEQ ID NO: 107377 - RNA, 1701 nt, Artificial Sequence; identical to SEQ ID NO: 101536
  derived and/or modified CDS sequence (opt2) from hemagglutinin__InfluenzaA__AHL91046

SEQ ID NO: 107378 - RNA, 1701 nt, Artificial Sequence; identical to SEQ ID NO: 107350
  derived and/or modified CDS sequence (opt2) from hemagglutinin__InfluenzaA__AHL91058

SEQ ID NO: 107379 - RNA, 1701 nt, Artificial Sequence
  derived and/or modified CDS sequence (opt2) from hemagglutinin__InfluenzaA__AHL91070
augaagaccaucaucgcccucuccuacauccucugccucgucuucgcccagaagcuccccggcaacgacaacuccauggccacccucugccucggccaccacgccguccccaacggcaccaucgucaagaccaucaccaacgaccagaucgaggucaccaacgccaccgagcucguccaguccuccuccaccggcgagaucugcgacuccccccaccagauccucgacggcgagaacugcacccucaucgacgcccuccucggcgacccccagugcgacggcuuccagaacaagaagugggaccucuucgucgagcgcuccaaggccuacuccaacugcuaccccuacgacguccccgacuacgccucccuccgcucccucgucgccuccuccggcacccucgaguucaacaacgaguccuucaacuggaccggcgucacccagaacggcaccuccuccgccugcaugcgccgcuccaacaacuccuucuucucccgccucaacuggcucacccaccucaaguucaaguaccccgcccucaacgucaccaugcccaacaacgagcaguucgacaagcucuacaucuggggcguccaccaccccggcaccgacaacgaccagaucuuccucuacgcccaggccuccggccgcaucaccgucuccaccaagcgcucccagcagaccgucauccccaacaucggcucccgcccccgcguccgcaacauccccucccgcaucuccaucuacuggaccaucgucaagcccggcgacauccuccucaucaacuccaccggcaaccucaucgccccccgcggcuacuucaagauccgcuccggcaaguccuccaucaugcgcuccgacgcccccaucggcaagugcaacuccgagugcaucacccccaacggcuccauccccaacgacaagcccuuccagaacgucaaccgcaucaccuacggcgccugcccccgcuacgucaagcagaacacccucaagcucgccaccggcaugcgcaacguccccgagaagcagacccgcggcaucuucggcgccaucgccggcuucaucgagaacggcugggagggcauggucgacggcugguacggcuuccgccaccagaacuccgagggccgcggccaggccgccgaccucaaguccacccaggccgccaucgaccagaucaacggcaagcucaaccgccucaucggcaagaccaacgagaaguuccaccagaucgagaaggaguucuccgaggucgagggccgcauccaggaccucgagaaguacgucgaggacaccaagaucgaccucugguccuacaacgccgagcuccucgucgcccucgagaaccagcacaccaucgaccucaccgacuccgagaugaacaagcucuucgagaagaccaagaagcagcuccgcgagaacgccgaggacaugggcaacggcugcuucaagaucuaccacaagugcgacaacgccugcaucggcuccauccgcaacggcaccuacgaccacgacgucuaccgcgacgaggcccucaacaaccgcuuccagaucaagggcgucgagcucaaguccggcuacaaggacuggauccucuggaucuccuucgccaucuccugcuuccuccucugcgucgcccuccucggcuucaucaugugggccugccagaagggcaacauccgcugcaacaucugcaucuga

SEQ ID NO: 107380 - RNA, 1701 nt, Artificial Sequence
  derived and/or modified CDS sequence (opt2) from hemagglutinin__InfluenzaA__AHL91082
augaagaccaucaucgcccucuccuacauccucugccucgucuucgcccagaagcuccccggcaacgacaacuccaccgccacccucugccucggccaccacgccguccccaacggcaccaucgucaagaccaucaccaacgaccagaucgaggucaccaacgccaccgagcucguccaguccuccuccaccggcgagaucugcgacuccccccaccagauccucgacggcgagaacugcacccucaucgacgcccuccucggcgacccccagugcgacggcuuccagaacaagaagugggaccucuucgucgagcgcuccaaggccuacuccaacugcuaccccuacgacguccccgacuacgccucccuccgcucccucgucgccuccuccggcacccucgaguucaacaacgaguccuucaacuggaccggcgucacccagaacggcaccuccuccgccugcauccgccgcuccaacaacuccuucuucucccgccucaacuggcucacccaccucaaguucaaguaccccgcccucaacgucaccaugcccaacaacgagcaguucgacaagcucuacaucuggggcguccaccaccccggcaccgacaacgaccagaucuuccucuacgcccaggccuccggccgcaucaccgucuccaccaagcgcucccagcagaccgucauccccaacaucggcucccgcccccgcguccgcaacauccccucccgcaucuccaucuacuggaccaucgucaagcccggcgacauccuccucaucaacuccaccggcaaccucaucgccccccgcggcuacuucaagauccgcuccggcaaguccuccaucaugcgcuccgacgcccccaucggcaagugcaacuccgagugcaucacccccaacggcuccauccccaacgacaagcccuuccagaacgucaaccgcaucaccuacggcgccugccccaucuacgucaagcagaacacccucaagcucgccaccggcaugcgcaacguccccgagaagcagacccgcggcaucuucggcgccaucgccggcuucaucgagaacggcugggagggcauggucgacggcugguacggcuuccgccaccagaacuccgagggccgcggccaggccgccgaccucaaguccacccaggccgccaucgaccagaucaacggcaagcucaaccgccucaucggcaagaccaacgagaaguuccaccagaucgagaaggaguucuccgaggucgagggccgcauccaggaccucgagaaguacgucgaggacaccaagaucgaccucugguccuacaacgccgagcuccucgucgcccucgagaaccagcacaccaucgaccucaccgacuccgagaugaacaagcucuucgagaagaccaagaagcagcuccgcgagaacgccgaggacaugggcaacggcugcuucaagaucuaccacaagugcgacaacgccugcaucggcuccauccgcaacggcaccuacgaccacgacgucuaccgcgacgaggcccucaacaaccgcuuccagaucaagggcgucgagcucaaguccggcuacaaggacuggauccucuggaucuccuucgccaucuccugcuuccuccucugcgucgcccuccucggcuucaucaugugggccugccagaagggcaacauccgcugcaacaucugcaucuga

SEQ ID NO: 107381 - RNA, 1701 nt, Artificial Sequence; identical to SEQ ID NO: 101455
  derived and/or modified CDS sequence (opt2) from hemagglutinin__InfluenzaA__AHL91094

SEQ ID NO: 107382 - RNA, 1701 nt, Artificial Sequence
  derived and/or modified CDS sequence (opt2) from hemagglutinin__InfluenzaA__AHL91106
augaagaccaucaucgcccucuccuacauccucugccucgucuucgcccagaagcuccccggcaacgacaacuccaccgccacccucugccucggccaccacgccguccccaacggcaccaucgucaagaccaucaccaacgaccagaucgaggucaccaacgccaccgagcucguccaguccuccuccaagggcgagaucugcgacuccccccaccagauccucgacggcgagaacugcacccucaucgacgcccuccucggcgacccccagugcgacggcuuccagaacaagaagugggaccucuucgucgagcgcuccaaggccuacuccaacugcuaccccuacgacguccccgacuacgccucccuccgcucccucgucgccuccuccggcacccucgaguucaacaacgaguccuucaacuggaccggcgucacccagaacggcaccuccuccgccugcauccgccgcuccaacaacuccuucuucucccgccucaacuggcucacccaccucaaguucaaguaccccgcccucaacgucaccaugcccaacaacgagcaguucgacaagcucuacaucuggggcguccaccaccccggcaccgacaacgaccagaucuuccucuacgcccaggccuccggccgcaucaccgucuccaccaagcgcucccagcagaccgucauccccaacaucggcucccgcccccgcguccgcaacauccccucccgcaucuccaucuacuggaccaucgucaagcccggcgacauccuccucaucaacuccaccggcaaccucaucgccccccgcggcuacuucaagauccgcuccggcaaguccuccaucaugcgcuccgacgcccccaucggcaagugcaacuccgagugcaucacccccaacggcuccauccccaacgacaagcccuuccagaacgucaaccgcaucaccuacggcgccugcccccgcuacgucaagcagaacacccucaagcucgccaccggcaugcgcaacguccccgagaagcagacccgcggcaucuucggcgccaucgccggcuucaucgagaacggcugggagggcauggucgacggcugguacggcuuccgccaccagaacuccgagggccgcggccaggccgccgaccucaaguccacccaggccgccaucgaccagaucaacggcaagcucaaccgccucaucggcaagaccaacgagaaguuccaccagaucgagaaggaguucuccgaggucgagggccgcauccaggaccucgagaaguacgucgaggacaccaagaucgaccucugguccuacaacgccgagcuccucgucgcccucgagaaccagcacaccaucgaccucaccgacuccgagaugaacaagcucuucgagaagaccaagaagcagcuccgcgagaacgccgaggacaugggcaacggcugcuucaagaucuaccacaagugcgacaacgccugcaucggcuccauccgcaacggcaccuacgaccacgacgucuaccgcgacgaggcccucaacaaccgcuuccagaucaagggcgucgagcucaaguccggcuacaaggacuggauccucuggaucuccuucgccaucuccugcuuccuccucugcgucgcccuccucggcuucaucaugugggccugccagaagggcaacauccgcugcaacaucugcaucuga

SEQ ID NO: 107383 - RNA, 1701 nt, Artificial Sequence
  derived and/or modified CDS sequence (opt2) from hemagglutinin__InfluenzaA__AHL91118
augaagaccaucaucgcccucuccuacauccucugccucgucuucgcccagaagcuccccggcaacgacaacuccaccgccacccucugccucggccaccacgccguccccaacggcaccaucgucaagaccaucaccaacgaccagaucgaggucaccaacgccaccgagcucguccaguccuccuccaccggcgagaucugcgacuccccccaccagauccucgacggcgagaacugcacccucaucgacgcccuccucggcgacccccagugcgacggcuuccagaacaagaagugggaccucuucgucgagcgcuccaaggccuacuccaacugcuaccccuacgacguccccgacuacgccucccuccgcucccucgucgccuccuccggcacccucgaguucaacaacgaguccuucaacuggaccggcgucacccagaacggcaccuccuccgccugcauccgccgcuccaacaacuccuucuucuccaagcucaacuggcucacccaccucaaguucaaguaccccgcccucaacgucaccaugcccaacaacgagcaguucgacaagcucuacaucuggggcguccaccaccccggcaccgacaacgaccagaucuuccucuacgcccaggccuccggccgcaucaccgucuccaccaagcgcucccagcagaccgucauccccaacaucggcucccgcccccgcguccgcaacauccccucccgcaucuccaucuacuggaccaucgucaagcccggcgacauccuccucaucaacuccaccggcaaccucaucgccccccgcggcuacuucaagauccgcuccggcaaguccuccaucaugcgcuccgacgcccccaucggcaagugcaacuccgagugcaucacccccaacggcuccauccccaacgacaagcccuuccagaacgucaaccgcaucaccuacggcgccugcccccgcuacgucaagcagaacacccucaagcucgccaccggcaugcgcaacguccccgagaagcagacccgcggcaucuucggcgccaucgccggcuucaucgagaacggcugggagggcauggucgacggcugguacggcuuccgccaccagaacuccgagggccgcggccaggccgccgaccucaaguccacccaggccgccaucgaccagaucaacggcaagcucaaccgccucaucggcaagaccaacgagaaguuccaccagaucgagaaggaguucuccgaggucgagggccgcauccaggaccucgagaaguacgucgaggacaccaagaucgaccucugguccuacaacgccgagcuccucgucacccucgagaaccagcacaccaucgaccucaccgacuccgagaugaacaagcucuucgagaagaccaagaagcagcuccgcgagaacgccgaggacaugggcaacggcugcuucaagaucuaccacaagugcgacaacgccugcaucggcuccauccgcaacggcaccuacgaccacgacgucuaccgcgacgaggcccucaacaaccgcuuccagaucaagggcgucgagcucaaguccggcuacaaggacuggauccucuggaucuccuucgccaucuccugcuuccuccucugcgucgcccuccucggcuucaucaugugggccugccagaagggcaacauccgcugcaacaucugcaucuga

SEQ ID NO: 107384 - RNA, 1701 nt, Artificial Sequence
  derived and/or modified CDS sequence (opt2) from hemagglutinin__InfluenzaA__AHL91130
augaagaccaucaucgcccucuccuacauccucugccucgucuucgcccagaagcuccccggcaacgacaacuccaccgccacccucugccucggccaccacgccguccccaacggcaccaucgucaagaccaucaccaacgaccagaucgaggucaccaacgccaccgagcucguccaguccuccuccaccggcgagaucugcgacuccccccaccagauccucgacggcgagaacugcacccucaucgacgcccuccucggcgacccccagugcgacggcuuccagaacaagaagugggaccucuucgucgagcgcuccaaggccuacuccaacugcuaccccuacgacguccccgacuacgccucccuccgcucccucaucgccuccuccggcacccucgaguucaacaacgaguccuucaacuggaccggcgucacccagaacggcaccuccuccgccugcauccgccgcuccaacaacuccuucuucucccgccucaacuggcucacccaccucaaguucaaguaccccgcccucaacgucaccaugcccaacaacgagcaguucgacaagcucuacaucuggggcguccaccaccccggcaccgacaacgaccagaucuuccucuacgcccaggccuccggccgcaucaccgucuccaccaagcgcucccagcagaccgucauccccaacaucggcucccgcccccgcguccgcaacauccccucccgcaucuccaucuacuggaccaucgucaagcccggcgacauccuccucaucaacuccaccggcaaccucaucgccccccgcggcuacuucaagauccgcuccggcaaguccuccaucaugcgcuccgacgcccccaucggcaagugcaacuccgagugcaucacccccaacggcuccauccccaacgacaagcccuuccagaacgucaaccgcaucaccuacggcgccugcccccgcuacgucaagcagaacacccucaagcucgccaccggcaugcgcaacguccccgagaagcagacccgcggcaucuucggcgccaucgccggcuucaucgagaacggcugggagggcauggucgacggcugguacggcuuccgccaccagaacuccgagggccgcggccaggccgccgaccucaaguccacccaggccgccaucgaccagaucaacggcaagcucaaccgccucaucggcaagaccaacgagaaguuccaccagaucgagaaggaguucuccgaggucgagggccgcauccaggaccucgagaaguacgucgaggacaccaagaucgaccucugguccuacaacgccgagcuccucgucgcccucgagaaccagcacaccaucgaccucaccgacuccgagaugaacaagcucuucgagaagaccaagaagcagcuccgcgagaacgccgaggacaugggcaacggcugcuucaagaucuaccacaagugcgacaacgccugcaucggcuccauccgcaacggcaccuacgaccacaacgucuaccgcgacgaggcccucaacaaccgcuuccagaucaagggcgucgagcucaaguccggcuacaaggacuggauccucuggaucuccuucgccaucuccugcuuccuccucugcgucgcccuccucggcuucaucaugugggccugccagaagggcaacauccgcugcaacaucugcaucuga

SEQ ID NO: 107385 - RNA, 1701 nt, Artificial Sequence; identical to SEQ ID NO: 98470
  derived and/or modified CDS sequence (opt2) from hemagglutinin__InfluenzaA__AHL91142

SEQ ID NO: 107386 - RNA, 1701 nt, Artificial Sequence; identical to SEQ ID NO: 98470
  derived and/or modified CDS sequence (opt2) from hemagglutinin__InfluenzaA__AHL91154

SEQ ID NO: 107387 - RNA, 1701 nt, Artificial Sequence; identical to SEQ ID NO: 96666
  derived and/or modified CDS sequence (opt2) from hemagglutinin__InfluenzaA__AHL91166

SEQ ID NO: 107388 - RNA, 1701 nt, Artificial Sequence; identical to SEQ ID NO: 106503
  derived and/or modified CDS sequence (opt2) from hemagglutinin__InfluenzaA__AHL94984

SEQ ID NO: 107389 - RNA, 1701 nt, Artificial Sequence; identical to SEQ ID NO: 106503
  derived and/or modified CDS sequence (opt2) from hemagglutinin__InfluenzaA__AHL94996

SEQ ID NO: 107390 - RNA, 1701 nt, Artificial Sequence; identical to SEQ ID NO: 105871
  derived and/or modified CDS sequence (opt2) from hemagglutinin__InfluenzaA__AHL95008

SEQ ID NO: 107391 - RNA, 1701 nt, Artificial Sequence; identical to SEQ ID NO: 106033
  derived and/or modified CDS sequence (opt2) from hemagglutinin__InfluenzaA__AHL95020

SEQ ID NO: 107392 - RNA, 1701 nt, Artificial Sequence; identical to SEQ ID NO: 106030
  derived and/or modified CDS sequence (opt2) from hemagglutinin__InfluenzaA__AHL95032

SEQ ID NO: 107393 - RNA, 1701 nt, Artificial Sequence; identical to SEQ ID NO: 105904
  derived and/or modified CDS sequence (opt2) from hemagglutinin__InfluenzaA__AHL95044

SEQ ID NO: 107394 - RNA, 1701 nt, Artificial Sequence; identical to SEQ ID NO: 105894
  derived and/or modified CDS sequence (opt2) from hemagglutinin__InfluenzaA__AHL95056

SEQ ID NO: 107395 - RNA, 1701 nt, Artificial Sequence; identical to SEQ ID NO: 106033
  derived and/or modified CDS sequence (opt2) from hemagglutinin__InfluenzaA__AHL95068

SEQ ID NO: 107396 - RNA, 1701 nt, Artificial Sequence; identical to SEQ ID NO: 106581
  derived and/or modified CDS sequence (opt2) from hemagglutinin__InfluenzaA__AHL95080

SEQ ID NO: 107397 - RNA, 1701 nt, Artificial Sequence; identical to SEQ ID NO: 105904
  derived and/or modified CDS sequence (opt2) from hemagglutinin__InfluenzaA__AHL95092

SEQ ID NO: 107398 - RNA, 1701 nt, Artificial Sequence
  derived and/or modified CDS sequence (opt2) from hemagglutinin__InfluenzaA__AHL95104
augaagaccaucaucgcccucuccuacauccucugccucgucuucgcccagaagcuccccggcaacgacaacuccaccgccacccucugccucggccaccacgccguccccaacggcaccaucgucaagaccaucaccaacgaccgcaucgaggucaccaacgccaccgagcucguccagaacuccuccaucggcgagaucugcgacuccccccaccagauccucgacggcgagaacugcacccucaucgacgcccuccucggcgacccccagugcgacggcuuccagaacaagaagugggaccucuucgucgagcgcuccaaggccuacuccaacugcuaccccuacgacguccccgacuacgccucccuccgcucccucgucgccuccuccggcacccucgaguucaacaacgaguccuucaacugggccggcgucacccagaacggcaccuccuccgccugcaugcgcggcuccaacuccuccuucuucucccgccucaacuggcucacccaccucaacuucaaguaccccgcccucaacgucaccaugcccaacaacgagcaguucgacaagcucuacaucuggggcguccaccaccccggcaccgacaaggaccagaucuuccucuacgcccaguccuccggccgcaucaccgucuccaccaagcgcucccagcaggccgucauccccaacaucggcucccgcccccgcauccgcaacauccccucccgcaucuccaucuacuggaccaucgucaagcccggcgacauccuccucaucaacuccaccggcaaccucaucgccccccgcggcuacuucaagauccgcuccggcaaguccuccaucaugcgcuccgacgcccccaucggcaagugcaaguccgagugcaucacccccaacggcuccauccccaacgacaagcccuuccagaacgucaaccgcaucaccuacggcgccugcccccgcuacgucaagcaguccacccucaagcucgccaccggcaugcgcaacguccccgagaagcagacccgcggcaucuucggcgccaucgccggcuucaucgagaacggcugggagggcaugauggacggcugguacggcuuccgccaccagaacuccgagggccgcggccaggccgccgaccucaaguccacccaggccgccaucgaccagaucaacggcaagcucaaccgccucaucggcaagaccaacgagaaguuccaccagaucgagaaggaguucuccgaggucgagggccgcauccaggaccucgagaaguacgucgaggacaccaagaucgaccucugguccuacaacgccgagcuccucgucgcccucgagaaccagcacaccaucgaccucaccgacuccgagaugaacaagcucuucgagaagaccaagaagcagcuccgcgagaacgccgaggacaugggcaacggcugcuucaagaucuaccacaagugcgacaacgccugcaucggcuccauccgcaacggcaccuacgaccacgacgucuaccgcgacgaggcccucaacaaccgcuuccagaucaagggcgucgagcucaaguccggcuacaaggacuggauccucuggaucuccuucgccaucuccugcuuccuccucugcgucgcccuccucggcuucaucaugugggccugccagaagggcaacauccgcugcaacaucugcaucuga

SEQ ID NO: 107399 - RNA, 1701 nt, Artificial Sequence
  derived and/or modified CDS sequence (opt2) from hemagglutinin__InfluenzaA__AHL95116
augaagaccaucaucgcccucuccuacauccucugccucgucuucgcccaggagcuccccggcaacgacgacuccaccgccacccucugccucggccacuacgccguccccaacggcaccaucgucaagaccaucaccaacgaccagaucgaggucaccaacgccaccgagcucguccaguccuccuccaccggcgagaucugcaacuccccccaccagauccucgacggcgagaacugcacccucaucgacgcccuccucggcgacccccagugcgacggcuuccagaacaagaagugggaccucuucgucgagcgcuccaaggcccacuccaacugcuaccccuacgacguccccgacuacgccucccuccgcucccucgucgccuccuccggcacccucgaguucaacaacgaguccuucaacuggaccggcgucacccagaacggcaccuccuccgccugcauccgccgcuccaacaacuccuucuucucccgccucaacuggcucacccaccucaacuucaaguaccccgcccucaacgucaccaugcccaacaacgagcaguucgacaagcucuacaucuggggcguccaccaccccggcaccgacaaggaccagaucuuccucuacgccaaggccuccggccgcaucaccgucuccaccaagcgcucccagcaggccgucauccccaacaucggcucccgcccccgcguccgcaacauccccucccgcgucuccaucuacuggaccaucgucaagcccggcgacauccuccucaucaacuccaccggcaaccucaucgccccccgcggcuacuucaagauccgcuccggcaaguccuccaucaugcgcuccgacgcccccaucggcaagugcaacuccgccugcaucacccccaacggcuccauccccaacgacaagcccuuccagaacgucaaccgcaucaccuacggcgccugcccccgcuacgucaagcagaacacccucaagcucgccaccggcaugcgcaacguccccgagaagcagacccgcggcaucuucggcgccaucgccggcuucaucgagaacggcugggagggcauggucgacggcugguacggcuuccgccaccagaacuccgagggccgcggccaggccgccgaccucaaguccacccaggccgccaucgaccagaucaacggcaagcucaaccgccucaucggcaagaccaacgagaaguuccaccagaucgagaaggaguucuccgaggucgagggccgcauccaggaccucgagaaguacgucgaggacaccaagaucgaccucugguccuacaacgccgagcuccucgucgcccucgagaaccagcacaccaucgaccucaccgacuccgagaugaacaagcucuucgagaagaccaagaagcagcuccgcgagaacgccgaggacaugggcaacggcugcuucaagaucuaccacaagugcgacaacgccugcaucggcuccauccgcaacggcaccuacgaccacgacgucuaccgcgacgaggcccucaacaaccgcuuccagaucaagggcgucgagcucaaguccggcuacaaggacuggauccucuggaucuccuucgccaucuccugcuuccuccucugcgucgcccuccucggcuucaucaugugggccugccagaagggcaacauccgcugcaacaucugcaucuga

SEQ ID NO: 107400 - RNA, 1701 nt, Artificial Sequence; identical to SEQ ID NO: 105871
  derived and/or modified CDS sequence (opt2) from hemagglutinin__InfluenzaA__AHL95128

SEQ ID NO: 107401 - RNA, 1701 nt, Artificial Sequence; identical to SEQ ID NO: 105894
  derived and/or modified CDS sequence (opt2) from hemagglutinin__InfluenzaA__AHL95140

SEQ ID NO: 107402 - RNA, 1701 nt, Artificial Sequence; identical to SEQ ID NO: 105904
  derived and/or modified CDS sequence (opt2) from hemagglutinin__InfluenzaA__AHL95152

SEQ ID NO: 107403 - RNA, 1701 nt, Artificial Sequence; identical to SEQ ID NO: 105871
  derived and/or modified CDS sequence (opt2) from hemagglutinin__InfluenzaA__AHL95164

SEQ ID NO: 107404 - RNA, 1701 nt, Artificial Sequence; identical to SEQ ID NO: 105904
  derived and/or modified CDS sequence (opt2) from hemagglutinin__InfluenzaA__AHL95176

SEQ ID NO: 107405 - RNA, 1701 nt, Artificial Sequence; identical to SEQ ID NO: 105904
  derived and/or modified CDS sequence (opt2) from hemagglutinin__InfluenzaA__AHL95188

SEQ ID NO: 107406 - RNA, 1701 nt, Artificial Sequence; identical to SEQ ID NO: 106030
  derived and/or modified CDS sequence (opt2) from hemagglutinin__InfluenzaA__AHL95200

SEQ ID NO: 107407 - RNA, 1701 nt, Artificial Sequence; identical to SEQ ID NO: 105904
  derived and/or modified CDS sequence (opt2) from hemagglutinin__InfluenzaA__AHL95212

SEQ ID NO: 107408 - RNA, 1701 nt, Artificial Sequence; identical to SEQ ID NO: 105894
  derived and/or modified CDS sequence (opt2) from hemagglutinin__InfluenzaA__AHL95224

SEQ ID NO: 107409 - RNA, 1701 nt, Artificial Sequence; identical to SEQ ID NO: 105894
  derived and/or modified CDS sequence (opt2) from hemagglutinin__InfluenzaA__AHL95236

SEQ ID NO: 107410 - RNA, 1701 nt, Artificial Sequence; identical to SEQ ID NO: 105919
  derived and/or modified CDS sequence (opt2) from hemagglutinin__InfluenzaA__AHL95248

SEQ ID NO: 107411 - RNA, 1701 nt, Artificial Sequence
  derived and/or modified CDS sequence (opt2) from hemagglutinin__InfluenzaA__AHL95260
augaagaccaucaucgcccucuccuacauccucugccucgucuucgcccagaagcuccccggcaacgacaacuccaccgccacccucugccucggccaccacgccguccccaacggcaccaucgucaagaccaucaccaacgaccgcaucgaggucaccaacgccaccgagcucguccagaacuccuccaucuccgagaucugcgacuccccccaccagauccucgacggcgagaacugcacccucaucgacgcccuccucggcgacccccagugcgacggcuuccagaacaagaagugggaccucuucgucgagcgcuccaaggccuacuccaacugcuaccccuacgacguccccgacuacgccucccuccgcucccucgucgccuccuccggcacccucgaguucaacaacgaguccuucaacugggccggcgucacccagaacggcaccuccuccgccugcauccgcggcuccaacuccuccuucuucucccgccucaacuggcucacccaccucaacuucaaguaccccgcccucaacgucaccaugcccaacaacgagcaguucgacaagcucuacaucuggggcguccaccaccccggcaccgacaaggaccagaucuuccucuacgcccaguccuccggccgcaucaccgucuccaccaagcgcucccagcaggccgucauccccaacaucggcucccgcccccgcauccgcaacauccccucccgcaucuccaucuacuggaccaucgucaagcccggcgacauccuccucaucaacuccaccggcaaccucaucgccccccgcggcuacuucaagauccgcuccggcaaguccuccaucaugcgcuccgacgcccccaucggcaagugcaaguccgagugcaucacccccaacggcuccauccccaacgacaagcccuuccagaacgucaaccgcaucaccuacggcgccugcccccgcuacgucaagcaguccacccucaagcucgccaccggcaugcgcaacguccccgagaagcagacccgcggcaucuucggcgccaucgccggcuucaucgagaacggcugggagggcauggucgacggcugguacggcuuccgccaccagaacuccgagggccgcggccaggccgccgaccucaaguccacccaggccgccaucgaccagaucaacggcaagcucaaccgccucaucggcaagaccaacgagaaguuccaccagaucgagaaggaguucuccgaggucgagggccgcauccaggaccucgagaaguacgucgaggacaccaagaucgaccucugguccuacaacgccgagcuccucgucgcccucgagaaccagcacaccaucgaccucaccgacuccgagaugaacaagcucuucgagaagaccaagaagcagcuccgcgagaacgccgaggacaugggcaacggcugcuucaagaucuaccacaagugcgacaacgccugcaucggcuccauccgcaacggcaccuacgaccacgacgucuaccgcgacgaggcccucaacaaccgcuuccagaucaagggcgucgagcucaaguccggcuacaaggacuggauccucuggaucuccuucgccaucuccugcuuccuccucugcgucgcccuccucggcuucaucaugugggccugccagaagggcaacauccgcugcaacaucugcaucuga

SEQ ID NO: 107412 - RNA, 1701 nt, Artificial Sequence; identical to SEQ ID NO: 105904
  derived and/or modified CDS sequence (opt2) from hemagglutinin__InfluenzaA__AHL95272

SEQ ID NO: 107413 - RNA, 1701 nt, Artificial Sequence; identical to SEQ ID NO: 106030
  derived and/or modified CDS sequence (opt2) from hemagglutinin__InfluenzaA__AHL95284

SEQ ID NO: 107414 - RNA, 1701 nt, Artificial Sequence
  derived and/or modified CDS sequence (opt2) from hemagglutinin__InfluenzaA__AHL95296
augaaggccauccucgucguccuccucuacaccuucgccaccgccaacgccgacacccucugcaucggcuaccacgccaacaacuccaccgacaccgucgacaccguccucgagaagaacgucaccgucacccacuccgucaaccuccucgaggacaagcacaacggcaagcucugcaagcuccgcggcgucgccccccuccaccucggcaagugcaacaucgccggcuggauccucggcaaccccgagugcgagucccucuccaccgccuccuccugguccuacaucgucgagaccuccuccuccgacaacggcaccugcuaccccggcgacuucaucaacuacgaggagcuccgcgagcagcucuccuccgucuccuccuucgagcgcuucgagauguuccccaagaccuccuccuggcccaaccacgacuccaacaagggcgucaccgccgccugcccccacgccggcgccaaguccuucuacaagaaccucaucuggcucgucaagaagggcaacuccuaccccaagcucuccaaguccuacaucaacgacaagggcaaggagguccucguccucuggggcauccaccaccccuccaccaccgccgaccagcagucccucuaccagaacgccgacgccuacgucuucgucggcaccuccaaguacuccaagaaguucaagcccgagaucgccauccgccccaagguccgcgaccaggagggccgcaugaacuacuacuggacccucaucgagcccggcgacaagaucaccuucgaggccaccggcaaccucgucgucccccgcuacgccuucgccauggagcgcaacgccggcuccggcaucaucaucuccgacacccccguccacgacugcaacaccaccugccagacccccgagggcgccaucaacaccucccuccccuuccagaacauccaccccaucaccaucggcaagugccccaaguacgucaaguccaccaagcuccgccucgccaccggccuccgcaacguccccuccauccagucccgcggccucuucggcgccaucgccggcuucaucgagggcggcuggaccggcauggucgacggcugguacggcuaccaccaccagaacgagcagggcuccggcuacgccgccgaccucaaguccacccagaacgccaucgacaagaucaccaacaaggucaacuccgucaucgagaagaugaacacccaguucaccgccgucggcaaggaguucaaccaccucgagaagcgcaucgagaaccucaacaagaaggucgacgacggcuuccucgacaucuggaccuacaacgccgagcuccucguccuccucgagaacgagcgcacccucgacuaccacgacuccaacgucaagaaccucuacgagaagguccgcaaccagcucaaggacaacgccaaggagaucggcaacggcugcuucgaguucuaccacaagugcgacaacaccugcauggaguccgucaagaacggcaccuacgacuaccccaaguacuccgaggaggccaagcucaaccgcgagaagaucgacggcgucaagcucgaguccacccgcaucuaccagauccucgccaucuacuccaccgucgccuccucccucguccucgucgucucccucggcgccaucuccuucuggaugugcuccaacggcucccuccagugccgcaucugcaucuga

SEQ ID NO: 107415 - RNA, 1701 nt, Artificial Sequence; identical to SEQ ID NO: 105871
  derived and/or modified CDS sequence (opt2) from hemagglutinin__InfluenzaA__AHL95307

SEQ ID NO: 107416 - RNA, 1701 nt, Artificial Sequence; identical to SEQ ID NO: 105894
  derived and/or modified CDS sequence (opt2) from hemagglutinin__InfluenzaA__AHL95319

SEQ ID NO: 107417 - RNA, 1701 nt, Artificial Sequence
  derived and/or modified CDS sequence (opt2) from hemagglutinin__InfluenzaA__AHL95331
augaagaccaucaucgcccucuccuacauccucugccucgucuucgcccagaagcuccccggcgacgacaacuccaccgccacccucugccucggccaccacgccguccccaacggcaccaucgucaagaccaucaccaacgaccgcaucgaggucaccaacgccaccgagcucguccagaacuccuccaucggcgagaucugcgacuccccccaccagauccucgacggcgagaacugcacccucaucgacgcccuccucggcgacccccagugcgacggcuuccagaacaagaagugggaccucuucgucgagcgcuccaaggccuacuccaacugcuaccccuacgacguccccgacuacgccucccuccgcucccucgucgccuccuccggcacccucgaguucaacaacgaguccuucaacugggccggcgucacccagaacggcaccuccuccgccugcauccgcggcuccaacuccuccuucuucucccgccucaacuggcucacccaccucaacuucaaguaccccgcccucaacgucaccaugcccaacaacgagcaguucgacaagcucuacaucuggggcguccaccaccccggcaccgacaaggaccagaucuuccucuacgcccaguccuccggccgcaucaccgucuccaccaagcgcucccagcaggccgucauccccaacaucggcucccgcccccgcauccgcaacauccccucccgcaucuccaucuacuggaccaucgucaagcccggcgacauccuccucaucaacuccaccggcaaccucaucgccccccgcggcuacuucaagauccgcuccggcaaguccuccaucaugcgcuccgacgcccccaucggcaagugcaaguccgagugcaucacccccaacggcuccauccccaacgacaagcccuuccagaacgucaaccgcaucaccuacggcgccugcccccgcuacgucaagcaguccacccucaagcucgccaccggcaugcgcaacguccccgagaagcagacccgcggcaucuucggcgccaucgccggcuucaucgagaacggcugggagggcauggucgacggcugguacggcuuccgccaccagaacuccgagggccgcggccaggccgccgaccucaaguccacccaggccgccaucgaccagaucaacggcaagcucaaccgccucaucggcaagaccaacgagaaguuccaccagaucgagaaggaguucuccgaggucgagggccgcauccaggaccucgagaaguacgucgaggacaccaagaucgaccucugguccuacaacgccgagcuccucgucgcccucgagaaccagcacaccaucgaccucaccgacuccgagaugaacaagcucuucgagaagaccaagaagcagcuccgcgagaacgccgaggacaugggcaacggcugcuucaagaucuaccacaagugcgacaacgccugcaucggcuccauccgcaacggcaccuacgaccacgacgucuaccgcgacgaggcccucaacaaccgcuuccagaucaagggcgucgagcucaaguccggcuacaaggacuggauccucuggaucuccuucgccaucuccugcuuccuccucugcgucgcccuccucggcuucaucaugugggccugccagaagggcaacauccgcugcaacaucugcaucuga

SEQ ID NO: 107418 - RNA, 1701 nt, Artificial Sequence
  derived and/or modified CDS sequence (opt2) from hemagglutinin__InfluenzaA__AHL95343
augaagaccaucaucgcccucuccuacauccucugccucgucuucgcccagaagcuccccggcaacgacaacuccaccgccacccucugccucggccaccacgccguccccaacggcaccaucgucaagaccaucaccaacgaccgcaucgaggucaccaacgccaccgagcucguccagaacuccuccaucggcgagaucugcgacuccccccaccagauccucgacggcgagaacugcacccucaucgacgcccuccucggcgacccccagugcgacggcuuccagaacaagaagugggaccucuucgucgagcgcuccaaggccuacuccaacugcuaccccuacgacguccccgacuacgccucccuccgcucccucgucgccuccuccggcacccucgaguucaacaacgaguccuucaacugggccggcgucacccagaacggcaccuccuccgccugcauccgcggcuccaacuccuccuucuucucccgccucaacuggcucacccaccucaacuucaaguaccccgcccucaacgucaccaugcccaacaacgagcaguucgacaagcucuacaucuggggcguccaccaccccggcaccgacaaggaccagaucuuccucuacgcccaguccuccggccgcaucaccgucuccaccaagcgcucccagcaggccgucauccccaacaucggcucccgcccccgcauccgcaacauccccucccgcaucuccaucuacuggaccaucgucaagcccggcgacauccuccucaucaacuccaccggcaaccucaucgccccccgcggcuacuucaagauccgcuccggcaaguccuccaucaugcgcuccgacgcccccaucggcaagugcaaguccgagugcaucacccccaacggcuccauccccaacgacaagcccuuccagaacgucaaccgcaucaccuacggcgccugcccccgcuacgucaagcaguccacccucaagcucgccaccggcaugcgcaacguccccgagaagcagacccgcggcaucuucggcgccaucgccggcuucaucgagaacggcugggagggcauggucgacggcugguacggcuuccgccaccagaacuccgagggccgcggccaggccgccgaccucaaguccacccaggccgccaucgaccagaucaacggcaagcucaaccgccucaucggcaagaccaacgagaaguuccaccagaucgagaaggaguucuccgaggucgagggccgcauccaggaccucgagaaguacgucgaggacaccaagaucgaccucugguccuacaacgccgagcuccucgucgcccucgagaaccagcacaccaucgaccucaccgacuccgagaugaacaagcucuucgagaagaccaagaagcagcuccgcgagaacgccgaggacaugggcaacggcugcuucaagaucuaccacaagugcgacaacgccugcaucggcuccauccgcaacggcaccuacgaccacgacgucuaccgcgacgaggcccucaacaaccgcuuccagauccgcggcgucgagcucaaguccggcuacaaggacuggauccucuggaucuccuucgccaucuccugcuuccuccucugcgucgcccuccucggcuucaucaugugggccugccagaagggcaacauccgcugcaacaucugcaucuga

SEQ ID NO: 107419 - RNA, 1701 nt, Artificial Sequence; identical to SEQ ID NO: 105894
  derived and/or modified CDS sequence (opt2) from hemagglutinin__InfluenzaA__AHL95432

SEQ ID NO: 107420 - RNA, 1701 nt, Artificial Sequence; identical to SEQ ID NO: 106030
  derived and/or modified CDS sequence (opt2) from hemagglutinin__InfluenzaA__AHL95444

SEQ ID NO: 107421 - RNA, 1701 nt, Artificial Sequence; identical to SEQ ID NO: 105894
  derived and/or modified CDS sequence (opt2) from hemagglutinin__InfluenzaA__AHL95457

SEQ ID NO: 107422 - RNA, 1701 nt, Artificial Sequence
  derived and/or modified CDS sequence (opt2) from hemagglutinin__InfluenzaA__AHL95470
augaagaccaucaucgcccucuccuacauccucugccucgucuucgcccagaagcuccccggcaacgacaacuccaccgccacccucugccucggccaccacgccguccccaacggcaccaucgucaagaccaucaccaacgaccagaucgaggucaccaacgccaccgagcucguccaguccuccuccaccggcgagaucugcaacuccccccaccagauccucgacggcgagaacugcacccucaucgacgcccuccucggcgacccccagugcgacggcuuccagaacaagaagugggaccucuucgucgagcgcuccaaggccuacuccaacugcuaccccuacgacguccccgacuacgccucccuccgcucccucgucgccuccuccggcacccucgaguucaacaacgaguccuucaacuggaccggcgucaagcagaacggcaccuccuccgccugcauccgccgcuccaacuccuccuucuucucccgccucaacuggcucacccaccucaacuucaaguaccccgcccucaacgucaccaugcccaacaacgagcaguucgacaagcucuacaucuggggcguccaccaccccggcaccgacaaggaccagaucuuccucuacgcccaguccuccggccgcaucaccgucuccaccaagcgcucccagcaggccgucauccccaacaucggcucccgcccccgcauccgcaacauccccucccgcaucuccaucuacuggaccaucguccgccccggcgacauccuccucaucaacuccaccggcaaccucaucgccccccgcggcuacuucaagauccgcuccggcaaguccuccaucaugcgcuccgacgcccccaucggcaagugcaacuccgagugcaucacccccaacggcuccauccccaacgacaagcccuuccagaacgucaaccgcaucaccuacggcgccugcccccgcuacgucaagcaguccacccucaagcucgccaccggcaugcgcaacguccccgagaagcagacccgcggcaucuucggcgccaucgccggcuucaucgagaacggcugggagggcauggucgacggcugguacggcuuccgccaccagaacuccgagggccgcggccaggccgccgaccucaaguccacccaggccgccaucgaccagaucaacggcaagcucaaccgccucaucggcaagaccaacgagaaguuccaccagaucgagaaggaguucuccgaggucgagggccgcauccaggaccucgagaaguacgucgaggacaccaagaucgaccucugguccuacaacgccgagcuccucgucgcccucgagaaccagcacaccaucgaccucaccgacuccgagaugaacaagcucuucgagaagaccaagaagcagcuccgcgagaacgccgaggacaugggcaacggcugcuucaagaucuaccacaagugcgacaacgccugcaucggcuccauccgcaacggcaccuacaaccacgacgucuaccgcgacgaggcccucaacaaccgcuuccagaucaagggcgucgagcucaaguccggcuacaaggacuggauccucuggaucuccuucgccaucuccugcuuccuccucugcgucgcccuccucggcuucaucaugugggccugccagaagggcaacauccgcugcaacaucugcaucuga

SEQ ID NO: 107423 - RNA, 1701 nt, Artificial Sequence; identical to SEQ ID NO: 106030
  derived and/or modified CDS sequence (opt2) from hemagglutinin__InfluenzaA__AHL95482

SEQ ID NO: 107424 - RNA, 1701 nt, Artificial Sequence; identical to SEQ ID NO: 106030
  derived and/or modified CDS sequence (opt2) from hemagglutinin__InfluenzaA__AHL95494

SEQ ID NO: 107425 - RNA, 1701 nt, Artificial Sequence
  derived and/or modified CDS sequence (opt2) from hemagglutinin__InfluenzaA__AHL95506
augaagaccaucaucgcccucuccuacauccucugccucgucuucgcccagaagcuccccggcaacgacaacuccaccgccacccucugccucggccaccacgccguccccaacggcaccaucguccgcaccaucaccaacgaccgcaucgaggucaccaacgccaccgagcucguccagaacuccuccaucggcgagaucugcgacuccccccaccagauccucgacggcgagaacugcacccucaucgacgcccuccucggcgacccccagugcgacggcuuccagaacaagaagugggaccucuucgucgagcgcuccaaggccuacuccaacugcuaccccuacgacguccccgacuacgccucccuccgcucccucgucgccuccuccggcacccucgaguucaacaacgaguccuucaacugggccggcgucacccagaacggcaccuccuccgccugcauccgcggcuccaacuccuccuucuucucccgccucaacuggcucacccaccucaacuucaaguaccccgcccucaacgucaccaugcccaacaacgagcaguucgacaagcucuacaucuggggcguccaccaccccggcaccgacaaggaccagaucuuccucuacgcccaguccuccggccgcaucaccgucuccaccaagcgcucccagcaggccgucauccccaacaucggcucccgcccccgcauccgcaacauccccucccgcaucuccaucuacuggaccaucgucaagcccggcgacauccuccucaucaacuccaccggcaaccucaucgccccccgcggcuacuucaagauccgcuccggcaaguccuccaucaugcgcuccgacgcccccaucggcaagugcaaguccgagugcaucacccccaacggcuccauccccaacgacaagcccuuccagaacgucaaccgcaucaccuacggcgccugcccccgcuacgucaagcaguccacccucaagcucgccaccggcaugcgcaacguccccgagaagcagacccgcggcaucuucggcgccaucgccggcuucaucgagaacggcugggagggcauggucgacggcugguacggcuuccgccaccagaacuccgagggccgcggccaggccgccgaccucaaguccacccaggccgccaucgaccagaucaacggcaagcucaaccgccucaucggcaagaccaacgagaaguuccaccagaucgagaaggaguucuccgaggucgagggccgcauccaggaccucgagaaguacgucgaggacaccaagaucgaccucugguccuacaacgccgagcuccucgucgcccucgagaaccagcacaccaucgaccucaccgacuccgagaugaacaagcucuucgagaagaccaagaagcagcuccgcgagaacgccgaggacaugggcaacggcugcuucaagaucuaccacaagugcgacaacgccugcaucggcuccauccgcaacggcaccuacgaccacgacgucuaccgcgacgaggcccucaacaaccgcuuccagaucaagggcgucgagcucaaguccggcuacaaggacuggauccucuggaucuccuucgccaucuccugcuuccuccucugcgucgcccuccucggcuucaucaugugggccugccagaagggcaacauccgcugcaacaucugcaucuga

SEQ ID NO: 107426 - RNA, 1701 nt, Artificial Sequence
  derived and/or modified CDS sequence (opt2) from hemagglutinin__InfluenzaA__AHL95518
augaagaccaucaucgcccucuccuacauccucugccucgucuucgcccagaagcuccccggcaacgacaacuccaccgccacccucugccucggccaccacgccguccccaacggcaccaucgucaagaccaucaccaacgaccgcaucgaggucaccaacgccaccgagcucguccagaacuccuccaucggcgagaucugcgacuccccccaccagauccucgacggcgagaacugcacccucaucgacgcccuccucggcgacccccagugcgacggcuuccagaacaagaagugggaccucuucgucgagcgcuccaaggccuacuccaacugcuaccccuacgacguccccgacuacgccucccuccgcucccucgucgccuccuccggcacccucgaguucaacaacgaguccuucaacugggccggcgucacccagaacggcaccuccuccgccugcauccgcggcuccaacuccuccuucuucucccgccucaacuggcucacccaccucaacuucaaguaccccgcccucaacgucaccaugcccaacaacgagcaguucgacaagcucuacaucuggggcguccaccaccccggcaccgacaaggaccagaucuuccucuacgcccaguccuccggccgcaucaccgucuccaccaagcgcucccagcaggccgucauccccaacaucggcucccgcccccgcauccgcaacguccccucccgcaucuccaucuacuggaccaucgucaagcccggcgacauccuccucaucaacuccaccggcaaccucaucgccccccgcggcuacuucaagauccgcuccggcaaguccuccaucaugcgcuccgacgcccccaucggcaagugcaaguccgagugcaucacccccaacggcuccauccccaacgacaagcccuuccagaacgucaaccgcaucaccuacggcgccugcccccgcuacgucaagcaguccacccucaagcucgccaccggcaugcgcaacguccccgagaagcagacccgcggcaucuucggcgccaucgccggcuucaucgagaacggcugggagggcaugauggacggcugguacggcuuccgccaccagaacuccgagggccgcggccaggccgccgaccucaaguccacccaggccgccaucgaccagaucaacggcaagcucaaccgccucaucggcaagaccaacgagaaguuccaccagaucgagaaggaguucuccgaggucgagggccgcauccaggaccucgagaaguacgucgaggacaccaagaucgaccucugguccuacaacgccgagcuccucgucgcccucgagaaccagcacaccaucgaccucaccgacuccgagaugaacaagcucuucgagaagaccaagaagcagcuccgcgagaacgccgaggacaugggcaacggcugcuucaagaucuaccacaagugcgacaacgccugcaucggcuccauccgcaacggcaccuacgaccacgacgucuaccgcgacgaggcccucaacaaccgcuuccagaucaagggcgucgagcucaaguccggcuacaaggacuggauccucuggaucuccuucgccaucuccugcuuccuccucugcgucgcccuccucggcuucaucaugugggccugccagaagggcaacauccgcugcaacaucugcaucuga

SEQ ID NO: 107427 - RNA, 1701 nt, Artificial Sequence; identical to SEQ ID NO: 105904
  derived and/or modified CDS sequence (opt2) from hemagglutinin__InfluenzaA__AHL95530

SEQ ID NO: 107428 - RNA, 1701 nt, Artificial Sequence; identical to SEQ ID NO: 105904
  derived and/or modified CDS sequence (opt2) from hemagglutinin__InfluenzaA__AHL95542

SEQ ID NO: 107429 - RNA, 1701 nt, Artificial Sequence
  derived and/or modified CDS sequence (opt2) from hemagglutinin__InfluenzaA__AHL95554
augaagaccaucaucgcccucuccuacauccucugccucgucuucgcccagaagcuccccggcaacgacaacuccauggccacccucugccucggccaccacgccguccccaacggcaccaucgucaagaccaucaccaacgaccgcaucgaggucaccaacgccaccgagcucguccagaacuccuccaucggcgagaucugcgacuccccccaccagauccucgacggcgagaacugcacccucaucgacgcccuccucggcgacccccagugcgacggcuuccagaacaagaagugggaccucuucgucgagcgcuccaaggccuacuccaacugcuaccccuacgacguccccgacuacgccucccuccgcucccucgucgccuccuccggcacccucgaguucaacaacgaguccuucaacuggaccggcgucacccagaacggcaccuccuccgccugcauccgccgcuccaacuccuccuucuucucccgccucaacuggcucacccaccucaacuucaaguaccccgcccucaacgucaccaugcccaacaacgagcaguucgacaagcucuacaucuggggcguccaccaccccggcaccgacaaggaccagaucuuccucuacgcccaguccuccggccgcaucaccgucuccaccaagcgcucccagcaggccgucauccccaacaucggcucccgcccccgcauccgcaacauccccucccgcaucuccaucuacuggaccaucgucaagcccggcgacauccuccucaucaacuccaccggcaaccucaucgccccccgcggcuacuucaagauccgcuccggcaaguccuccaucaugcgcuccgacgcccccaucggcaagugcaaguccgagugcaucacccccaacggcuccauccccaacgacaagcccuuccagaacgucaaccgcaucaccuacggcgccugcccccgcuacgucaagcaguccacccucaagcucgccaccggcaugcgcaacguccccgagaagcagacccgcggcaucuucggcgccaucgccggcuucaucgagaacggcugggagggcauggucgacggcugguacggcuuccgccaccagaacuccgagggccgcggccaggccgccgaccucaaguccacccaggccgccaucgaccagaucaacggcaagcucaaccgccucaucggcaagaccaacgagaaguuccaccagaucgagaaggaguucuccgaggucgagggccgcauccaggaccucgagaaguacgucgaggacaccaagaucgaccucugguccuacaacgccgagcuccucgucgcccucgagaaccagcacaccaucgaccucaccgacuccgagaugaacaagcucuucgagaagaccaagaagcagcuccgcgagaacgccgaggacaugggcaacggcugcuucaagaucuaccacaagugcgacaacgccugcaucggcuccauccgcaacggcaccuacgaccacaacgucuaccgcgacgaggcccucaacaaccgcuuccagaucaagggcgucgagcucaaguccggcuacaaggacuggauccucuggaucuccuucgccaucuccugcuuccuccucugcgucgcccuccucggcuucaucaugugggccugccagaagggcaacauccgcugcaacaucugcaucuga

SEQ ID NO: 107430 - RNA, 1701 nt, Artificial Sequence
  derived and/or modified CDS sequence (opt2) from hemagglutinin__InfluenzaA__AHL95566
augaagaccaucaucgcccucuccuacauccucugccucgucuucgcccagaagcuccccggcaacgacaacuccaccgccacccucugccucggccaccacgccguccccaacggcaccaucgucaagaccaucaccaacgaccgcaucgaggucaccaacgccaccgagcucguccagaacuccuccaucggcgagaucugcgacuccccccaccagauccucgacggcgagaacugcacccucaucgacgcccuccucggcgacccccagugcgacggcuuccagaacaagaagugggaccucuucgucgagcgcuccaaggccuacuccaacugcuaccccuacgacguccccgacuacgccucccuccgcucccucgucgccuccuccggcacccucgaguucaacaacgaguccuucaacugggccggcgucacccagaacggcaccuccuccgccugcauccgcggcuccaacuccuccuucuucucccgccucaacuggcucacccaccucaacuucaaguaccccgcccucaacgucaccaugcccaacaacgagcaguucgacaagcucuacaucuggggcguccaccaccccggcaccgacaaggaccagaucuuccucuacgcccgcuccuccggccgcaucaccgucuccaccaagcgcucccagcaggccgucauccccaacaucggcucccgcccccgcauccgcaacauccccucccgcaucuccaucuacuggaccaucgucaagcccggcgacauccuccucaucaacuccaccggcaaccucaucgccccccgcggcuacuucaagauccgcuccggcaaguccuccaucaugcgcuccgacgcccccaucggcaagugcaaguccgagugcaucacccccaacggcuccauccccaacgacaagcccuuccagaacgucaaccgcaucaccuacggcgccugcccccgcuacgucaagcaguccacccucaagcucgccaccggcaugcgcaacguccccgagaagcagacccgcggcaucuucggcgccaucgccggcuucaucgagaacggcugggagggcauggucgacggcugguacggcuuccgccaccagaacuccgagggccgcggccaggccgccgaccucaaguccacccaggccgccaucgaccagaucaacggcaagcucaaccgccucaucggcaagaccaacgagaaguuccaccagaucgagaaggaguucuccgaggucgagggccgcauccaggaccucgagaaguacgucgaggacaccaagaucgaccucugguccuacaacgccgagcuccucgucgcccucgagaaccagcacaccaucgaccucaccgacuccgagaugaacaagcucuucgagaagaccaagaagcagcuccgcgagaacgccgaggacaugggcaacggcugcuucaagaucuaccacaagugcgacaacgccugcaucggcuccauccgcaacggcaccuacgaccacgacgucuaccgcgacgaggcccucaacaaccgcuuccagaucaagggcgucgagcucaaguccggcuacaaggacuggauccucuggaucuccuucgccaucuccugcuuccuccucugcgucgcccuccucggcuucaucaugugggccugccagaagggcaacauccgcugcaacaucugcaucuga

SEQ ID NO: 107431 - RNA, 1701 nt, Artificial Sequence
  derived and/or modified CDS sequence (opt2) from hemagglutinin__InfluenzaA__AHL95578
augaagaccaucaucgcccucuccuacauccucugccucgucuucgcccagaagcuccccggcaacgacgacuccaccgccacccucugccucggccaccacgccguccccaacggcaccaucgucaagaccaucaccaacgaccgcaucgaggucaccaacgccaccgagcucguccagaacuccuccaucggcgagaucugcgacuccccccaccagauccucgacggcgagaacugcacccucaucgacgcccuccucggcgacccccagugcgacggcuuccagaacaagaagugggaccucuucgucgagcgcuccaaggccuacuccaacugcuaccccuacgacguccccgacuacgccucccuccgcucccucgucgccuccuccggcacccucgaguucaacaacgaguccuucaacugggccggcgucacccagaacggcaccuccuccgccugcauccgcggcuccaacuccuccuucuucucccgccucaacuggcucacccaccucaacuucaaguaccccgcccucaacgucaccaugcccaacaacgagcaguucgacaagcucuacaucuggggcguccaccaccccggcaccgacaaggaccagaucuuccucuacgcccaguccuccggccgcaucaccgucuccaccaagcgcucccagcaggccgucauccccaacaucggcucccgcccccgcauccgcaacauccccucccgcaucuccaucuacuggaccaucgucaagcccggcgacauccuccucaucaacuccaccggcaaccucaucgccccccgcggcuacuucaagauccgcuccggcaaguccuccaucaugcgcuccgacgcccccaucggcaagugcaaguccgagugcaucacccccaacggcuccauccccaacgacaagcccuuccagaacgucaaccgcaucaccuacggcgccugcccccgcuacgucaagcaguccacccucaagcucgccaccggcaugcgcaacguccccgagaagcagacccgcggcaucuucggcgccaucgccggcuucaucgagaacggcugggagggcaugauggacggcugguacggcuuccgccaccagaacuccgagggccgcggccaggccgccgaccucaaguccacccaggccgccaucgaccagaucaacggcaagcucaaccgccucaucggcaagaccaacgagaaguuccaccagaucgagaaggaguucuccgaggucgagggccgcauccaggaccucgagaaguacgucgaggacaccaagaucgaccucugguccuacaacgccgagcuccucgucgcccucgagaaccagcacaccaucgaccucaccgacuccgagaugaacaagcucuucgagaagaccaagaagcagcuccgcgagaacgccgaggacaugggcaacggcugcuucaagaucuaccacaagugcgacaacgccugcaucggcuccauccgcaacggcaccuacgaccacgacgucuaccgcgacgaggcccucaacaaccgcuuccagaucaagggcgucgagcucaaguccggcuacaaggacuggauccucuggaucuccuucgccaucuccugcuuccuccucugcgucgcccuccucggcuucaucaugugggccugccagaagggcaacauccgcugcaacaucugcaucuga

SEQ ID NO: 107432 - RNA, 1701 nt, Artificial Sequence
  derived and/or modified CDS sequence (opt2) from hemagglutinin__InfluenzaA__AHL95590
augaagaccaucaucgcccucuccuacauccucugccucgucuucgcccagaagcuccccggcaacgacaacuccaccgccacccucugccucggccaccacgccguccccaacggcaccaucgucaagaccaucaccaacgaccgcaucgaggucaccaacgccaccgagcucguccagaacuccuccaucggcgagaucugcgacuccccccaccagauccucgacggcgagaacugcacccucaucgacgcccuccucggcgacccccagugcgacggcuuccagaacaagaagugggaccucuucgucgagcgcuccaaggccuacuccaacugcuaccccuacgacguccccgacuacgccucccuccgcucccucgucgccuccuccggcacccucgaguucaacaacgaguccuucaacuggaccggcgucacccagaacggcaccuccuccuccugcauccgccgcuccaacuccuccuucuucucccgccucaacuggcucacccaccucaacuucaaguaccccgcccucaacgucaccaugcccaacaacgagcaguucgacaagcucuacaucuggggcguccaccaccccggcaccgacaaggaccagaucuuccucuacgcccaguccuccggccgcaucaccgucuccaccaagcgcucccagcaggccgucauccccaacaucggcucccgcccccgcauccgcaacauccccucccgcaucuccaucuacuggaccaucgucaagcccggcgacauccuccucaucaacuccaccggcaaccucaucgccccccgcggcuacuucaagauccgcuccggcaaguccuccaucaugcgcuccgacgcccccaucggcaagugcaaguccgagugcaucacccccaacggcuccauccccaacgacaagcccuuccagaacgucaaccgcaucaccuacggcgccugcccccgcuacgucaagcaguccacccucaagcucgccaccggcaugcgcaacguccccgagaagcagacccgcggcaucuucggcgccaucgccggcuucaucgagaacggcugggagggcauggucgacggcugguacggcuuccgccaccagaacuccgagggccgcggccaggccgccgaccucaaguccacccaggccgccaucgaccagaucaacggcaagcucaaccgccucaucggcaagaccaacgagaaguuccaccagaucgagaaggaguucuccgaggucgagggccgcauccaggaccucgagaaguacgucgaggacaccaagaucgaccucugguccuacaacgccgagcuccucgucgcccucgagaaccagcacaccaucgaccucaccgacuccgagaugaacaagcucuucgagaagaccaagaagcagcuccgcgagaacgccgaggacaugggcaacggcugcuucaagaucuaccacaagugcgacaacgccugcaucggcuccauccgcaacggcaccuacgaccacaacgucuaccgcgacgaggcccucaacaaccgcuuccagaucaagggcgucgagcucaaguccggcuacaaggacuggauccucuggaucuccuucgccaucuccugcuuccuccucugcgucgcccuccucggcuucaucaugugggccugccagaagggcaacauccgcugcaacaucugcaucuga

SEQ ID NO: 107433 - RNA, 1701 nt, Artificial Sequence; identical to SEQ ID NO: 105904
  derived and/or modified CDS sequence (opt2) from hemagglutinin__InfluenzaA__AHL95602

SEQ ID NO: 107434 - RNA, 1701 nt, Artificial Sequence; identical to SEQ ID NO: 105904
  derived and/or modified CDS sequence (opt2) from hemagglutinin__InfluenzaA__AHL95614

SEQ ID NO: 107435 - RNA, 1701 nt, Artificial Sequence
  derived and/or modified CDS sequence (opt2) from hemagglutinin__InfluenzaA__AHL95626
augaagaccaucaucgcccucuccuacguccucugccucgucuucgcccagaagcuccccggcaacgacaacuccaccgccacccucugccucggccaccacgccguccccaacggcaccaucgucaagaccaucaccaacgaccgcaucgaggucaccaacgccaccgagcucguccagaacuccuccaucggcgagaucugcgacuccccccaccagauccucgacggcgagaacugcacccucaucgacgcccuccucggcgacccccagugcgacggcuuccagaacaagaagugggaccucuucgucgagcgcuccaaggccuacuccaacugcuaccccuacgacguccccgacuacgccucccuccgcucccucgucgccuccuccggcacccucgaguucaacaacgaguccuucaacugggccggcgucacccagaacggcaccuccuccgccugcauccgcggcuccaacuccuccuucuucucccgccucaacuggcucacccaccucaacuucaaguaccccgcccucaacgucaccaugcccaacaacgagcaguucgacaagcucuacaucuggggcguccaccaccccggcaccgacaaggaccagaucuuccucuacgcccaguccuccggccgcaucaccgucuccaccaagcgcucccagcaggccgucauccccaacaucggcucccgcccccgcauccgcaacauccccucccgcaucuccaucuacuggaccaucgucaagcccggcgacauccuccucaucaacuccaccggcaaccucaucgccccccgcggcuacuucaagauccgcuccggcaaguccuccaucaugcgcuccgacgcccccaucggcaagugcaaguccgagugcaucacccccaacggcuccauccccaacgacaagcccuuccagaacgucaaccgcaucaccuacggcgccugcccccgcuacgucaagcaguccacccucaagcucgccaccggcaugcgcaacguccccgagaagcagacccgcggcaucuucggcgccaucgccggcuucaucgagaacggcugggagggcauggucgacggcugguacggcuuccgccaccagaacuccgagggccgcggccaggccgccgaccucaaguccacccaggccgccaucgaccagaucaacggcaagcucaaccgccucaucggcaagaccaacgagaaguuccaccagaucgagaaggaguucuccgaggucgagggccgcauccaggaccucgagaaguacgucgaggacaccaagaucgaccucugguccuacaacgccgagcuccucgucgcccucgagaaccagcacaccaucgaccucaccgacuccgagaugaacaagcucuucgagaagaccaagaagcagcuccgcgagaacgccgaggacaugggcaacggcugcuucaagaucuaccacaagugcgacaacgccugcaucggcuccauccgcaacggcaccuacgaccacgacgucuaccgcgacgaggcccucaacaaccgcuuccagaucaagggcgucgagcucaaguccggcuacaaggacuggauccucuggaucuccuucgccaucuccugcuuccuccucugcgucgcccuccucggcuucaucaugugggccugccagaagggcaacauccgcugcaacaucugcaucuga

SEQ ID NO: 107436 - RNA, 1701 nt, Artificial Sequence; identical to SEQ ID NO: 105904
  derived and/or modified CDS sequence (opt2) from hemagglutinin__InfluenzaA__AHL95638

SEQ ID NO: 107437 - RNA, 1701 nt, Artificial Sequence; identical to SEQ ID NO: 105904
  derived and/or modified CDS sequence (opt2) from hemagglutinin__InfluenzaA__AHL95650

SEQ ID NO: 107438 - RNA, 1701 nt, Artificial Sequence
  derived and/or modified CDS sequence (opt2) from hemagglutinin__InfluenzaA__AHL95662
augaagaccaucaucgcccucuccuacauccucugccucgucuucgcccagaagcuccccggcaacgacaacuccaccgccacccucugccucggccaccacgccguccccaacggcaccaucgucaagaccaucaccaacgaccgcaucgaggucaccaacgccaccgagcucguccagaacuccuccaucggcgagaucugcgacuccccccaccagauccucgacggcgagaacugcacccucaucgacgcccuccucggcgacccccagugcgacggcuuccagaacaagaagugggaccucuucgucgagcgcuccaaggccuacuccaacugcuaccccuacgacguccccgacuacgccucccuccgcucccucgucgccuccuccggcacccucgaguucaacaacgaguccuucaacugggccggcgucacccagaacggcaccuccuccgccugcauccgcggcuccaacuccuccuucuucucccgccucaacuggcucacccaccucaacuucaaguaccccgcccucaacgucaccaugcccaacaacgagcaguucgacaagcucuacaucuggggcguccaccaccccggcaccgacaaggaccagaucuuccucuacgcccaguccuccggccgcaucaccgucuccaccaagcgcucccagcaggccgucauccccaacaucggcucccgcccccgcauccgcaacauccccucccgcaucuccaucuacuggaccaucgucaagcccggcgacauccuccucaucaacuccaccggcaaccucaucgccccccgcggcuacuucaagauccgcuccggcaaguccuccaucaugcgcuccgacgcccccaucggcaagugcaaguccgagugcaucacccccaacggcuccauccccaacgacaagcccuuccagaacgucaaccgcaucaccuacggcgccugcccccgcuacgucaagcaguccacccucaagcucgccaccggcaugcgcaacguccccgagaagcagacccgcggcaucuucggcgccaucgccggcuucaucgagaacggcugggagggcaugauggacggcugguacggcuuccgccaccagaacuccgagggccgcggccaggccgccgaccucaaguccacccaggccgccaucgaccagaucaacggcaagcucaaccgccucaucggcaagaccaacgagaaguuccaccagaucgagaaggaguucuccgaggucgagggccgcauccaggaccucgagaaguacgucgaggacaccaagaucgaccucugguccuacaacgccgagcuccucgucacccucgagaaccagcacaccaucgaccucaccgacuccgagaugaacaagcucuucgagaagaccaagaagcagcuccgcgagaacgccgaggacaugggcaacggcugcuucaagaucuaccacaagugcgacaacgccugcaucggcuccauccgcaacggcaccuacgaccacgacgucuaccgcgacgaggcccucaacaaccgcuuccagaucaagggcgucgagcucaaguccggcuacaaggacuggauccucuggaucuccuucgccaucuccugcuuccuccucugcgucgcccuccucggcuucaucaugugggccugccagaagggcaacauccgcugcaacaucugcaucuga

SEQ ID NO: 107439 - RNA, 1701 nt, Artificial Sequence; identical to SEQ ID NO: 106030
  derived and/or modified CDS sequence (opt2) from hemagglutinin__InfluenzaA__AHL95686

SEQ ID NO: 107440 - RNA, 1701 nt, Artificial Sequence; identical to SEQ ID NO: 106030
  derived and/or modified CDS sequence (opt2) from hemagglutinin__InfluenzaA__AHL95698

SEQ ID NO: 107441 - RNA, 1701 nt, Artificial Sequence; identical to SEQ ID NO: 105904
  derived and/or modified CDS sequence (opt2) from hemagglutinin__InfluenzaA__AHL95710

SEQ ID NO: 107442 - RNA, 1701 nt, Artificial Sequence; identical to SEQ ID NO: 107418
  derived and/or modified CDS sequence (opt2) from hemagglutinin__InfluenzaA__AHL95722

SEQ ID NO: 107443 - RNA, 1701 nt, Artificial Sequence; identical to SEQ ID NO: 105894
  derived and/or modified CDS sequence (opt2) from hemagglutinin__InfluenzaA__AHL95734

SEQ ID NO: 107444 - RNA, 1701 nt, Artificial Sequence; identical to SEQ ID NO: 105894
  derived and/or modified CDS sequence (opt2) from hemagglutinin__InfluenzaA__AHL95746

SEQ ID NO: 107445 - RNA, 1701 nt, Artificial Sequence; identical to SEQ ID NO: 106033
  derived and/or modified CDS sequence (opt2) from hemagglutinin__InfluenzaA__AHL95758

SEQ ID NO: 107446 - RNA, 1701 nt, Artificial Sequence; identical to SEQ ID NO: 105904
  derived and/or modified CDS sequence (opt2) from hemagglutinin__InfluenzaA__AHL95770

SEQ ID NO: 107447 - RNA, 1701 nt, Artificial Sequence
  derived and/or modified CDS sequence (opt2) from hemagglutinin__InfluenzaA__AHL95782
augaagaccaucaucgcccucuccuacauccucugccucgucuucgcccagaagcuccccggcaacgacaacuccaccgccacccucugccucggccaccacgccguccccaacggcaccaucgucaagaccaucaccaacgaccgcaucgaggucaccaacgccaccgagcucguccagaacuccuccaucggcgagaucugcaacuccccccaccagauccucgacggcgagaacugcacccucaucgacgcccuccucggcgacccccagugcgacggcuuccagaacaagaagugggaccucuucgucgagcgcuccaaggccuacuccaacugcuaccccuacgacguccccgacuacgccucccuccgcucccucgucgccuccuccggcacccucgaguucaacaacgaguccuucaacuggaccggcgucacccagaacggcaccuccuccgccugcauccgccgcuccaacuccuccuucuucucccgccucaacuggcucacccaccucaacuucaaguaccccgcccucaacgucaccaugcccaacaacgagcaguucgacaagcucuacaucuggggcguccaccaccccggcaccgacaaggaccagaucuuccucuacgcccaguccuccggccgcaucaccgucuccaccaagcgcucccagcaggccgucauccccaacaucggcucccgcccccgcauccgcaacauccccucccgcaucuccaucuacuggaccaucgucaagcccggcgacauccuccucaucaacuccaccggcaaccucaucgccccccgcggcuacuucaagauccgcuccggcaaguccuccaucaugcgcuccgacgcccccaucggcaagugcaaguccgagugcaucacccccaacggcuccauccccaacgacaagcccuuccagaacgucaaccgcaucaccuacggcgccugcccccgcuacgucaagcaguccacccucaagcucgccaccggcaugcgcaacguccccgagaagcagacccgcggcaucuucggcgccaucgccggcuucaucgagaacggcugggagggcauggucgacggcugguacggcuuccgccaccagaacuccgagggccgcggccaggccgccgaccucaaguccacccaggccgccaucgaccagaucaacggcaagcucaaccgccucaucggcaagaccaacgagaaguuccaccagaucgagaaggaguucuccgaggucgagggccgcauccaggaccucgagaaguacgucgaggacaccaagaucgaccucugguccuacaacgccgagcuccucgucgcccucgagaaccagcacaccaucgaccucaccgacuccgagaugaacaagcucuucgagaagaccaagaagcagcuccgcgagaacgccgaggacaugggcaacggcugcuucaagaucuaccacaagugcgacaacgccugcaucggcuccauccgcaacggcaccuacgaccacgacgucuaccgcgacgaggcccucaacaaccgcuuccagaucaagggcgucgagcucaaguccggcuacaaggacuggauccucuggaucuccuucgccaucuccugcuuccuccucugcgucgcccuccucggcuucaucaugugggccugccagaagggcaacauccgcugcaacaucugcaucuga

SEQ ID NO: 107448 - RNA, 1701 nt, Artificial Sequence
  derived and/or modified CDS sequence (opt2) from hemagglutinin__InfluenzaA__AHL95794
augaagaccaucaucgcccucuccuacauccucugccucgucuucgcccagaagcuccccggcaacgacaacuccaccgccacccucugccucggccaccacgccguccccaacggcaccaucgucaagaccaucaccaacgaccgcaucgaggucaccaacgccaccgagcucguccagaacuccuccaucggcgagaucugcgacuccccccaccagauccucgacggcgagaacugcacccucaucgacgcccuccucggcgacccccagugcgacggcuuccagaacaagaagugggaccucuucgucgagcgcaacaaggccuacuccaacugcuaccccuacgacguccccgacuacgccucccuccgcucccucgucgccuccuccggcacccucgaguucaacaacgaguccuucaacugggccggcgucacccagaacggcaccuccuccgccugcauccgcggcuccaacuccuccuucuucucccgccucaacuggcucacccaccucaacuucaaguaccccgcccucaacgucaccaugcccaacaacgagcaguucgacaagcucuacaucuggggcguccaccaccccggcaccgacaaggaccagaucuuccucuacgcccaguccuccggccgcaucaccgucuccaccaagcgcucccagcaggccgucauccccaacaucggcucccgcccccgcauccgcaacauccccucccgcaucuccaucuacuggaccaucgucaagcccggcgacauccuccucaucaacuccaccggcaaccucaucgccccccgcggcuacuucaagauccgcuccggcaaguccuccaucaugcgcuccgacgcccccaucggcaagugcaaguccgagugcaucacccccaacggcuccauccccaacgacaagcccuuccagaacgucaaccgcaucaccuacggcgccugcccccgcuacgucaagcaguccacccucaagcucgccaccggcaugcgcaacguccccgagaagcagacccgcggcaucuucggcgccaucgccggcuucaucgagaacggcugggagggcauggucgacggcugguacggcuuccgccaccagaacuccgagggccgcggccaggccgccgaccucaaguccacccaggccgccaucgaccagaucaacggcaagcucaaccgccucaucggcaagaccaacgagaaguuccaccagaucgagaaggaguucuccgaggucgagggccgcauccaggaccucgagaaguacgucgaggacaccaagaucgaccucugguccuacaacgccgagcuccucgucgcccucgagaaccagcacaccaucgaccucaccgacuccgagaugaacaagcucuucgagaagaccaagaagcagcuccgcgagaacgccgaggacaugggcaacggcugcuucaagaucuaccacaagugcgacaacgccugcaucggcuccauccgcaacggcaccuacgaccacgacgucuaccgcgacgaggcccucaacaaccgcuuccagaucaagggcgucgagcucaaguccggcuacaaggacuggauccucuggaucuccuucgccaucuccugcuuccuccucugcgucgcccuccucggcuucaucaugugggccugccagaagggcaacauccgcugcaacaucugcaucuga

SEQ ID NO: 107449 - RNA, 1701 nt, Artificial Sequence
  derived and/or modified CDS sequence (opt2) from hemagglutinin__InfluenzaA__AHL95806
augaagaccaucaucgcccucuccuacauccucugccucgucuucgcccagaagcuccccggcaacgacaacuccaccgccacccucugccucggccaccacgccguccccaacggcaccaucgucaagaccaucaccaacgaccgcaucgaggucaccaacgccaccgagcucguccagaacuccuccaucggcgagaucugcgacuccccccaccagauccucgacggcgagaacugcacccucaucgacgcccuccucggcgacccccagugcgacggcuuccagaacaagaagugggaccucuucgucgagcgcuccaaggccuacuccaacugcuaccccuacgacguccccgacuacgccucccuccgcucccucgucgccuccuccggcacccucgaguucaacaacgaguccuucaacugggccggcgucacccagaacggcaccuccuccgccugcauccgcggcuccaacuccuccuucuucucccgccucaacuggcucacccaccucaacuucaaguaccccgcccucaacgucaccaugcccaacaacgagcaguucgacaagcucuacaucuggggcguccaccaccccggcaccgacaaggaccagaucuuccucuacgcccaguccuccggccgcaucaccgucuccaccaagcgcucccagcaggccgucauccccaacaucggcucccgcccccgcauccgcaacauccccucccgcaucuccaucuacuggaccaucgucaagcccggcgacauccuccucaucaacuccaccggcaaccucaucgccccccgcggcuacuucaagauccgcuccggcaaguccuccaucaugcgcuccgacgcccccaucggcaagugcaaguccgagugcaucacccccaacggcuccauccccaacgacaagcccuuccagaacgucaaccgcaucaccuacggcgccugcccccgcuacgucaagcaguccacccucaagcucgccaccggcaugcgcaacguccccgagaagcagacccgcggcaucuucggcgccaucgccggcuucaucgagaacggcugggagggcauggucgacggcugguacggcuuccgccaccagaacuccgagggccgcggccaggccgccgaccucaaguccacccaggccgccaucgaccagaucaacggcaagcucaaccgccucaucggcaagaccaacgagaaguuccaccagaucgagaaggaguucuccgaggucgagggccgcauccaggaccucgagaaguacgucgaggacaccaagaucgaccucugguccuacaacgccgagcuccucgucgcccucgagaaccagcacaccaucgaccucaccgacuccgagaugaacaagcucuucgagaagaccaagaagcagcuccgcgagaacgccgaggacaugggcaacggcugcuucaagaucuaccacaagugcgacaacgccugcaucggcuccauccgcaacggcaccuacgaccacgacgucuaccgcgacgaggcccucaacaaccgcuuccagaucaagggcgucgagcucaaguccggcuacaaggacuggauccucuggaucuccuucgccaucuccugcuuccuccucugcgucgcccuccucggcuccaucaugugggccugccagaagggcaacauccgcugcaacaucugcaucuga

SEQ ID NO: 107450 - RNA, 1701 nt, Artificial Sequence; identical to SEQ ID NO: 106030
  derived and/or modified CDS sequence (opt2) from hemagglutinin__InfluenzaA__AHL95818

SEQ ID NO: 107451 - RNA, 1701 nt, Artificial Sequence; identical to SEQ ID NO: 105894
  derived and/or modified CDS sequence (opt2) from hemagglutinin__InfluenzaA__AHL95830

SEQ ID NO: 107452 - RNA, 1701 nt, Artificial Sequence; identical to SEQ ID NO: 106030
  derived and/or modified CDS sequence (opt2) from hemagglutinin__InfluenzaA__AHL95842

SEQ ID NO: 107453 - RNA, 1701 nt, Artificial Sequence; identical to SEQ ID NO: 105894
  derived and/or modified CDS sequence (opt2) from hemagglutinin__InfluenzaA__AHL95854

SEQ ID NO: 107454 - RNA, 1701 nt, Artificial Sequence; identical to SEQ ID NO: 105904
  derived and/or modified CDS sequence (opt2) from hemagglutinin__InfluenzaA__AHL95866

SEQ ID NO: 107455 - RNA, 1701 nt, Artificial Sequence
  derived and/or modified CDS sequence (opt2) from hemagglutinin__InfluenzaA__AHL95878
augaaggccauccucgucaucaugcucuacaccuucgccaccgccaacgccgacacccucugcaucggcuaccacgccaacaacuccaccgacaccgucgacaccguccucgagaagaacgucaccgucacccacuccgucaaccuccucgaggacaagcacaacggcaagcucugcaagcuccgcggcgucuccccccuccaccucggcaagugcaacaucgccggcuggauccucggcaaccccgagugcgagucccucuccaccgccuccuccugguccuacaucgucgagaccuccggcuccgacaacggcaccugcuaccccggcgacuucaucgacuacgaggagcuccgcgagcagcucuccuccgucuccuccuucgagcgcuucgagaucuuccccaagaccuccuccuggcccaaccacgacuccaacaagggcgucaccgccgccugcccccacgccggcgccaagggcuucuacaagaaccucaucuggcucgucaagaagggcaacuccuaccccaagcucuccaucuccuacaucaacgacaagggcaaggagguccucguccucuggggcauccaccaccccuccaccaccgccgaccagcagucccucuaccagaacgccgacaccuacgucuucgucggcaccucccgcuacuccaagaaguucaagcccgagaucgccauccgccccaagguccgcgaccaggagggccgcaugaacuacuacuggacccucgucgagcccggcgacaagaucaccuucgaggccaccggcaaccucgucgucccccgcuacgccuucgccauggagcgcaacgccggcuccggcaucaucaucuccgacacccccguccacgacugcaacaccaccugccagacccccaagggcgccaucaacaccucccuccccuuccagaacauccaccccaucaccaucggcaagugccccaaguacgucaaguccaccaagcuccgccucgccaccggccuccgcaacguccccuccauccagucccgcggccucuucggcgccaucgccggcuucaucgagggcggcuggaccggcauggucgacggcugguacggcuaccaccaccagaacgagcagggcuccggcuacgccgccgaccucaaguccacccagaacgccaucgacaagaucaccaacaaggucaacuccgucaucgagaagaugaacacccaguucaccgccgucggcaaggaguucaaccaccucgagaagcgcaucgagaaccucaacaagaaggucgacgacggcuuccucgacaucuggaccuacaacgccgagcuccucguccuccucgagaacgagcgcacccucgacuaccacgacuccaacgucaagaaccucuacgagaagguccgcaaccagcucaagaacaacgccaaggagaucggcaacggcugcuucgaguucuaccacaagugcgacaacaccugcauggaguccgucaagaacggcaccuacgacuaccccaaguacuccgaggaggccaagcucaaccgcgaggagaucgacggcgucaagcucgaguccacccgcaucuaccagauccucgccaucuacuccaccgccgccuccucccucguccucgucgucucccucggcgccaucuccuucuggaugugcuccaacggcucccuccagugccgcaucugcaucuga

SEQ ID NO: 107456 - RNA, 1701 nt, Artificial Sequence; identical to SEQ ID NO: 105904
  derived and/or modified CDS sequence (opt2) from hemagglutinin__InfluenzaA__AHL95889

SEQ ID NO: 107457 - RNA, 1701 nt, Artificial Sequence; identical to SEQ ID NO: 106030
  derived and/or modified CDS sequence (opt2) from hemagglutinin__InfluenzaA__AHL95901

SEQ ID NO: 107458 - RNA, 1701 nt, Artificial Sequence; identical to SEQ ID NO: 106030
  derived and/or modified CDS sequence (opt2) from hemagglutinin__InfluenzaA__AHL95913

SEQ ID NO: 107459 - RNA, 1701 nt, Artificial Sequence
  derived and/or modified CDS sequence (opt2) from hemagglutinin__InfluenzaA__AHL95937
augaagaccaucaucgcccucuccuacauccucugccucgucuucgcccagaagcuccccggcaacgacaacuccaccgccacccucugccucggccaccacgccguccccaacggcaccaucgucaagaccaucaccaacgaccgcaucgaggucaccaacgccaccgagcucguccagaacuccuccaucggcgagaucugcgacuccccccaccagauccucgacggcgagaacugcacccucaucgacgcccuccucggcgacccccagugcgacggcuuccagaacaagaagugggaccucuucgucgagcgcuccaaggccuacuccaacugcuaccccuacgacguccccgacuacgccucccuccgcucccucgucgccuccuccggcacccucgaguucaacaacgaguccuucaacugggccggcgucacccagaacggcaccuccuccgccugcauccgcggcuccaacuccuccuucuucucccgccucaacuggcucacccaccucaacuucaaguaccccgcccucaacgucaccaugcccaacaacgagcaguucgacaagcucuacaucuggggcguccaccaccccggcaccgacaaggaccagaucuuccucuacgcccaguccuccggccgcaucaccgucuccaccaagcgcucccagcaggccgucauccccaacaucggcucccgcccccgcauccgcaacauccccucccgcaucuccaucuacuggaccaucgucaagcccggcgacauccuccucaucaacuccaccggcaaccucaucgccccccgcggcuacuucaagauccgcuccggcaaguccuccaucaugcgcuccgacgcccccaucggcaagugcaaguccgagugcaucacccccaacggcuccauccccaacgacaagcccuuccagaacgucaaccgcaucaccuacggcgccugcccccgcuacgucaagcaguccacccucaagcucgccaccggcaugcgcaacguccccgagaagcagacccgcggcaucuucggcgccaucgccggcuucaucgagaacggcugggagggcauggucgacggcugguacggcuuccgccaccagaacuccgagggccgcggccaggccgccgaccucaaguccacccaggccgccaucgaccagaucaacggcaagcucaaccgccucaucggcaagaccaacgagaaguuccaccagaucgagaaggaguucuccgaggucgagggccgcauccaggaccucgagaaguacgucgaggacaccaagaccgaccucugguccuacaacgccgagcuccucgucgcccucgagaaccagcacaccaucgaccucaccgacuccgagaugaacaagcucuucgagaagaccaagaagcagcuccgcgagaacgccgaggacaugggcaacggcugcuucaagaucuaccacaagugcgacaacgccugcaucggcuccauccgcaacggcaccuacgaccacgacgucuaccgcgacgaggcccucaacaaccgcuuccagaucaagggcgucgagcucaaguccggcuacaaggacuggauccucuggaucuccuucgccaucuccugcuuccuccucugcgucgcccuccucggcuucaucaugugggccugccagaagggcaacauccgcugcaacaucugcaucuga

SEQ ID NO: 107460 - RNA, 1701 nt, Artificial Sequence
  derived and/or modified CDS sequence (opt2) from hemagglutinin__InfluenzaA__AHL95949
augaagaccaucaucgcccucuccuacauccucugccucgucuucgcccagaagcuccccggcaacgacaacuccaccgccacccucugccucggccaccacgccguccccaacggcaccaucgucaagaccaucaccaacgaccgcaucgaggucaccaacgccaccgagcucguccagaacuccuccaucggcgagaucugcgacuccccccaccagauccucgacggcgagaacugcacccucaucgacgcccuccucggcgacccccagugcgacggcuuccagaacaagaagugggaccucuucgucgagcgcuccaaggccuacuccaacugcuaccccuacgacguccccgacuacgccucccuccgcucccucgucgccuccuccggcacccucgaguucaacaacgaguccuucaacuggaccggcgucacccagaacggcaccuccuccgccugcauccgccgcuccaacaacuccuucuucucccgccucaacuggcucacccacuccaacuucaaguaccccgcccucaacaugaccaugcccaacaacgagcaguucgacaagcucuacaucuggggcguccaccaccccggcaccgacaaggaccagaucuuccucuacgcccaguccuccggccgcaucaccgucuccaccaagcgcucccagcaggccgucauccccaacaucggcucccgcccccgcauccgcaacauccccucccgcaucuccaucuacuggaccaucgucaagcccggcgacauccuccucaucaacuccaccggcaaccucaucgccccccgcggcuacuucaagauccgcuccggcaaguccuccaucaugcgcuccgacgcccccaucggcaagugcaaguccgagugcaucacccccaacggcuccauccccaacgacaagcccuuccagaacgucaaccgcaucaccuacggcgccugcccccgcuacgucaagcaguccacccucaagcucgccaccggcaugcgcaacguccccgagaagcagacccgcggcaucuucggcgccaucgccggcuucaucgagaacggcugggagggcaugauggacggcugguacggcuuccgccaccagaacuccgagggccgcggccaggccgccgaccucaaguccacccaggccgccaucgaccagaucaacggcaagcucaaccgccucaucggcaagaccaacgagaaguuccaccagaucgagaaggaguucuccgaggucgagggccgcauccaggaccucgagaaguacgucgaggacaccaagaucgaccucugguccuacaacgccgagcuccucgucgcccucgagaaccagcacaccaucgaccucaccgacuccgagaugaacaagcucuucgagaagaccaagaagcagcuccgcgagaacgccgaggacaugggcaacggcugcuucaagaucuaccacaagugcgacaacgccugcaucggcuccauccgcaacggcaccuacgaccacgacgucuaccgcgacgaggcccucaacaaccgcuuccagaucaagggcgucgagcucaaguccggcuacaaggacuggauccucuggaucuccuucgccaucuccugcuuccuccucugcgucgcccuccucggcuucaucaugugggccugccagaagggcaacauccgcugcaacaucugcaucuga

SEQ ID NO: 107461 - RNA, 1701 nt, Artificial Sequence; identical to SEQ ID NO: 105904
  derived and/or modified CDS sequence (opt2) from hemagglutinin__InfluenzaA__AHL95961

SEQ ID NO: 107462 - RNA, 1701 nt, Artificial Sequence; identical to SEQ ID NO: 105904
  derived and/or modified CDS sequence (opt2) from hemagglutinin__InfluenzaA__AHL95973

SEQ ID NO: 107463 - RNA, 1701 nt, Artificial Sequence; identical to SEQ ID NO: 105904
  derived and/or modified CDS sequence (opt2) from hemagglutinin__InfluenzaA__AHL95985

SEQ ID NO: 107464 - RNA, 1701 nt, Artificial Sequence
  derived and/or modified CDS sequence (opt2) from hemagglutinin__InfluenzaA__AHL95997
augaagaccaucaucgcccucuccuacauccucugccucgucuucgcccagaagcuccccggcaacgacaacuccaccgccacccucugccucggccaccacgccguccccaacggcaccaucgucaagaccaucaccaacgaccgcaucgaggucaccaacgccaccgagcucguccagaacuccuccaucggcgagaucugcgacuccccccaccagauccucgacggcgagaacugcacccucaucgacgcccuccucggcgacccccagugcgacggcuuccagaacaagaagugggaccucuucgucgagcgcuccaaggccuacuccaacugcuaccccuacgacguccccgacuacgccucccuccgcucccucgucgccuccuccggcacccucgaguucaacaacgaguccuucaacugggccggcgucacccagaacggcaccuccuccuccugcauccgcggcuccaaguccuccuucuucucccgccucaacuggcucacccaccucaacuucaaguaccccgcccucaacgucaccaugcccaacaacgagcaguucgacaagcucuacaucuggggcguccaccaccccggcaccgacaaggaccagaucuuccucuacgcccaguccuccggccgcaucaccgucuccaccaagcgcucccagcaggccgucauccccaacaucggcucccgcccccgcauccgcaacauccccucccgcaucuccaucuacuggaccaucgucaagcccggcgacauccuccucaucaacuccaccggcaaccucaucgccccccgcggcuacuucaagauccgcuccggcaaguccuccaucaugcgcuccgacgcccccaucggcaagugcaaguccgagugcaucacccccaacggcuccauccccaacgacaagcccuuccagaacgucaaccgcaucaccuacggcgccugcccccgcuacgucaagcaguccacccucaagcucgccaccggcaugcgcaacguccccgagaagcagacccgcggcaucuucggcgccaucgccggcuucaucgagaacggcugggagggcaugauggacggcugguacggcuuccgccaccagaacuccgagggccgcggccaggccgccgaccucaaguccacccaggccgccaucgaccagaucaacggcaagcucaaccgccucaucggcaagaccaacgagaaguuccaccagaucgagaaggaguucuccgaggucgagggccgcauccaggaccucgagaaguacgucgaggacaccaagaucgaccucugguccuacaacgccgagcuccucgucgcccucgagaaccagcacaccaucgaccucaccgacuccgagaugaacaagcucuucgagaagaccaagaagcagcuccgcgagaacgccgaggacaugggcaacggcugcuucaagaucuaccacaagugcgacaacgccugcaucggcuccauccgcaacggcaccuacgaccacgacgucuaccgcgacgaggcccucaacaaccgcuuccagaucaagggcgucgagcucaaguccggcuacaaggacuggauccucuggaucuccuucgccaucuccugcuuccuccucugcgucgcccuccucggcuucaucaugugggccugccagaagggcaacauccgcugcaacaucugcaucuga

SEQ ID NO: 107465 - RNA, 1701 nt, Artificial Sequence
  derived and/or modified CDS sequence (opt2) from hemagglutinin__InfluenzaA__AHL96021
augaagaccaucaucgcccucuccuacauccucugccucgucuucgcccagaagcuccccggcaacgacaacuccaccgccacccucugccucggccaccacgccguccccaacggcaccaucgucaagaccaucaccaacgaccgcaucgaggucaccaacgccaccgagcucguccagaacuccuccaucggcgagaucugcgacuccccccaccagauccucgacggcgagaacugcacccucaucgacgcccuccucggcgacccccagugcgacggcuuccagaacaagaagugggaccucuucgucgagcgcuccaaggccuacuccaacugcuaccccuacgacguccccgacuacgccucccuccgcucccucgucgccuccuccggcacccucgaguucaacaacgaguccuucaacugggccggcgucacccagaacggcaccuccuccgccugcauccgcggcuccaaguccuccuucuucucccgccucaacuggcucacccaccucaacuucaaguaccccgcccucaacgucaccaugcccaacaacgagcaguucgacaagcucuacaucuggggcguccaccaccccggcaccgacaaggaccagaucuuccucuacgcccaguccuccggccgcaucaccgucuccaccaagcgcucccagcaggccgucauccccaacaucggcucccgcccccgcauccgcaacauccccucccgcaucuccaucuacuggaccaucgucaagcccggcgacauccuccucaucaacuccaccggcaaccucaucgccccccgcggcuacuucaagauccgcuccggcaaguccuccaucaugcgcuccgacgcccccaucggcaagugcaaguccgagugcaucacccccaacggcuccauccccaacgacaagcccuuccagaacgucaaccgcaucaccuacggcgccugcccccgcuacgucaagcaguccacccucaagcucgccaccggcaugcgcaacguccccgagaagcagacccgcggcaucuucggcgccaucgccggcuucaucgagaacggcugggagggcaugauggacggcugguacggcuuccgccaccagaacuccgagggccgcggccaggccgccgaccucaaguccacccaggccgccaucgaccagaucaacggcaagcucaaccgccucaucggcaagaccaacgagaaguuccaccagaucgagaaggaguucuccgaggucgagggccgcauccaggaccucgagaaguacgucgaggacaccaagaucgaccucugguccuacaacgccgagcuccucgucgcccucgagaaccagcacaccaucgaccucaccgacuccgagaugaacaagcucuucgagaagaccaagaagcagcuccgcgagaacgccgaggacaugggcaacggcugcuucaagaucuaccacaagugcgacaacgccugcaucggcuccauccgcaacggcaccuacgaccacgacgucuaccgcgacgaggcccucaacaaccgcuuccagaucaagggcgucgagcucaaguccggcuacaaggacuggauccucuggaucuccuucgccaucuccugcuuccuccucugcgucgcccuccucggcuucaucaugugggccugccagaagggcaacauccgcugcaacaucugcaucuga

SEQ ID NO: 107466 - RNA, 1701 nt, Artificial Sequence; identical to SEQ ID NO: 105904
  derived and/or modified CDS sequence (opt2) from hemagglutinin__InfluenzaA__AHL96033

SEQ ID NO: 107467 - RNA, 1701 nt, Artificial Sequence; identical to SEQ ID NO: 106159
  derived and/or modified CDS sequence (opt2) from hemagglutinin__InfluenzaA__AHL96045

SEQ ID NO: 107468 - RNA, 1701 nt, Artificial Sequence; identical to SEQ ID NO: 106030
  derived and/or modified CDS sequence (opt2) from hemagglutinin__InfluenzaA__AHL96056

SEQ ID NO: 107469 - RNA, 1701 nt, Artificial Sequence; identical to SEQ ID NO: 105894
  derived and/or modified CDS sequence (opt2) from hemagglutinin__InfluenzaA__AHL96068

SEQ ID NO: 107470 - RNA, 1701 nt, Artificial Sequence; identical to SEQ ID NO: 105904
  derived and/or modified CDS sequence (opt2) from hemagglutinin__InfluenzaA__AHL96080

SEQ ID NO: 107471 - RNA, 1701 nt, Artificial Sequence
  derived and/or modified CDS sequence (opt2) from hemagglutinin__InfluenzaA__AHL96092
augaagaccaucaucgcccucuccuacauccucugccucgucuucgcccagaagcuccccggcaacgacaacuccaccgccacccucugccucggccaccacgccguccccaacggcaccaucgucaagaccaucaccaacgaccgcaucgaggucaccaacgccaccgagcucguccagaacuccuccaucggcgagaucugcgacuccccccaccagauccucgacggcgagaacugcacccucaucgacgcccuccucggcgacccccagugcgacggcuuccagaacaagaagugggaccucuucaucgagcgcuccaaggccuacuccaacugcuaccccuacgacguccccgacuacgccucccuccgcucccucgucgccuccuccggcacccucgaguucaacaacgaguccuucaacugggccggcgucacccagaacggcaccuccuccgccugcauccgcggcuccaacuccuccuucuucucccgccucaacuggcucacccaccucaacuucaaguaccccgcccucaacgucaccaugcccaacaacgagcaguucgacaagcucuacaucuggggcguccaccaccccggcaccgacaaggaccagaucuuccucuacgcccaguccuccggccgcaucaccgucuccaccaagcgcucccagcaggccgucauccccaacaucggcucccgcccccgcauccgcaacauccccucccgcaucuccaucuacuggaccaucgucaagcccggcgacauccuccucaucaacuccaccggcaaccucaucgccccccgcggcuacuucaagauccgcuccggcaaguccuccaucaugcgcuccgacgcccccaucggcaagugcaaguccgagugcaucacccccaacggcuccauccccaacgacaagcccuuccagaacgucaaccgcaucaccuacggcgccugcccccgcuacgucaagcaguccacccucaagcucgccaccggcaugcgcaacguccccgagaagcagacccgcggcaucuucggcgccaucgccggcuucaucgagaacggcugggagggcauggucgacggcugguacggcuuccgccaccagaacuccgagggccgcggccaggccgccgaccucaaguccacccaggccgccaucgaccagaucaacggcaagcucaaccgccucaucggcaagaccaacgagaaguuccaccagaucgagaaggaguucuccgaggucgagggccgcauccaggaccucgagaaguacgucgaggacaccaagaucgaccucugguccuacaacgccgagcuccucgucgcccucgagaaccagcacaccaucgaccucaccgacuccgagaugaacaagcucuucgagaagaccaagaagcagcuccgcgagaacgccgaggacaugggcaacggcugcuucaagaucuaccacaagugcgacaacgccugcaucggcuccauccgcaacggcaccuacgaccacgacgucuaccgcgacgaggcccucaacaaccgcuuccagaucaagggcgucgagcucaaguccggcuacaaggacuggauccucuggaucuccuucgccaucuccugcuuccuccucugcgucgcccuccucggcuucaucaugugggccugccagaagggcaacauccgcugcaacaucugcaucuga

SEQ ID NO: 107472 - RNA, 1701 nt, Artificial Sequence
  derived and/or modified CDS sequence (opt2) from hemagglutinin__InfluenzaA__AHL96104
augaagaccaucaucgcccucuccuacauccucugccucgucuucgcccagaagcuccccggcaacgacaacuccaccgccacccucugccucggccaccacgccguccccaacggcaccaucgucaagaccaucaccaacgaccgcaucgaggucaccaacgccaccgagcucguccagaacuccuccaucggcgagaucugcgacuccccccaccagauccucgacggcgagaacugcacccucaucgacgcccuccucggcgacccccagugcgacggcuuccagaacaagaagugggaccucuucgucgagcgcuccaaggccuacuccaacugcuaccccuacgacguccccgacuacgccucccuccgcucccucgucgccuccuccggcacccucgaguucaacaacgaguccuucaacuggaccggcgucacccagaacggcaccuccuccgccugcauccgccgcuccaacuccuccuucuucucccgccucaacuggcucacccaccucaacuucaaguaccccgcccucaacgucaccaugcccaacaacgagcaguucgacaagcucuacaucuggggcguccaccaccccggcaccgacaaggaccagaucuuccucuacgcccaguccuccggccgcaucaccgucuccaccaagcgcucccagcaggccgucauccccaacaucggcucccgcccccgcauccgcaacauccccucccgcaucuccaucuacuggaccaucgucaagcccggcgacauccuccucaucaacuccaccggcaaccucaucgccccccgcggcuacuucaagauccgcuccggcaaguccuccaucaugcgcuccgacgcccccaucggcaagugcaaguccgagugcaucacccccaacggcuccauccccaacgacaagcccuuccagaacgucaaccgcaucaccuacggcgccugcccccgcuacgucaagcaguccacccucaagcucgccaccggcaugcgcaacguccccgagcgccagacccgcggcaucuucggcgccaucgccggcuucaucgagaacggcugggagggcauggucgacggcugguacggcuuccgccaccagaacuccgagggccgcggccaggccgccgaccucaaguccacccaggccgccaucgaccagaucaacggcaagcucaaccgccucaucggcaagaccaacgagaaguuccaccagaucgagaaggaguucuccgaggucgagggccgcauccaggaccucgagaaguacgucgaggacaccaagaucgaccucugguccuacaacgccgagcuccucgucgcccucgagaaccagcacaccaucgaccucaccgacuccgagaugaacaagcucuucgagaagaccaagaagcagcuccgcgagaacgccgaggacaugggcaacggcugcuucaagaucuaccacaagugcgacaacgccugcaucggcuccauccgcaacggcaccuacgaccacaacgucuaccgcgacgaggcccucaacaaccgcuuccagaucaagggcgucgagcucaaguccggcuacaaggacuggauccucuggaucuccuucgccaucuccugcuuccuccucugcgucgcccuccucggcuucaucaugugggccugccagaagggcaacauccgcugcaacaucugcaucuga

SEQ ID NO: 107473 - RNA, 1701 nt, Artificial Sequence; identical to SEQ ID NO: 106518
  derived and/or modified CDS sequence (opt2) from hemagglutinin__InfluenzaA__AHL96116

SEQ ID NO: 107474 - RNA, 1701 nt, Artificial Sequence; identical to SEQ ID NO: 105894
  derived and/or modified CDS sequence (opt2) from hemagglutinin__InfluenzaA__AHL96128

SEQ ID NO: 107475 - RNA, 1701 nt, Artificial Sequence; identical to SEQ ID NO: 106030
  derived and/or modified CDS sequence (opt2) from hemagglutinin__InfluenzaA__AHL96152

SEQ ID NO: 107476 - RNA, 1701 nt, Artificial Sequence
  derived and/or modified CDS sequence (opt2) from hemagglutinin__InfluenzaA__AHL96164
augaagaccaucaucgcccucuccuacauccucugccucgucuucgcccagaagcuccccggcaacgacaacuccaccgccacccucugccucggccaccacgccguccccaacggcaccaucgucaagaccaucaccaacgaccgcaucgaggucaccaacgccaccgagcucguccagaacuccuccaucggcgagaucugcgacuccccccaccagauccucgacggcgagaacugcacccucaucgacgcccuccucggcgacccccagugcgacggcuuccagaacaagaagugggaccucuucgucgagcgcuccaaggccuacuccaacugcuaccccuacgacguccccgacuacgccucccuccgcucccucgucgccuccuccggcacccucgaguucaacaacgaguccuucaacugggccggcgucacccagaacggcaccuccuccgccugcauccgcggcuccaacuccuccuucuucucccgccucaacuggcucacccaccucaacuucaaguaccccgcccucaacgucaccaugcccaacaacgagcaguucgacaagcucuacaucuggggcguccaccaccccggcaccgacaaggaccagaucuuccucuacgcccaguccuccggccgcaucaccgucuccaccaagcgcucccagcaggccgucauccccaacaucggcucccgcccccgcauccgcaacauccccucccgcaucuccaucuacuggaccaucgucaagcccggcgacauccuccucaucaacuccaccggcaaccucaucgccccccgcggcuacuucaagauccgcuccggcaaguccuccaucaugcgcuccgacgcccccaucggcaagugcaaguccgagugcaucacccccaacggcuccauccccaacgacaagcccuuccagaacgucaaccgcaucaccuacggcgccugcccccgcuacgucaagcaguccacccucaagcucgccaccggcaugcgcaacguccccgagaagcagacccgcggcaucuucggcgccaucgccggcuucaucgagaacggcugggagggcauggucgacggcugguacggcuuccgccaccagaacuccgagggccgcggccaggccgccgaccucaaguccacccaggccgccaucgaccagaucaacggcaagcucaaccgccucaucggcaagaccaacgagaaguuccaccagaucgagaaggaguucuccgaggucgagggccgcauccaggaccucgagaaguacgucgaggacaccaagaucgaccucugguccuacaacgccgagcuccucgucgcccucgagaaccagcacaccaucgaccucaccgacuccgagaugaacaagcucuucgagaagaccaagaagcagcuccgcgagaacgccgaggacaugggcaacggcugcuucaagaucuaccacaagugcgacaacgccugcaucggcuccauccgcaacggcaccuacgaccacgacgucuaccgcgacgaggcccucaacaaccgcuuccagaucaagggcgucgagcucaaguccggcuacaagaacuggauccucuggaucuccuucgccaucuccugcuuccuccucugcgucgcccuccucggcuucaucaugugggccugccagaagggcaacauccgcugcaacaucugcaucuga

SEQ ID NO: 107477 - RNA, 1701 nt, Artificial Sequence; identical to SEQ ID NO: 106030
  derived and/or modified CDS sequence (opt2) from hemagglutinin__InfluenzaA__AHL96176

SEQ ID NO: 107478 - RNA, 1701 nt, Artificial Sequence; identical to SEQ ID NO: 106030
  derived and/or modified CDS sequence (opt2) from hemagglutinin__InfluenzaA__AHL96188

SEQ ID NO: 107479 - RNA, 1701 nt, Artificial Sequence
  derived and/or modified CDS sequence (opt2) from hemagglutinin__InfluenzaA__AHL96200
augaagaccaucaucgcccucuccuacauccucugccucgucuucgcccagaagcuccccggcaacgacaacuccaccgccacccucugccucggccaccacgccguccccaacggcaccaucgucaagaccaucaccaacgaccgcaucgaggucaccaacgccaccgagcucguccagaacuccuccaucggcgagaucugcgacuccccccaccagguccucgacggcgagaacugcacccucaucgacgcccuccucggcgacccccagugcgacggcuuccagaacaagaagugggaccucuucgucgagcgcuccaaggccuacuccaacugcuaccccuacgacguccccgacuacgccucccuccgcucccucgucgccuccuccggcacccucgaguucaacaacgaguccuucaacugggccggcgucacccagaacggcaccuccuccgccugcauccgcggcuccaacuccuccuucuucucccgccucaacuggcucacccaccucaacuucaaguaccccgcccucaacgucaccaugcccaacaacgagcaguucgacaagcucuacaucuggggcguccaccaccccggcaccgacaaggaccagaucuuccucuacgcccaguccuccggccgcaucaccgucuccaccaagcgcucccagcaggccgucauccccaacaucggcucccgcccccgcauccgcaacauccccucccgcaucuccaucuacuggaccaucgucaagcccggcgacauccuccucaucaacuccaccggcaaccucaucgccccccgcggcuacuucaagauccgcuccggcaaguccuccaucaugcgcuccgacgcccccaucggcaagugcaaguccgagugcaucacccccaacggcuccauccccaacgacaagcccuuccagaacgucaaccgcaucaccuacggcgccugcccccgcuacgucaagcaguccacccucaagcucgccaccggcaugcgcaacguccccgagaagcagacccgcggcaucuucggcgccaucgccggcuucaucgagaacggcugggagggcauggucgacggcugguacggcuuccgccaccagaacuccgagggccgcggccaggccgccgaccucaaguccacccaggccgccaucgaccagaucaacggcaagcucaaccgccucaucggcaagaccaacgagaaguuccaccagaucgagaaggaguucuccgaggucgagggccgcauccaggaccucgagaaguacgucgaggacaccaagaucgaccucugguccuacaacgccgagcuccucgucgcccucgagaaccagcacaccaucgaccucaccgacuccgagaugaacaagcucuucgagaagaccaagaagcagcuccgcgagaacgccgaggacaugggcaacggcugcuucaagaucuaccacaagugcgacaacgccugcaucggcuccauccgcaacggcaccuacgaccacgacgucuaccgcgacgaggcccucaacaaccgcuuccagaucaagggcgucgagcucaaguccggcuacaaggacuggauccucuggaucuccuucgccaucuccugcuuccuccucugcgucgcccuccucggcuucaucaugugggccugccagaagggcaacauccgcugcaacaucugcaucuga

SEQ ID NO: 107480 - RNA, 1701 nt, Artificial Sequence; identical to SEQ ID NO: 105894
  derived and/or modified CDS sequence (opt2) from hemagglutinin__InfluenzaA__AHL96212

SEQ ID NO: 107481 - RNA, 1701 nt, Artificial Sequence; identical to SEQ ID NO: 106503
  derived and/or modified CDS sequence (opt2) from hemagglutinin__InfluenzaA__AHL96224

SEQ ID NO: 107482 - RNA, 1701 nt, Artificial Sequence
  derived and/or modified CDS sequence (opt2) from hemagglutinin__InfluenzaA__AHL96236
augaagaccaucaucgcccucuccuacauccucugccucgucuucgcccagaagcuccccggcaacgacaacuccaccgccacccucugccucggccaccacgccguccccaacggcaccaucgucaagaccaucaccaacgaccgcaucgaggucaccaacgccaccgagcucguccagaacuccuccaugggcgagaucugcgacuccccccaccagauccucgacggcgagaacugcacccucaucgacgcccuccucggcgacccccagugcgacggcuuccagaacaagaagugggaccucuucgucgagcgcuccaaggccuacuccaacugcuaccccuacgacguccccgacuacgccucccuccgcucccucgucgccuccuccggcacccucgaguucaacaacgaguccuucaacuggaccggcgucacccagaacggcaccuccuccgccugcauccgccgcuccaacuccuccuucuucucccgccucaacuggcucacccaccucaacuucaaguaccccgcccucaacgucaccaugcccaacaacgagcaguucgacaagcucuacaucuggggcguccaccaccccggcaccgacaaggaccagaucuuccucuacgcccaguccuccggccgcaucaccgucuccaccaagcgcucccagcaggccgucauccccaacaucggcucccgcccccgcauccgcaacauccccucccgcaucuccaucuacuggaccaucgucaagcccggcgacauccuccucaucaacuccaccggcaaccucaucgccccccgcggcuacuucaagauccgcuccggcaaguccuccaucaugcgcuccgacgcccccaucggcaagugcaaguccgagugcaucacccccaacggcuccauccccaacgacaagcccuuccagaacgucaaccgcaucaccuacggcgccugcccccgcuacgucaagcaguccacccucaagcucgccaccggcaugcgcaacguccccgagaagcagacccgcggcaucuucggcgccaucgccggcuucaucgagaacggcugggagggcauggucgacggcugguacggcuuccgccaccagaacuccgagggccgcggccaggccgccgaccucaaguccacccaggccgccaucgaccagaucaacggcaagcucaaccgccucaucggcaagaccaacgagaaguuccaccagaucgagaaggaguucuccgaggucgagggccgcauccaggaccucgagaaguacgucgaggacaccaagaucgaccucugguccuacaacgccgagcuccucgucgcccucgagaaccagcacaccaucgaccucaccgacuccgagaugaacaagcucuucgagaagaccaagaagcagcuccgcgagaacgccgaggacaugggcaacggcugcuucaagaucuaccacaagugcgacaacgccugcaucgaguccauccgcaacggcaccuacgaccacgacgucuaccgcgacgaggcccucaacaaccgcuuccagaucaagggcgucgagcucaaguccggcuacaagaacuggauccucuggaucuccuucgccaucuccugcuuccuccucugcgucgcccuccucggcuucaucaugugggccugccagaagggcaacauccgcugcaacaucugcaucuga

SEQ ID NO: 107483 - RNA, 1701 nt, Artificial Sequence
  derived and/or modified CDS sequence (opt2) from hemagglutinin__InfluenzaA__AHL96248
augaagaccaucaucgcccucggcuacauccucugccucgucuucgcccagaagcuccccggcaacgacaacuccaccgccacccucugccucggccaccacgccguccccaacggcaccaucgucaagaccaucaccaacgaccgcaucgaggucaccaacgccaccgagcucguccagaacuccuccaucggcgagaucugcgacuccccccaccagauccucgacggcgagaacugcacccucaucgacgcccuccucggcgacccccagugcgacggcuuccagaacaagaagugggaccucuucaucgagcgcuccaaggccuacuccaacugcuaccccuacgacguccccgacuacgccucccuccgcucccucgucgccuccuccggcacccucgaguucaacaacgaguccuucaacuggaccggcgucacccagaacggcaccuccuccgccugcauccgccgcuccaacuccuccuucuucucccgccucaacuggcucacccaccucaacuucaaguaccccgcccucaacgucaccaugcccaacaacgagcaguucgacaagcucuacaucuggggcguccaccaccccggcaccgacaaggaccagaucuuccucuacgcccaguccuccggccgcaucaccgucuccaccaagcgcucccagcaggccgucauccccaacaucggcucccgcccccgcauccgcaacauccccucccgcaucuccaucuacuggaccaucgucaagcccggcgacauccuccucaucaacuccaccggcaaccucaucgccccccgcggcuacuucaagauccgcuccggcaaguccuccaucaugcgcuccgacgcccccaucggcaagugcaaguccgagugcaucacccccaacggcuccauccccaacgacaagcccuuccagaacgucaaccgcaucaccuacggcgccugcccccgcuacgucaagcaguccacccucaagcucgccaccggcaugcgcaacguccccgagaagcagacccgcggcaucuucggcgccaucgccggcuucaucgagaacggcugggagggcauggucgacggcugguacggcuuccgccaccagaacuccgagggccgcggccaggccgccgaccucaaguccacccaggccgccaucgaccagaucaacggcaagcucaaccgccucaucggcaagaccaacgagaaguuccaccagaucgagaaggaguucuccgaggucgagggccgcauccaggaccucgagaaguacgucgaggacaccaagaucgaccucugguccuacaacgccgagcuccucgucgcccucgagaaccagcacaccaucgaccucaccgacuccgagaugaacaagcucuucgagaagaccaagaagcagcuccgcgagaacgccgaggacaugggcaacggcugcuucaagaucuaccacaagugcgacaacgccugcaucggcuccauccgcaacggcaccuacgaccacgacgucuaccgcgacgaggcccucaacaaccgcuuccagaucaagggcgucgagcucaaguccggcuacaaggacuggauccucuggaucuccuucgccaucuccugcuuccuccucugcgucgcccuccucggcuucaucaugugggccugccagaagggcaacauccgcugcaacaucugcaucuga

SEQ ID NO: 107484 - RNA, 1701 nt, Artificial Sequence; identical to SEQ ID NO: 106030
  derived and/or modified CDS sequence (opt2) from hemagglutinin__InfluenzaA__AHL96260

SEQ ID NO: 107485 - RNA, 1701 nt, Artificial Sequence; identical to SEQ ID NO: 105894
  derived and/or modified CDS sequence (opt2) from hemagglutinin__InfluenzaA__AHL96274

SEQ ID NO: 107486 - RNA, 1701 nt, Artificial Sequence; identical to SEQ ID NO: 106030
  derived and/or modified CDS sequence (opt2) from hemagglutinin__InfluenzaA__AHL96304

SEQ ID NO: 107487 - RNA, 1701 nt, Artificial Sequence; identical to SEQ ID NO: 105871
  derived and/or modified CDS sequence (opt2) from hemagglutinin__InfluenzaA__AHL96318

SEQ ID NO: 107488 - RNA, 1701 nt, Artificial Sequence; identical to SEQ ID NO: 106030
  derived and/or modified CDS sequence (opt2) from hemagglutinin__InfluenzaA__AHL96330

SEQ ID NO: 107489 - RNA, 1701 nt, Artificial Sequence; identical to SEQ ID NO: 106033
  derived and/or modified CDS sequence (opt2) from hemagglutinin__InfluenzaA__AHL96342

SEQ ID NO: 107490 - RNA, 1701 nt, Artificial Sequence
  derived and/or modified CDS sequence (opt2) from hemagglutinin__InfluenzaA__AHL96354
augaagaccaucaucgcccucuccuacauccucugccucgucuucgcccagaagcuccccggcaacgacaacuccaccgccacccucugccucggccaccacgccguccccaacggcaccaucgucaagaccaucaccaacgaccgcaucgaggucaccaacgccaccgagcucguccagaacuccuccaucggcgagaucugcgacuccccccaccagauccucgacggcgagaacugcacccucaucgacgcccuccucggcgacccccagugcgacggcuuccagaacaagaagugggaccucuucgucgagcgcuccaaggccuacuccaacugcuaccccuacgacguccccgacuacgccucccuccgcucccucgucgccuccuccggcacccucgaguucaacaacgaguccuucaacugggccggcgucacccagaacggcaccuccuccgccugcauccgcggcuccaacuccuccuucuucucccgccucaacuggcucacccaccucaacuucaaguaccccgcccucaacgucaccaugcccaacaacgagcaguucgacaagcucuacaucuggggcguccaccaccccggcaccgacaaggaccagaucuuccucuacgcccaguccuccggccgcaucaccgucuccaccaagcgcucccagcaggccgucauccccaacaucggcucccgcccccgcauccgcaacauccccucccgcaucuccaucuacuggaccaucgucaagcccggcgacauccuccucaucaacuccaccggcaaccucaucgccccccgcggcuacuucaagauccgcuccggcaaguccuccaucaugcgcuccgacgcccccaucggcaagugcaaguccgagugcaucacccccaacggcuccauccccaacgacaagcccuuccagaacgucaaccgcaucaccuacggcgccugcccccgcuacgucaagcaguccacccucaagcucgccaccggcaugcgcaacguccccgagaagcagacccgcggcaucuucggcgccaucgccggcuucaucgagaacggcugggagggcauggucgacggcugguacggcuuccgccaccucaacuccgagggccgcggccaggccgccgaccucaaguccacccaggccgccaucgaccagaucaacggcaagcucaaccgccucaucggcaagaccaacgagaaguuccaccagaucgagaaggaguucuccgaggucgagggccgcauccaggaccucgagaaguacgucgaggacaccaagaucgaccucugguccuacaacgccgagcuccucgucgcccucgagaaccagcacaccaucgaccucaccgacuccgagaugaacaagcucuucgagaagaccaagaagcagcuccgcgagaacgccgaggacaugggcaacggcugcuucaagaucuaccacaagugcgacaacgccugcaucggcuccauccgcaacggcaccuacgaccacgacgucuaccgcgacgaggcccucaacaaccgcuuccagaucaagggcgucgagcucaaguccggcuacaaggacuggauccucuggaucuccuucgccaucuccugcuuccuccucugcgucgcccuccucggcuucaucaugugggccugccagaagggcaacauccgcugcaacaucugcaucuga

SEQ ID NO: 107491 - RNA, 1701 nt, Artificial Sequence
  derived and/or modified CDS sequence (opt2) from hemagglutinin__InfluenzaA__AHL96366
augaagaccaucaucgcccucuccuacauccucugccucgucuucgcccagaagcuccccgagaacgacaacuccaccgccacccucugccucggccaccacgccguccccaacggcaccaucgucaagaccaucaccaacgaccgcaucgaggucaccaacgccaccgagcucguccagaacuccuccaucggcgagaucugcgacuccccccaccagauccucgacggcgagaacugcacccucaucgacgcccuccucggcgacccccagugcgacggcuuccagaacaagaagugggaccucuucgucgagcgcuccaaggccuacuccaacugcuaccccuacgacguccccgacuacgccucccuccgcucccucgucgccuccuccggcacccucgaguucaacaacgaguccuucaacugggccggcgucacccagaacggcaccuccuccgccugcauccgcggcuccaacuccuccuucuucucccgccucaacuggcucacccaccucaacuucaaguaccccgcccucaacgucaccaugcccaacaacgagcaguucgacaagcucuacaucuggggcguccaccaccccggcaccgacaaggaccagaucuuccucuacgcccaguccuccggccgcaucaccgucuccaccaagcgcucccagcaggccgucauccccaacaucggcucccgcccccgcauccgcaacauccccucccgcaucuccaucuacuggaccaucgucaagcccggcgacauccuccucaucaacuccaccggcaaccucaucgccccccgcggcuacuucaagauccgcuccggcaaguccuccaucaugcgcuccgacgcccccaucggcaagugcaaguccgagugcaucacccccaacggcuccauccccaacgacaagcccuuccagaacgucaaccgcaucaccuacggcgccugcccccgcuacgucaagcaguccacccucaagcucgccaccggcaugcgcaacguccccgagaagcagacccgcggcaucuucggcgccaucgccggcuucaucgagaacggcugggagggcauggucgacggcugguacggcuuccgccaccagaacuccgagggccgcggccaggccgccgaccucaaguccacccaggccgccaucgaccagaucaacggcaagcucaaccgccucaucggcaagaccaacgagaaguuccaccagaucgagaaggaguucuccgaggucgagggccgcauccaggaccucgagaaguacgucgaggacaccaagaucgaccucugguccuacaacgccgagcuccucgucgcccucgagaaccagcacaccaucgaccucaccgacuccgagaugaacaagcucuucgagaagaccaagaagcagcuccgcgagaacgccgaggacaugggcaacggcugcuucaagaucuaccacaagugcgacaacgccugcaucggcuccauccgcaacggcaccuacgaccacgacgucuaccgcgacgaggcccucaacaaccgcuuccagaucaagggcgucgagcucaaguccggcuacaaggacuggauccucuggaucuccuucgccaucuccugcuuccuccucugcgucgcccuccucggcuucaucaugugggccugccagaagggcaacauccgcugcaacaucugcaucuga

SEQ ID NO: 107492 - RNA, 1701 nt, Artificial Sequence; identical to SEQ ID NO: 105904
  derived and/or modified CDS sequence (opt2) from hemagglutinin__InfluenzaA__AHL96378

SEQ ID NO: 107493 - RNA, 1701 nt, Artificial Sequence; identical to SEQ ID NO: 105894
  derived and/or modified CDS sequence (opt2) from hemagglutinin__InfluenzaA__AHL96390

SEQ ID NO: 107494 - RNA, 1701 nt, Artificial Sequence
  derived and/or modified CDS sequence (opt2) from hemagglutinin__InfluenzaA__AHL96402
augaagaccaucaucgcccucuccuacauccucugccucgucuucgcccagaagauccccggcaacgacaacuccaccgccacccucugccucggccaccacgccguccccaacggcaccaucgucaagaccaucaccaacgaccgcaucgaggucaccaacgccaccgagcucguccagaacuccuccaucggcgagaucugcgacuccccccaccagauccucgacggcgagaacugcacccucaucgacgcccuccucggcgacccccagugcgacggcuuccagaacaagaagugggaccucuucgucgagcgcuccaaggccuacuccaacugcuaccccuacgacguccccgacuacgccucccuccgcucccucgucgccuccuccggcacccucgaguucaacaacgaguccuucaacuggaccggcgucacccagaacggcaccuccuccgccugcauccgcggcuccaacuccuccuucuucucccgccucaacuggcucacccaccucaacuucaaguaccccgcccucaacgucaccaugcccaacaacgagcaguucgacaagcucuacaucuggggcguccaccaccccggcaccgacaaggaccagaucuuccucuacgcccaguccuccggccgcaucaccgucuccaccaagcgcucccagcaggccgucauccccaacaucggcucccgcccccgcauccgcaacauccccucccgcaucuccaucuacuggaccaucgucaagcccggcgacauccuccucaucaacuccaccggcaaccucaucgccccccgcggcuacuucaagauccgcuccggcaaguccuccaucaugcgcuccgacgcccccaucggcaagugcaaguccgagugcaucacccccaacggcuccauccccaacgacaagcccuuccagaacgucaaccgcaucaccuacggcgccugcccccgcuacgucaagcaguccacccucaagcucgccaccggcaugcgcaacguccccgagaagcagacccgcggcaucuucggcgccaucgccggcuucaucgagaacggcugggagggcauggucgacggcugguacggcuuccgccaccagaacuccgagggccgcggccaggccgccgaccucaaguccacccaggccgccaucgaccagaucaacggcaagcucaaccgccucaucggcaagaccaacaagaaguuccaccagaucgagaaggaguucuccgaggucgagggccgcauccaggaccucgagaaguacgucgaggacaccaagaucgaccucugguccuacaacgccgagcuccucgucgcccucgagaaccagcacaccaucgaccucaccgacuccgagaugaacaagcucuucgagaagaccaagaagcagcuccgcgagaacgccgaggacaugggcaacggcugcuucaagaucuaccacaagugcgacaacgccugcaucggcuccauccgcaacggcaccuacgaccacgacgucuaccgcgacgaggcccucaacaaccgcuuccagaucaagggcgucgagcucaaguccggcuacaaggacuggauccucuggaucuccuucgccaucuccugcuuccuccucugcgucgcccuccucggcuucaucaugugggccugccagaagggcaacauccgcugcaacaucugcaucuga

SEQ ID NO: 107495 - RNA, 1701 nt, Artificial Sequence; identical to SEQ ID NO: 105904
  derived and/or modified CDS sequence (opt2) from hemagglutinin__InfluenzaA__AHL96414

SEQ ID NO: 107496 - RNA, 1701 nt, Artificial Sequence; identical to SEQ ID NO: 106030
  derived and/or modified CDS sequence (opt2) from hemagglutinin__InfluenzaA__AHL96426

SEQ ID NO: 107497 - RNA, 1701 nt, Artificial Sequence
  derived and/or modified CDS sequence (opt2) from hemagglutinin__InfluenzaA__AHL96438
augaagaccaucaucgcccucuccuacauccucugccucgucuucgcccaggagcuccccggcaacgacgacuccaccgccacccucugccucggccaccacgccguccccaacggcaccaucgucaagaccaucaccaacgaccagaucgaggucaccaacgccaccgagcucguccaguccuccuccaccggcgagaucugcaacuccccccaccagauccucgacggcgagaacugcacccucaucgacgcccuccucggcgacccccagugcgacggcuuccagaacaagaagugggaccucuucgucgagcgcuccaaggcccacuccaacugcuaccccuacgacguccccgacuacgccucccuccgcucccucgucgccuccuccggcacccucgaguucaacaacgaguccuucaacuggaccggcgucacccagaacggcaccuccuccgccugcauccgccgcuccaacaacuccuucuucucccgccucaacuggcucacccaccucaacuucaaguaccccgcccucaacgucaccaugcccaacaacgagcaguucgacaagcucuacaucuggggcguccaccaccccggcaccgacaaggaccagaucuuccucuacgcccaggccuccggccgcaucaccgucuccaccaagcgcucccagcaggccgucauccccaacaucggcucccgcccccgcguccgcaacauccccucccgcgucuccaucuacuggaccaucgucaagcccggcgacauccuccucaucaacuccaccggcaaccucaucgccccccgcggcuacuucaagauccgcuccggcaaguccuccaucaugcgcuccgacgcccccaucggcaagugcuccuccgccugcaucacccccaacggcuccauccccaacgacaagcccuuccagaacgucaaccgcaucaccuacggcgccugcccccgcuacgucaagcagaacacccucaagcucgccaccggcaugcgcaacguccccgagaagcagacccgcggcaucuucggcgccaucgccggcuucaucgagaacggcugggagggcauggucgacggcugguacggcuuccgccaccagaacuccgagggccgcggccaggccgccgaccucaaguccacccaggccgccaucgaccagaucaacggcaagcucaaccgccucaucggcaagaccaacgagaaguuccaccagaucgagaaggaguucuccgaggucgagggccgcauccaggaccucgagaaguacgucgaggacaccaagaucgaccucugguccuacaacgccgagcuccucgucgcccucgagaaccagcacaccaucgaccucaccgacuccgagaugaacaagcucuucgagaagaccaagaagcagcuccgcgagaacgccgaggacaugggcaacggcugcuucaagaucuaccacaagugcgacaacgccugcaucggcuccauccgcaacggcaccuacgaccacgacgucuaccgcgacgaggcccucaacaaccgcuuccagaucaagggcgucgagcucaaguccggcuacaaggacuggauccucuggaucuccuucgccaucuccugcuuccuccucugcgucgcccuccucggcuucaucaugugggccugccagaagggcaacauccgcugcaacaucugcaucuga

SEQ ID NO: 107498 - RNA, 1701 nt, Artificial Sequence; identical to SEQ ID NO: 105904
  derived and/or modified CDS sequence (opt2) from hemagglutinin__InfluenzaA__AHL96450

SEQ ID NO: 107499 - RNA, 1701 nt, Artificial Sequence; identical to SEQ ID NO: 106030
  derived and/or modified CDS sequence (opt2) from hemagglutinin__InfluenzaA__AHL96462

SEQ ID NO: 107500 - RNA, 1701 nt, Artificial Sequence
  derived and/or modified CDS sequence (opt2) from hemagglutinin__InfluenzaA__AHL96474
augaaggccauccucgucgucaugcucuacaccuucgccaccgccaacgccgacacccucugcaucggcuaccacgccaacaacuccaccgacaccgucgacaccguccucgagaagaacgucaccgucacccacuccgucaaccuccucgaggacaagcacaacggcaagcucugcaagcuccgcggcgucuccccccuccaccucggcaagugcaacaucgccggcuggauccucggcaaccccgagugcgagucccucuccaccgccuccuccugguccuacaucgucgagaccuccggcuccgacaacggcaccugcuaccccggcgacuucaucgacuacgaggagcuccgcgagcagcucuccuccgucuccuccuucgagcgcuucgagaucuuccccaagaccuccuccuggcccaaccacgacuccaacaagggcgucaccgccgccugcccccacgccggcgccaagggcuucuacaagaaccucaucuggcucgucaagaagggcaacuccuaccccaagcucuccaucuccuacaucaacgacaagggcaaggagguccucguccucuggggcauccaccaccccuccaccaccgccgaccagcagucccucuaccagaacgccgacaccuacgucuucgucggcaccucccgcuacuccaagaaguucaagcccgagaucgccauccgccccaagguccgcgaccaggagggccgcaugaacuacuacuggacccucgucgagcccggcgacaagaucaccuucgaggccaccggcaaccucgucgucccccgcuacgccuucgccauggagcgcaacgccggcuccggcaucaucaucuccgacacccccguccacgacugcaacaccaccugccagacccccaagggcgccaucaacaccucccuccccuuccagaacauccaccccaucaccaucggcaagugccccaaguacgucaaguccaccaagcuccgccucgccaccggccuccgcaacguccccuccauccagucccgcggccucuucggcgccaucgccggcuucaucgagggcggcuggaccggcauggucgacggcugguacggcuaccaccaccagaacgagcagggcuccggcuacgccgccgaccucaaguccacccagaacgccaucgacaagaucaccaacaaggucaacuccgucaucgagaagaugaacacccaguucaccgccgucggcaaggaguucaaccaccucgagaagcgcaucgagaaccucaacaagaaggucgacgacggcuuccucgacaucuggaccuacaacgccgagcuccucguccuccucgagaacgagcgcacccucgacuaccacgacuccaacgucaagaaccucuacgagaagguccgcaaccagcucaagaacaacgccaaggagaucggcaacggcugcuucgaguucuaccacaagugcgacaacaccugcauggaguccgucaagaacggcaccuacgacuaccccaaguacuccgaggaggccaagcucaaccgcgaggagaucgacggcgucaagcucgaguccacccgcaucuaccagauccucgccaucuacuccaccgccgccuccucccucguccucgucgucucccucggcgccaucuccuucuggaugugcuccaacggcucccuccagugccgcaucugcaucuga

SEQ ID NO: 107501 - RNA, 1701 nt, Artificial Sequence
  derived and/or modified CDS sequence (opt2) from hemagglutinin__InfluenzaA__AHL96485
augaagaccaucaucgcccucuccuacauccucugccucgucuucgcccagaagcuccccggcaacgacaacuccaccgccacccucugccucggccaccacgccguccccaacggcaccaucgucaagaccaucaccaacgaccgcaucgaggucaccaacgccaccgagcucguccagaacuccuccaucggcgagaucugcgacuccccccaccagauccucgacggcgagaacugcacccucaucgacgcccuccucggcgacccccagugcgacggcuuccagaacaagaagugggaccucuucgucgagcgcuccaaggccuacuccaacugcuaccccuacgacguccccgacuacgccucccuccgcucccucgucgccuccuccggcacccucgaguucaacaacgaguccuucaacuggaccggcgucacccagaacggcaccuccuccgccugcauccgccgcuccaacuccuccuucuucucccgccucaacuggcucacccaccucaacuucaaguaccccgcccucaacgucaccaugcccaacaacgagcaguucgacaagcucuacaucuggggcguccaccaccccggcaccgacaaggaccagaucuuccucuacgcccaguccuccggccgcaucaccgucuccaccaagcgcucccagcaggccgucauccccaacaucggcucccgcccccgcauccgcaacauccccucccgcaucuccaucuacuggaccaucgucaagcccggcgacauccuccucaucaacuccaccggcaaccucaucgccccccgcggcuacuucaagauccgcuccggcaaguccuccaucaugaaguccgacgcccccaucggcaagugcaaguccgagugcaucacccccaacggcuccauccccaacgacaagcccuuccagaacgucaaccgcaucaccuacggcgccugcccccgcuacgucaagcaguccacccucaagcucgccaccggcaugcgcaacguccccgagaagcagacccgcggcaucuucggcgccaucgccggcuucaucgagaacggcugggagggcauggucgacggcugguacggcuuccgccaccagaacuccgagggccgcggccaggccgccgaccucaaguccacccaggccgccaucgaccagaucaacggcaagcucaaccgccucaucggcaagaccaacgagaaguuccaccagaucgagaaggaguucuccgaggucgagggccgcauccaggaccucgagaaguacgucgaggacaccaagaucgaccucugguccuacaacgccgagcuccucgucgcccucgagaaccagcacaccaucgaccucaccgacuccgagaugaacaagcucuucgagaagaccaagaagcagcuccgcgagaacgccgaggacaugggcaacggcugcuucaagaucuaccacaagugcgacaacgccugcaucggcuccauccgcaacggcaccuacgaccacaacgucuaccgcgacgaggcccucaacaaccgcuuccagaucaagggcgucgagcucaaguccggcuacaaggacuggauccucuggaucuccuucgccaucuccugcuuccuccucugcgucgcccuccucggcuucaucaugugggccugccagaagggcaacauccgcugcaacaucugcaucuga

SEQ ID NO: 107502 - RNA, 1701 nt, Artificial Sequence; identical to SEQ ID NO: 106030
  derived and/or modified CDS sequence (opt2) from hemagglutinin__InfluenzaA__AHL96497

SEQ ID NO: 107503 - RNA, 1701 nt, Artificial Sequence; identical to SEQ ID NO: 105904
  derived and/or modified CDS sequence (opt2) from hemagglutinin__InfluenzaA__AHL96509

SEQ ID NO: 107504 - RNA, 1701 nt, Artificial Sequence; identical to SEQ ID NO: 105871
  derived and/or modified CDS sequence (opt2) from hemagglutinin__InfluenzaA__AHL96521

SEQ ID NO: 107505 - RNA, 1701 nt, Artificial Sequence; identical to SEQ ID NO: 106030
  derived and/or modified CDS sequence (opt2) from hemagglutinin__InfluenzaA__AHL96533

SEQ ID NO: 107506 - RNA, 1701 nt, Artificial Sequence; identical to SEQ ID NO: 105894
  derived and/or modified CDS sequence (opt2) from hemagglutinin__InfluenzaA__AHL96545

SEQ ID NO: 107507 - RNA, 1701 nt, Artificial Sequence
  derived and/or modified CDS sequence (opt2) from hemagglutinin__InfluenzaA__AHL96569
augaagaccaucaucgcccucuccuacauccucugccucgucuucgcccagaagcuccccggcaacgacaacuccaccgccacccucugccucggccaccacgccguccccaacggcaccaucgucaagaccaucaccaacgaccgcaucgaggucaccaacgccaccgagcucguccagaacuccuccaucggcgagaucugcgacuccccccaccagauccucgacggcgagaacugcacccucaucgacgcccuccucggcgacccccagugcgacggcuuccagaacaagaagugggaccucuucgucgagcgcuccaaggccuacuccaacugcuaccccuacgacguccccgacuacgccucccuccgcucccucgucgccuccuccggcacccucgaguucaacaacgaguccuucaacuggaccggcgucacccagaacggcaccuccuccgccugcauccgccgcuccaacuccuccuucuucucccgccucaacuggcucacccaccucaacuucaaguaccccgcccucaacgucaccaugcccaacaacgagcaguucgacaagcucuacaucuggggcguccaccaccccggcaccgacaaggaccagaucuuccucuacgcccaguccuccggccgcgucaccgucuccaccaagcgcucccagcaggccgucauccccaacaucggcucccgcccccgcauccgcaacauccccucccgcaucuccaucuacuggaccaucgucaagcccggcgacauccuccucaucaacuccaccggcaaccucaucgccccccgcggcuacuucaagauccgcuccggcaaguccuccaucaugcgcuccgacgcccccaucggcaagugcaaguccgagugcaucacccccaacggcuccauccccaacgacaagcccuuccagaacgucaaccgcaucaccuacggcgccugcccccgcuacgucaagcaguccacccucaagcucgccaccggcaugcgcaacguccccgagaagcagacccgcggcaucuucggcgccaucgccggcuucaucgagaacggcugggagggcauggucgacggcugguacggcuuccgccaccagaacuccgagggccgcggccaggccgccgaccucaaguccacccaggccgccaucgaccagaucaacggcaagcucaaccgccucaucggcaagaccaacgagaaguuccaccagaucgagaaggaguucuccgaggucgagggccgcauccaggaccucgagaaguacgucgaggacaccaagaucgaccucugguccuacaacgccgagcuccucgucgcccucgagaaccagcacaccaucgaccucaccgacuccgagaugaacaagcucuucgagaagaccaagaagcagcuccgcgagaacgccgaggacaugggcaacggcugcuucaagaucuaccacaagugcgacaacgccugcaucggcuccauccgcaacggcaccuacgaccacgacgucuaccgcgacgaggcccucaacaaccgcuuccagaucaagggcgucgagcucaaguccggcuacaaggacuggauccucuggaucuccuucgccaucuccugcuuccuccucugcgucgcccuccucggcuucaucaugugggccugccagaagggcaacauccgcugcaacaucugcaucuga

SEQ ID NO: 107508 - RNA, 1701 nt, Artificial Sequence; identical to SEQ ID NO: 107500
  derived and/or modified CDS sequence (opt2) from hemagglutinin__InfluenzaA__AHL96581

SEQ ID NO: 107509 - RNA, 1701 nt, Artificial Sequence
  derived and/or modified CDS sequence (opt2) from hemagglutinin__InfluenzaA__AHL96592
augaagaccaucaucgcccucggcuacauccucugccucgucuucgcccagaagauccccggcaacgacaacuccaccgccacccucugccucggccaccacgccguccccaacggcaccaucgucaagaccaucaccaacgaccgcaucgaggucaccaacgccaccgagcucguccagaacuccuccaucggcgagaucugcgacuccccccaccagauccucgacggcgagaacugcacccucaucgacgcccuccucggcgacccccagugcgacggcuuccagaacaagaagugggaccucuucaucgagcgcuccaaggccuacuccaacugcuaccccuacgacguccccgacuacgccucccuccgcucccucgucgccuccuccggcacccucgaguucaacaacgaguccuucaacuggaccggcgucacccagaacggcaccuccuccgccugcauccgccgcuccaacuccuccuucuucucccgccucaacuggcucacccaccucaacuucaaguaccccgcccucaacgucaccaugcccaacaacgagcaguucgacaagcucuacaucuggggcguccaccaccccggcaccgacaaggaccagaucuuccucuacgcccaguccuccggccgcaucaccgucuccaccaagcgcucccagcaggccgucauccccaacaucggcucccgcccccgcauccgcaacauccccucccgcaucuccaucuacuggaccaucgucaagcccggcgacauccuccucaucaacuccaccggcaaccucaucgccccccgcggcuacuucaagauccgcuccggcaaguccuccaucaugcgcuccgacgcccccaucggcaagugcaaguccgagugcaucacccccaacggcuccauccccaacgacaagcccuuccagaacgucaaccgcaucaccuacggcgccugcccccgcuacgucaagcaguccacccucaagcucgccaccggcaugcgcaacguccccgagaagcagacccgcggcaucuucggcgccaucgccggcuucaucgagaacggcugggagggcauggucgacggcugguacggcuuccgccaccagaacuccgagggccgcggccaggccgccgaccucaaguccacccaggccgccaucgaccagaucaacggcaagcucaaccgccucaucggcaagaccaacgagaaguuccaccagaucgagaaggaguucuccgaggucgagggccgcauccaggaccucgagaaguacgucgaggacaccaagaucgaccucugguccuacaacgccgagcuccucgucgcccucgagaaccagcacaccaucgaccucaccgacuccgagaugaacaagcucuucgagaagaccaagaagcagcuccgcgagaacgccgaggacaugggcaacggcugcuucaagaucuaccacaagugcgacaacgccugcaucggcuccauccgcaacggcaccuacgaccacgacgucuaccgcgacgaggcccucaacaaccgcuuccagaucaagggcgucgagcucaaguccggcuacaaggacuggauccucuggaucuccuucgccaucuccugcuuccuccucugcgucgcccuccucggcuucaucaugugggccugccagaagggcaacauccgcugcaacaucugcaucuga

SEQ ID NO: 107510 - RNA, 1701 nt, Artificial Sequence; identical to SEQ ID NO: 106030
  derived and/or modified CDS sequence (opt2) from hemagglutinin__InfluenzaA__AHL96604

SEQ ID NO: 107511 - RNA, 1701 nt, Artificial Sequence; identical to SEQ ID NO: 106030
  derived and/or modified CDS sequence (opt2) from hemagglutinin__InfluenzaA__AHL96616

SEQ ID NO: 107512 - RNA, 1701 nt, Artificial Sequence
  derived and/or modified CDS sequence (opt2) from hemagglutinin__InfluenzaA__AHL96628
augaagaccaucaucgcccucuccuacauccucugccucgucuucgcccagaagcuccccggcaacgacaacuccaccgccacccucugccucggccaccacgccguccccaacggcaccaucgucaagaccaucaccaacgaccgcaucgaggucaccaacgccaccgagcucguccagaacuccuccaucggcgagaucugcgacuccccccaccagauccucgacggcgagaacugcacccucaucgacgcccuccucggcgacccccagugcgacggcuuccagaacaagaagugggaccucuucgucgagcgcuccaaggccuacuccaacugcuaccccuacgacguccccgacuacgccucccuccgcucccucgucgccuccuccggcacccucgaguucaacaacgaguccuucaacuggaccggcgucacccagaacggcaccuccuccgccugcauccgccgcuccaacuccuccuucuucucccgccucaacuggcucacccaccucaacuucaaguaccccgcccucaacgucaccaugcccaacaacgagcaguucgacaagcucuacaucuggggcguccaccaccccggcaccgacaaggaccagaucuuccucuacgcccaguccuccggccgcaucaccgucuccaccaagcgcucccagcaggccgucauccccaacaucggcucccgcccccgcauccgcaacauccccucccgcaucuccaucuacuggaccaucgucaagcccggcgacauccuccucaucaacuccaccggcaaccucaucgccccccgcggcuacuucaagauccgcuccggcaaguccuccaucaugcgcuccgacgcccccaucggcaagugcaaguccgagugcaucacccccaacggcuccauccccaacgacaagcccuuccagaacgucaaccgcaucaccuacggcgccugcccccgcuacgucaagcaguccacccucaagcucgccaccggcaugcgcaacguccccgagaagcagacccgcggcaucuucggcgccaucgccggcuucaucgagaacggcuggggcggcauggucgacggcugguacggcuuccgccaccagaacuccgagggccgcggccaggccgccgaccucaaguccacccaggccgccaucgaccagaucaacggcaagcucaaccgccucaucggcaagaccaacgagaaguuccaccagaucgagaaggaguucuccgaggucgagggccgcauccaggaccucgagaaguacgucgaggacaccaagaucgaccucugguccuacaacgccgagcuccucgucgcccucgagaaccagcacaccaucgaccucaccgacuccgagaugaacaagcucuucgagaagaccaagaagcagcuccgcgagaacgccgaggacaugggcaacggcugcuucaagaucuaccacaagugcgacaacgccugcaucggcuccauccgcaacggcaccuacgaccacaacgucuaccgcgacgaggcccucaacaaccgcuuccagaucaagggcgucgagcucaaguccggcuacaaggacuggauccucuggaucuccuucgccaucuccugcuuccuccucugcgucgcccuccucggcuucaucaugugggccugccagaagggcaacauccgcugcaacaucugcaucuga

SEQ ID NO: 107513 - RNA, 1701 nt, Artificial Sequence; identical to SEQ ID NO: 107501
  derived and/or modified CDS sequence (opt2) from hemagglutinin__InfluenzaA__AHL96640

SEQ ID NO: 107514 - RNA, 1701 nt, Artificial Sequence
  derived and/or modified CDS sequence (opt2) from hemagglutinin__InfluenzaA__AHL96652
augaagaccaucaucgcccucuccuacauccucugccucgucuucgcccagaagcuccccggcaacgacaacuccaccgccacccucugccucggccaccacgccguccccaacggcaccaucgucaagaccaucaccaacgaccgcaucgaggucaccaacgccaccgagcucguccaggacuccuccaucggcgagaucugcgacuccccccaccagauccucgacggcgagaacugcacccucaucgacgcccuccucggcgacccccagugcgacggcuuccagaacaagaagugggaccucuucgucgagcgcuccaaggccuacuccaacugcuaccccuacgacguccccgacuacgccucccuccgcucccucgucgccuccuccggcacccucgaguucaacaacgaguccuucaacugggccggcgucacccagaacggcaccuccuccgccugcauccgcggcuccaacuccuccuucuucucccgccucaacuggcucacccaccucaacuucaaguaccccgcccucaacgucaccaugcccaacaacgagcaguucgacaagcucuacaucuggggcguccaccaccccggcaccgacaaggaccagaucuuccucuacgcccaguccuccggccgcaucaccgucuccaccaagcgcucccagcaggccgucauccccaacaucggcucccgcccccgcauccgcaacauccccucccgcaucuccaucuacuggaccaucgucaagcccggcgacauccuccucaucaacuccaccggcaaccucaucgccccccgcggcuacuucaagauccgcuccggcaaguccuccaucaugcgcuccgacgcccccaucggcaagugcaaguccgagugcaucacccccaacggcuccauccccaacgacaagcccuuccagaacgucaaccgcaucaccuacggcgccugcccccgcuacgucaagcaguccacccucaagcucgccaccggcaugcgcaacguccccgagaagcagacccgcggcaucuucggcgccaucgccggcuucaucgagaacggcugggagggcauggucgacggcugguacggcuuccgccaccagaacuccgagggccgcggccaggccgccgaccucaaguccacccaggccgccaucgaccagaucaacggcaagcucaaccgccucaucggcaagaccaacgagaaguuccaccagaucgagaaggaguucuccgaggucgagggccgcauccaggaccucgagaaguacgucgaggacaccaagaucgaccucugguccuacaacgccgagcuccucgucgcccucgagaaccagcacaccaucgaccucaccgacuccgagaugaacaagcucuucgagaagaccaagaagcagcuccgcgagaacgccgaggacaugggcaacggcugcuucaagaucuaccacaagugcgacaacgccugcaucggcuccauccgcaacggcaccuacgaccacgacgucuaccgcgacgaggcccucaacaaccgcuuccagaucaagggcgucgagcucaaguccggcuacaaggacuggauccucuggaucuccuucgccaucuccugcuuccuccucugcgucgcccuccucggcuucaucaugugggccugccagaagggcaacauccgcugcaacaucugcaucuga

SEQ ID NO: 107515 - RNA, 1701 nt, Artificial Sequence; identical to SEQ ID NO: 106503
  derived and/or modified CDS sequence (opt2) from hemagglutinin__InfluenzaA__AHL96664

SEQ ID NO: 107516 - RNA, 1701 nt, Artificial Sequence
  derived and/or modified CDS sequence (opt2) from hemagglutinin__InfluenzaA__AHL96676
augaagaccaucaucgcccucuccuacauccucugccucgucuucgcccagaagcuccccggcaacgacaacuccaccgccacccucugccucggccaccacgccguccccaacggcaccaucgucaagaccaucaccaacgaccgcaucgaggucaccaacgccaccgagcucguccagaacuccuccaucggcgagaucugcgacuccccccaccagauccucgacggcgagaacugcacccucaucgacgcccuccucggcgacccccagugcgacggcuuccagaacaagaagugggaccucuucgucgagcgcuccaaggccuacuccaacugcuaccccuacgacguccccgacuacgccucccuccgcucccucgucgccuccuccggcacccucgaguucaacaacgaguccuucaacuggaccggcgucacccagaacggcaccuccuccgccugcauccgccgcuccaacuccuccuucuucucccgccucaacuggcucacccaccucaacuucaaguaccccgcccucaacgucaccaugcccaacaacgagcaguucgacaagcucuacaucuggggcguccaccaccccggcaccgacaaggaccagaucuuccucuacgcccaguccuccggccgcaucaccgucuccaccaagcgcucccagcaggccgucauccccaacaucggcucccgcccccgcauccgcaacauccccucccgcaucuccaucuacuggaccaucgucaagcccggcgacauccuccucaucaacuccaccggcaaccucaucgccccccgcggcuacuucaagauccgcuccggcaaguccuccaucaugcgcuccgacgcccccaucggcaagugcaaguccgagugcaucacccccaacggcuccauccccaucgacaagcccuuccagaacgucaaccgcaucaccuacggcgccugcccccgcuacgucaagcaguccacccucaagcucgccaccggcaugcgcaacguccccgagaagcagacccgcggcaucuucggcgccaucgccggcuucaucgagaacggcugggagggcauggucgacggcugguacggcuuccgccaccagaacuccgagggccgcggccaggccgccgaccucaaguccacccaggccgccaucgaccagaucaacggcaagcucaaccgccucaucggcaagaccaacgagaaguuccaccagaucgagaaggaguucuccgaggucgagggccgcauccaggaccucgagaaguacgucgaggacaccaagaucgaccucugguccuacaacgccgagcuccucgucgcccucgagaaccagcacaccaucgaccucaccgacuccgagaugaacaagcucuucgagaagaccaagaagcagcuccgcgagaacgccgaggacaugggcaacggcugcuucaagaucuaccacaagugcgacaacgccugcaucggcuccauccgcaacggcaccuacgaccacgacgucuaccgcgacgaggcccucaacaaccgcuuccagaucaagggcgucgagcucaaguccggcuacaaggacuggauccucuggaucuccuucgccaucuccugcuuccuccucugcgucgcccuccucggcuucaucaugugggccugccagaagggcaacauccgcugcaacaucugcaucuga

SEQ ID NO: 107517 - RNA, 1701 nt, Artificial Sequence; identical to SEQ ID NO: 106030
  derived and/or modified CDS sequence (opt2) from hemagglutinin__InfluenzaA__AHL96688

SEQ ID NO: 107518 - RNA, 1701 nt, Artificial Sequence; identical to SEQ ID NO: 106030
  derived and/or modified CDS sequence (opt2) from hemagglutinin__InfluenzaA__AHL96700

SEQ ID NO: 107519 - RNA, 1701 nt, Artificial Sequence; identical to SEQ ID NO: 106030
  derived and/or modified CDS sequence (opt2) from hemagglutinin__InfluenzaA__AHL96712

SEQ ID NO: 107520 - RNA, 1701 nt, Artificial Sequence; identical to SEQ ID NO: 105904
  derived and/or modified CDS sequence (opt2) from hemagglutinin__InfluenzaA__AHL96724

SEQ ID NO: 107521 - RNA, 1701 nt, Artificial Sequence; identical to SEQ ID NO: 105894
  derived and/or modified CDS sequence (opt2) from hemagglutinin__InfluenzaA__AHL96748

SEQ ID NO: 107522 - RNA, 1701 nt, Artificial Sequence; identical to SEQ ID NO: 105904
  derived and/or modified CDS sequence (opt2) from hemagglutinin__InfluenzaA__AHL96784

SEQ ID NO: 107523 - RNA, 1701 nt, Artificial Sequence
  derived and/or modified CDS sequence (opt2) from hemagglutinin__InfluenzaA__AHL96796
augaagaccaucaucgcccucuccuacauccucugccucgucuucgcccagaagcuccccggcaacgacaacuccaccgccacccucugccucggccaccacgccguccccaacggcaccaucgucaagaccaucaccaacgaccgcaucgaggucaccaacgccaccgagcucguccagaacuccuccaucggcgagaucugcgacuccccccaccagauccucgacggcgagaacugcacccucaucgacgcccuccucggcgacccccagugcgacggcuuccagaacaagaagugggaccucuucaucgagcgcuccaaggccuacuccaacugcuaccccuacgacguccccgacuacgccucccuccgcucccucgucgccuccuccggcacccucgaguucaacaacgaguccuucaacuggaccggcgucacccagaacggcaccuccuccgccugcauccgccgcuccaacuccuccuucuucucccgccucaacuggcucacccaccucaacuucaaguaccccgcccucaacgucaccaugcccaacaacgagcaguucgacaagcucuacaucuggggcguccaccaccccggcaccgacaaggaccagaucuuccucuacgcccaguccuccggccgcaucaccgucuccaccaagcgcucccagcaggccgucauccccaacaucggcucccgcccccgcauccgcaacauccccucccgcaucuccaucuacuggaccaucgucaagcccggcgacauccuccucaucaacuccaccggcaaccucaucgccccccgcggcuacuucaagauccgcuccggcaaguccuccaucaugcgcuccgacgcccccaucggcaagugcaaguccgagugcaucacccccaacggcuccauccccaacgacaagcccuuccagaacgucaaccgcaucaccuacggcgccugcccccgcuacgucaagcaguccacccucaagcucgccaccggcaugcgcaacguccccgagaagcagacccgcggcaucuucggcgccaucgccggcuucaucgagaacggcugggagggcauggucgacggcugguacggcuuccgccaccagaacuccgagggccgcggccaggccgccgaccucaaguccacccaggccgccaucgaccagaucaacggcaagcucaaccgccucaucggcaagaccaacgagaaguuccaccagaucgagaaggaguucuccgaggucgagggccgcauccaggaccucgagaaguacgucgaggacaccaagaucgaccucugguccuacaacgccgagcuccucgucgcccucgagaaccagcacaccaucgaccucaccgacuccgagaugaacaagcucuucgagaagaccaagaagcagcuccgcgagaacgccgaggacaugggcaacggcugcuucaagaucuaccacaagugcgacaacgccugcaucggcuccauccgcaacggcaccuacgaccacgacgucuaccgcgacgaggcccucaacaaccgcuuccagaucaagggcgucgagcucaaguccggcuacaaggacuggauccucuggaucuccuucgccaucuccugcuuccuccucugcgucgcccuccucggcuucaucaugugggccugccagaagggcaacauccgcugcaacaucugcaucuga

SEQ ID NO: 107524 - RNA, 1701 nt, Artificial Sequence; identical to SEQ ID NO: 105894
  derived and/or modified CDS sequence (opt2) from hemagglutinin__InfluenzaA__AHL96808

SEQ ID NO: 107525 - RNA, 1701 nt, Artificial Sequence; identical to SEQ ID NO: 105894
  derived and/or modified CDS sequence (opt2) from hemagglutinin__InfluenzaA__AHL96820

SEQ ID NO: 107526 - RNA, 1701 nt, Artificial Sequence; identical to SEQ ID NO: 105904
  derived and/or modified CDS sequence (opt2) from hemagglutinin__InfluenzaA__AHL96832

SEQ ID NO: 107527 - RNA, 1701 nt, Artificial Sequence; identical to SEQ ID NO: 105904
  derived and/or modified CDS sequence (opt2) from hemagglutinin__InfluenzaA__AHL96844

SEQ ID NO: 107528 - RNA, 1701 nt, Artificial Sequence; identical to SEQ ID NO: 105904
  derived and/or modified CDS sequence (opt2) from hemagglutinin__InfluenzaA__AHL96856

SEQ ID NO: 107529 - RNA, 1701 nt, Artificial Sequence
  derived and/or modified CDS sequence (opt2) from hemagglutinin__InfluenzaA__AHL96868
augaagaccaucaucgcccucuccuacauccucugccucgucuucgcccagaagcuccccggcaacgacaacuccaccgccacccucugccucggccaccacgccguccccaacggcaccaucgucaagaccaucaccaacgaccgcaucgaggucaccaacgccaccgagcucguccagaacuccuccaucggcgagaucugcgacuccccccaccagauccucgacggcggcaacugcacccucaucgacgcccuccucggcgacccccagugcgacggcuuccagaacaagaagugggaccucuucgucgagcgcuccaaggccuacuccaacugcuaccccuacgacguccccgacuacgccucccuccgcucccucgucgccuccuccggcacccucgaguucaacaacgaguccuucaacuggaccggcgucacccagaacggcaccuccuccgccugcauccgccgcuccaacuccuccuucuucucccgccucaacuggcucacccaccucaacuucaaguaccccgcccucaacgucaccaugcccaacaacgagcaguucgacaagcucuacaucuggggcguccaccaccccggcaccgacaaggaccagaucuuccucuacgcccaguccuccggccgcaucaccgucuccaccaagcgcucccagcaggccgucguccccaacaucggcucccgcccccgcauccgcaacauccccucccgcaucuccaucuacuggaccaucgucaagcccggcgacauccuccucaucaacuccaccggcaaccucaucgccccccgcggcuacuucaagauccgcuccggcaaguccuccaucaugcgcuccgacgcccccaucggcaagugcaaguccgagugcaucacccccaacggcuccauccccaacgacaagcccuuccagaacgucaaccgcaucaccuacggcgccugcccccgcuacgucaagcaguccacccucaagcucgccaccggcaugcgcaacguccccgagaagcagacccgcggcaucuucggcgccaucgccggcuucaucgagaacggcugggagggcaugauggacggcugguacggcuuccgccaccagaacuccgagggccgcggccaggccgccgaccucaaguccacccaggccgccaucgaccagaucaacggcaagcucaaccgccucaucggcaagaccaacgagaaguuccaccagaucgagaaggaguucuccgaggucgagggccgcauccaggaccucgagaaguacgucgaggacaccaagaucgaccucugguccuacaacgccgagcuccucgucgcccucgagaaccagcacaccaucgaccucaccgacuccgagaugaacaagcucuucgagaagaccaagaagcagcuccgcgagaacgccgaggacaugggcaacggcugcuucaagaucuaccacaagugcgacaacgccugcaucggcuccauccgcaacggcaccuacgaccacgacgucuaccgcgacgaggcccucaacaaccgcuuccagaucaagggcgucgagcucaaguccggcuacaaggacuggauccucuggaucuccuucgccauguccugcuuccuccucugcgucgcccuccucggcuucaucaugugggccugccagaagggcaacauccgcugcaacaucugcaucuga

SEQ ID NO: 107530 - RNA, 1701 nt, Artificial Sequence; identical to SEQ ID NO: 105894
  derived and/or modified CDS sequence (opt2) from hemagglutinin__InfluenzaA__AHL96880

SEQ ID NO: 107531 - RNA, 1701 nt, Artificial Sequence
  derived and/or modified CDS sequence (opt2) from hemagglutinin__InfluenzaA__AHL96892
augaagaccaucaucgcccucuccuacauccucugccucgucuucgcccagaagcuccccggcaacgacaacuccaccgccacccucugccucggccaccacgccguccccaacggcaccaucgucaagaccaucaccaacgaccgcaucgaggucaccaacgccaccgagcucguccagaacuccuccaucggcgagaucugcgacuccccccaccagauccucgacggcgagaacugcacccucaucgacgcccuccucggcgacccccagugcgacggcuuccagaacaagaagugggaccucuucgucgagcgcuccaaggccuacuccaacugcuaccccuacgacguccccgacuacgccucccuccgcucccucgucgccuccuccggcacccucgaguucaacaacgaguccuucaacugggccggcgucacccagaacggcaccuccuccgccugcauccgcggcuccaacuccuccuucuucucccgccucaacuggcucacccaccucaacuucaaguaccccgcccucaacgucaccaugcccaacaacgagcaguucgacaagcucuacaucuggggcguccaccaccccggcaccgacaaggaccagaucuuccucuacgcccaguccuccggccgcaucaccgucuccaccaagcgcucccagcaggccgucauccccaacaucggcucccgcccccgcauccgcaacauccccucccgcaucuccaucuacuggaccaucgucaagcccggcgacauccuccucaucaacuccaccggcaaccucaucgccccccgcggcuacuucaagauccgcuccggcaaguccuccaucaugcgcuccgacgcccccaucggcaagugcaaguccgagugcaucacccccaacggcuccauccccaacgacaagcccuuccagaacgucaaccgcaucaccuacggcgccugcccccgcuacgucaagcaguccacccucaagcucgccaccggcaugcgcaacguccccgagaagcagacccgcggcaucuucggcgccaucgccggcuucaucgagaacggcugggagggcauggucgacggcugguacggcuuccgccaccagaacuccgagggccgcggccaggccgccgaccucaaguccacccaggccgccaucgaccagaucaacggcaagcucaaccgccucaucggcaagaccaacgagaaguuccaccagaucgagaaggaguucuccgaggucgagggccgcguccaggaccucgagaaguacgucgaggacaccaagaucgaccucugguccuacaacgccgagcuccucgucgcccucgagaaccagcacaccaucgaccucaccgacuccgagaugaacaagcucuucgagaagaccaagaagcagcuccgcgagaacgccgaggacaugggcaacggcugcuucaagaucuaccacaagugcgacaacgccugcaucggcuccauccgcaacggcaccuacgaccacgacgucuaccgcgacgaggcccucaacaaccgcuuccagaucaagggcgucgagcucaaguccggcuacaaggacuggauccucuggaucuccuucgccaucuccugcuuccuccucugcgucgcccuccucggcuucaucaugugggccugccagaagggcaacauccgcugcaacaucugcaucuga

SEQ ID NO: 107532 - RNA, 1701 nt, Artificial Sequence
  derived and/or modified CDS sequence (opt2) from hemagglutinin__InfluenzaA__AHL96904
augaagaccaucaucgcccucuccuacauccucugccucgucuucgcccagaagcuccccggcaacgacaacuccaccgccacccucugccucggccaccacgccguccccaacggcaugaucgucaagaccaucaccaacgaccgcaucgaggucaccaacgccaccgagcucguccagaacuccuccaucggcgagaucugcgacuccccccaccagauccucgacggcgagaacugcacccucaucgacgcccuccucggcgacccccagugcgacggcuuccagaacaagaagugggaccucuucgucgagcgcuccaaggccuacuccaacugcuaccccuacgacguccccgacuacgccucccuccgcucccucgucgccuccuccggcacccucgaguucaacaacgaguccuucaacuggaccggcgucacccagaacggcaccuccuccgccugcauccgccgcuccaacuccuccuucuucucccgccucaacuggcucacccaccucaacuucaaguaccccgcccucaacgucaccaugcccaacaacgagcaguucgacaagcucuacaucuggggcguccaccaccccggcaccgacaaggaccagaucuuccucuacgcccaguccuccggccgcaucaccgucuccaccaagcgcucccagcaggccgucguccccaacaucggcucccgcccccgcauccgcaacauccccucccgcaucuccaucuacuggaccaucgucaagcccggcgacauccuccucaucaacuccaccggcaaccucaucgccccccgcggcuacuucaagauccgcuccggcaaguccuccaucaugcgcuccgacgcccccaucggcaagugcaaguccgagugcaucacccccaacggcuccauccccaacgacaagcccuuccagaacgucaaccgcaucaccuacggcgccugcccccgcuacgucaagcaguccacccucaagcucgccaccggcaugcgcaacguccccgagaagcagacccgcggcaucuucggcgccaucgccggcuucaucgagaacggcugggagggcauggucgacggcugguacggcuuccgccaccagaacuccgagggccgcggccaggccgccgaccucaaguccacccaggccgccaucgaccagaucaacggcaagcucaaccgccucaucggcaagaccaacgagaaguuccaccagaucgagaaggaguucuccgaggucgagggccgcauccaggaccucgagaaguacgucgaggacaccaagaucgaccucugguccuacaacgccgagcuccucgucgcccucgagaaccagcacaccaucgaccucaccgacuccgagaugaacaagcucuucgagaagaccaagaagcagcuccgcgagaacgccgaggacaugggcaacggcugcuucaagaucuaccacaagugcgacaacgccugcaucggcuccauccgcaacggcaccuacgaccacgacgucuaccgcgacgaggcccucaacaaccgcuuccagaucaagggcgucgagcucaaguccggcuacaaggacuggauccucuggaucuccuucgccauguccugcuuccuccucugcgucgcccuccucggcuccaucaugugggccugccagaagggcaacauccgcugcaacaucugcaucuga

SEQ ID NO: 107533 - RNA, 1701 nt, Artificial Sequence; identical to SEQ ID NO: 105894
  derived and/or modified CDS sequence (opt2) from hemagglutinin__InfluenzaA__AHL96916

SEQ ID NO: 107534 - RNA, 1701 nt, Artificial Sequence; identical to SEQ ID NO: 105894
  derived and/or modified CDS sequence (opt2) from hemagglutinin__InfluenzaA__AHL96928

SEQ ID NO: 107535 - RNA, 1701 nt, Artificial Sequence; identical to SEQ ID NO: 105894
  derived and/or modified CDS sequence (opt2) from hemagglutinin__InfluenzaA__AHL96940

SEQ ID NO: 107536 - RNA, 1701 nt, Artificial Sequence; identical to SEQ ID NO: 105904
  derived and/or modified CDS sequence (opt2) from hemagglutinin__InfluenzaA__AHL96952

SEQ ID NO: 107537 - RNA, 1701 nt, Artificial Sequence; identical to SEQ ID NO: 105904
  derived and/or modified CDS sequence (opt2) from hemagglutinin__InfluenzaA__AHL96964

SEQ ID NO: 107538 - RNA, 1701 nt, Artificial Sequence; identical to SEQ ID NO: 106062
  derived and/or modified CDS sequence (opt2) from hemagglutinin__InfluenzaA__AHL96976

SEQ ID NO: 107539 - RNA, 1701 nt, Artificial Sequence
  derived and/or modified CDS sequence (opt2) from hemagglutinin__InfluenzaA__AHL96988
augaagaccaucaucgcccucuccuacauccucugccucgucuucgcccagaagcuccccggcaacgacaacuccaccgccacccucugccucggccaccacgccguccccaacggcaccaucgucaagaccaucaccaacgaccgcaucgaggucaccaacgccaccgagcucguccagaacuccuccaucggcgagaucugcgacuccccccaccagauccucgacggcgagaacugcacccucaucgacgcccuccucggcgacccccagugcgacggcuuccagaacaagaagugggaccucuucgucgagcgcuccaaggccuacuccaacugcuaccccuacgacguccccgacuacgccucccuccgcucccucgucgccuccuccggcacccucgaguucaacaacgaguccuucaacuggaccggcgucacccagaacggcaccuccuccgccugcauccgccgcuccaacuccuccuucuucucccgccucaacuggcucacccaccucaacuucaaguaccccgcccucaacgucaccaugcccaacaacgagcaguucgacaagcucuacaucuggggcguccaccaccccggcaccgacaaggaccagaucuuccucuacgcccaguccuccggccgcaucaccgucuccaccaagcgcucccagcaggccgucauccccaacaucggcucccgcccccgcauccgcaacauccccucccgcaucuccaucuacuggaccaucguccgccccggcgacauccuccucaucaacuccaccggcaaccucaucgccccccgcggcuacuucaagauccgcuccggcaaguccuccaucaugcgcuccgacgcccccaucggcaagugcaaguccgagugcaucacccccaacggcuccauccccaacgacaagcccuuccagaacgucaaccgcaucaccuacggcgccugcccccgcuacgucaagcaguccacccucaagcucgccaccggcaugcgcaacguccccgagaagcagacccgcggcaucuucggcgccaucgccggcuucaucgagaacggcugggagggcauggucgacggcugguacggcuuccgccaccagaacuccgagggccgcggccaggccgccgaccucaaguccacccaggccgccaucgaccagaucaacggcaagcucaaccgccucaucggcaagaccaacgagaaguuccaccagaucgagaaggaguucuccgaggucgagggccgcauccaggaccucgagaaguacgucgaggacaccaagaucgaccucugguccuacaacgccgagcuccucgucgcccucgagaaccagcacaccaucgaccucaccgacuccgagaugaacaagcucuucgagaagaccaagaagcagcuccgcgagaacgccgaggacaugggcaacggcugcuucaagaucuaccacaagugcgacaacgccugcaucggcuccauccgcaacggcaccuacgaccacaacgucuaccgcgacgaggcccucaacaaccgcuuccagaucaagggcgucgagcucaaguccggcuacaaggacuggauccucuggaucuccuucgccaucuccugcuuccuccucugcgucgcccuccucggcuucaucaugugggccugccagaagggcaacauccgcugcaacaucugcaucuga

SEQ ID NO: 107540 - RNA, 1701 nt, Artificial Sequence; identical to SEQ ID NO: 105904
  derived and/or modified CDS sequence (opt2) from hemagglutinin__InfluenzaA__AHL97000

SEQ ID NO: 107541 - RNA, 1701 nt, Artificial Sequence; identical to SEQ ID NO: 106030
  derived and/or modified CDS sequence (opt2) from hemagglutinin__InfluenzaA__AHL97012

SEQ ID NO: 107542 - RNA, 1701 nt, Artificial Sequence
  derived and/or modified CDS sequence (opt2) from hemagglutinin__InfluenzaA__AHL97024
augaagaccaucaucgcccucuccuacauccucugccucgucuucgcccagaagcuccccggcaacgacaacuccaccgccacccucugccucggccaccacgccguccccaacggcaccaucgucaagaccaucaugaacgaccgcaucgaggucaccaacgccaccgagcucguccagaacuccuccaucggcgagaucugcgacuccccccaccagauccucgacggcgagaacugcacccucaucgacgcccuccucggcgacccccagugcgacggcuuccagaacaagaagugggaccucuucgucgagcgcuccaaggccuacuccaacugcuaccccuacgacguccccgacuacgccucccuccgcucccucgucgccuccuccggcacccucgaguucaacaacgaguccuucaacugggccggcgucacccagaacggcaccuccuccgccugcauccgcggcuccaacuccuccuucuucucccgccucaacuggcucacccaccucaacuucaaguaccccgcccucaacgucaccaugcccaacaacgagcaguucgacaagcucuacaucuggggcguccaccaccccggcaccgacaaggaccagaucuuccucuacgcccaguccuccggccgcaucaccgucuccaccaagcgcucccagcaggccgucauccccaacaucggcucccgcccccgcauccgcaacauccccucccgcaucuccaucuacuggaccaucgucaagcccggcgacauccuccucaucaacuccaccggcaaccucaucgccccccgcggcuacuucaagauccgcuccggcaaguccuccaucaugcgcuccgacgcccccaucggcaagugcaaguccgagugcaucacccccaacggcuccauccccaacgacaagcccuuccagaacgucaaccgcaucaccuacggcgccugcccccgcuacgucaagcaguccacccucaagcucgccaccggcaugcgcaacguccccgagaagcagacccgcggcaucuucggcgccaucgccggcuucaucgagaacggcugggagggcaugauggacggcugguacggcuuccgccaccagaacuccgagggccgcggccaggccgccgaccucaaguccacccaggccgccaucgaccagaucaacggcaagcucaaccgccucaucggcaagaccaacgagaaguuccaccagaucgagaaggaguucuccgaggucgagggccgcauccaggaccucgagaaguacgucgaggacaccaagaucgaccucugguccuacaacgccgagcuccucgucgcccucgagaaccagcacaccaucgaccucaccgacuccgagaugaacaagcucuucgagaagaccaagaagcagcuccgcgagaacgccgaggacaugggcaacggcugcuucaagaucuaccacaagugcgacaacgccugcaucggcuccauccgcaacggcaccuacgaccacgacgucuaccgcgacgaggcccucaacaaccgcuuccagaucaagggcgucgagcucaaguccggcuacaaggacuggauccucuggaucuccuucgccaucuccugcuuccuccucugcgucgcccuccucggcuucaucaugugggccugccagaagggcaacauccgcugcaacaucugcaucuga

SEQ ID NO: 107543 - RNA, 1701 nt, Artificial Sequence
  derived and/or modified CDS sequence (opt2) from hemagglutinin__InfluenzaA__AHL97036
augaagaccaucaucgcccucuccuacauccucugccucgucuucgcccagaagcuccccggcaacgacaacuccaccgccacccucugccucggccaccacgccguccccaacggcaccaucgucaagaccaucaccaacgaccgcaucgaggucaccaacgccaccgagcucguccagaacuccuccaucggcgagaucugcgacuccccccaccagauccucgacggcgagaacugcacccucaucgacgcccuccucggcgacccccagugcgacggcuuccagaacaagaagugggaccucuucgucgagcgcuccaaggccuacuccaacugcuaccccuacgacguccccgacuacgccucccuccgcucccucgucgccuccuccggcacccucgaguucaacaacgaguccuucaacuggaccggcgucacccagaacggcaccuccuccgccugcauccgccgcuccaacuccuccuucuucucccgccucaacuggcucacccaccucaacuucaaguaccccgcccucaacgucaccaugcccaacaacgagcaguucgacaagcucuacaucuggggcguccaccaccccggcaccgacaaggaccagaucuuccucuacgcccaguccuccggccgcaucaccgucuccaccaagcgcucccagcaggccgucauccccaacaucggcucccgcccccgcauccgcaacauccccucccgcaucuccaucuacuggaccaucgucaagcccggcgacauccuccucaucaacuccaccggcaaccucaucgccccccgcggcuacuucaagauccgcuccggcaaguccuccaucaugcgcuccgacgcccccaucggcaagugcaaguccgagugcaucacccccaacggcuccauccccaacgacaagcccuuccagaacgucaaccgcaucaccuacggcgccugcccccgcuacgucaagcaguccacccucaagcucgccaccggcaugcgcaacguccccgagaagcagacccgcggcaucuucggcgccaucgccggcuucaucgagaacggcugggagggcauggucgacggcugguacggcuuccgccaccagaacuccgagggccgcggccaggccgccgaccucaaguccacccaggccgccaucgaccagaucaacggcaagcucaaccgccucaucggcaagaccaacgagaaguuccaccagaucgagaaggaguucuccgaggucgagggccgcauccaggaccucgagaaguacgucgaggacaccaagaucgaccucugguccuacaacgccgagcuccucgucgcccucgagaaccagcacaccaucgaccucaccgacuccgagaugaacaagcucuucgagaagaccaagaagcagcuccgcgagaacgccgaggacaugggcaacggcugcuucaagaucuaccacaagugcgacaacaccugcaucggcuccauccgcaacggcaccuacgaccacgacgucuaccgcgacgaggcccucaacaaccgcuuccagaucaagggcgucgagcucaaguccggcuacaaggacuggauccucuggaucuccuucgccaucuccugcuuccuccucugcgucgcccuccucggcuucaucaugugggccugccagaagggcaacauccgcugcaacaucugcaucuga

SEQ ID NO: 107544 - RNA, 1701 nt, Artificial Sequence; identical to SEQ ID NO: 105919
  derived and/or modified CDS sequence (opt2) from hemagglutinin__InfluenzaA__AHL97048

SEQ ID NO: 107545 - RNA, 1701 nt, Artificial Sequence
  derived and/or modified CDS sequence (opt2) from hemagglutinin__InfluenzaA__AHL97060
augaagaccaucaucgcccucuccuacauccucugccucgucuucgcccagaagauccccggcaacgacaacuccaccgccacccucugccucggccaccacgccguccccaacggcaccaucgucaagaccaucaccaacgaccgcaucgaggucaccaacgccaccgagcucguccagaacuccuccaucggcgagaucugcgacuccccccaccagauccucgacggcgagaacugcacccucaucgacgcccuccucggcgacccccagugcgacggcuuccagaacaagaagugggaccucuucgucgagcgcuccaaggccuacuccaacugcuaccccuacgacguccccgacuacgccucccuccgcucccucgucgccuccuccggcacccucgaguucaacaacgaguccuucaacuggaccggcgucacccagaacggcaccuccuccgccugcauccgccgcuccaacuccuccuucuucucccgccucaacuggcucacccaccucaacuucaaguaccccgcccucaacgucaccaugcccaacaacgagcaguucgacaagcucuacaucuggggcguccaccaccccggcaccgacaaggaccagaucuuccucuacgcccaguccuccggccgcaucaccgucuccaccaagcgcucccagcaggccgucauccccaacaucggcucccgcccccgcauccgcaacauccccucccgcaucuccaucuacuggaccaucgucaagcccggcgacauccuccucaucaacuccaccggcaaccucaucgccccccgcggcuacuucaagauccgcuccggcaaguccuccaucaugcgcuccgacgcccccaucggcaagugcaaguccgagugcaucacccccaacggcuccauccccaacgacaagcccuuccagaacgucaaccgcaucaccuacggcgccugcccccgcuacgucaagcaguccacccucaagcucgccaccggcaugcgcaacguccccgagaagcagacccgcggcaucuucggcgccaucgccggcuucaucgagaacggcugggagggcauggucgacggcugguacggcuuccgccaccagaacuccgagggccgcggccaggccgccgaccucaaguccacccaggccgccaucgaccagaucaacggcaagcucaaccgccucaucggcaagaccaacgagaaguuccaccagaucgagaaggaguucuccgaggucgagggccgcauccaggaccucgagaaguacgucgaggacaccaagaucgaccucugguccuacaacgccgagcuccucgucgcccucgagaaccagcacaccaucgaccucaccgacuccgagaugaacaagcucuucgagaagaccaagaagcagcuccgcgagaacgccgaggacaugggcaacggcugcuucaagaucuaccacaagugcgacaacgccugcaucggcuccauccgcaacggcaccuacgagcacgacgucuaccgcgacgaggcccucaacaaccgcuuccagaucaagggcgucgagcucaaguccggcuacaaggacuggauccucuggaucuccuucgccaucuccugcuuccuccucugcgucgcccuccucggcuucaucaugugggccugccagaagggcaacauccgcugcaacaucugcaucuga

SEQ ID NO: 107546 - RNA, 1701 nt, Artificial Sequence; identical to SEQ ID NO: 106030
  derived and/or modified CDS sequence (opt2) from hemagglutinin__InfluenzaA__AHL97072

SEQ ID NO: 107547 - RNA, 1701 nt, Artificial Sequence; identical to SEQ ID NO: 106030
  derived and/or modified CDS sequence (opt2) from hemagglutinin__InfluenzaA__AHL97084

SEQ ID NO: 107548 - RNA, 1701 nt, Artificial Sequence; identical to SEQ ID NO: 105871
  derived and/or modified CDS sequence (opt2) from hemagglutinin__InfluenzaA__AHL97096

SEQ ID NO: 107549 - RNA, 1701 nt, Artificial Sequence; identical to SEQ ID NO: 106033
  derived and/or modified CDS sequence (opt2) from hemagglutinin__InfluenzaA__AHL97108

SEQ ID NO: 107550 - RNA, 1701 nt, Artificial Sequence
  derived and/or modified CDS sequence (opt2) from hemagglutinin__InfluenzaA__AHL97120
augaagaccaucaucgcccucuccuacauccucugccucgucuucgcccagaagcuccccggcaacgacaacuccaccgccacccucugccucggccaccacgccguccccaacggcaccaucgucaagaccaucaccaacgaccgcaucgaggucaccaacgccaccgagcucguccagaacuccuccaucggcgagaucugcgacuccccccaccagauccucgacggcgagaacugcacccucaucgacgcccuccucggcgacccccagugcgacggcuuccagaacaagaagugggaccucuucgucgagcgcuccaaggccuacuccaacugcuaccccuacgacguccccgacuacgccucccuccgcucccucgucgccuccuccggcacccucgaguucaacaacgaguccuucaacugggccggcgucacccagaacggcaccuccuccgccugcauccgcggcuccaacuccuccuucuucucccgccucaacuggcucacccaccucaacuucaaguaccccgcccucaacgucaccaugcccaacaacgagcaguucgacaagcucuacaucuggggcguccaccaccccggcaccgacaaggaccagaucuuccucuacgcccaguccuccggccgcaucaccgucuccaccaagcgcucccagcaggccgucauccccaacaucggcucccgcccccgcauccgcaacauccccucccgcaucuccaucuacuggaccaucgucaagcccggcgacauccuccucaucaacuccaccggcaaccucaucgccccccgcggcuacuucaagauccgcuccggcaaguccuccaucaugcgcuccgacgcccccaucggcaagugcaaguccgagugcaucacccccaacggcuccauccccaacgacaagcccuuccagaacgucaaccgcgucaccuacggcgccugcccccgcuacgucaagcaguccacccucaagcucgccaccggcaugcgcaacguccccgagaagcagacccgcggcaucuucggcgccaucgccggcuucaucgagaacggcugggagggcauggucgacggcugguacggcuuccgccaccagaacuccgagggccgcggccaggccgccgaccucaaguccacccaggccgccaucgaccagaucaacggcaagcucaaccgccucaucggcaagaccaacgagaaguuccaccagaucgagaaggaguucuccgaggucgagggccgcauccaggaccucgagaaguacgucgaggacaccaagaucgaccucugguccuacaacgccgagcuccucgucgcccucgagaaccagcacaccaucgaccucaccgacuccgagaugaacaagcucuucgagaagaccaagaagcagcuccgcgagaacgccgaggacaugggcaacggcugcuucaagaucuaccacaagugcgacaacgccugcaucggcuccaucaucaacggcaccuacgaccacgacgucuaccgcgacgaggcccucaacaaccgcuuccagaucaagggcgucgagcucaaguccggcuacaaggacuggauccucuggaucuccuucgccaucuccugcuuccuccucugcgucgcccuccucggcuucaucaugugggccugccagaagggcaacauccgcugcaacaucugcaucuga

SEQ ID NO: 107551 - RNA, 1701 nt, Artificial Sequence
  derived and/or modified CDS sequence (opt2) from hemagglutinin__InfluenzaA__AHL97132
augaagaccaucaucgcccucuccuacauccucugccucgucuucgcccagaagcuccccggcaacgacaacuccaccgccacccucugccucggccaccacgccguccccaacggcaccaucgucaagaccaucaccaacgaccagaucgaggucaccaacgccaccgagcucguccagaacuccuccaucggcgagaucugcgacuccccccaccagauccucgacggcgagaacugcacccucaucgacgcccuccucggcgacccccagugcgacggcuuccagaacaagaagugggaccucuucgucgagcgcuccaaggccuacuccaacugcuaccccuacgacguccccgacuacgccucccuccgcucccucgucgccuccuccggcacccucgaguucaacaacgaguccuucaacugggccggcgucacccagaacggcaccuccuccgccugcauccgcggcuccaacuccuccuucuucucccgccucaacuggcucacccaccucaacuucaaguaccccgcccucaacgucaccaugcccaacaacgagcaguucgacaagcucuacaucuggggcguccaccaccccggcaccgacaaggaccagaucuuccucuacgcccaguccuccggccgcaucaccgucuccaccaagcgcucccagcaggccgucauccccaacaucggcucccgcccccgcauccgcaacauccccucccgcaucuccaucuacuggaccaucgucaagcccggcgacauccuccucaucaacuccaccggcaaccucaucgccccccgcggcuacuucaagauccgcuccggcaaguccuccaucaugcgcuccgacgcccccaucggcaagugcaaguccgagugcaucacccccaacggcuccauccccaacgacaagcccuuccagaacgucaaccgcaucaccuacggcgccugcccccgcuacgucaagcaguccacccucaagcucgccaccggcaugcgcaacguccccggcaagcagacccgcggcaucuucggcgccaucgccggcuucaucgagaacggcugggagggcauggucgacggcugguacggcuuccgccaccagaacuccgagggccgcggccaggccgccgaccucaaguccacccaggccgccaucgaccagaucaacggcaagcucaaccgccucaucggcaagaccaacgagaaguuccaccagaucgagaaggaguucuccgaggucgagggccgcauccaggaccucgagaaguacgucgaggacaccaagaucgaccucugguccuacaacgccgagcuccucgucgcccucgagaaccagcacaccaucgaccucaccgacuccgagaugaacaagcucuucgagaagaccaagaagcagcuccgcgagaacgccgaggacaugggcaacggcugcuucaagaucuaccacaagugcgacaacgccugcaucggcuccauccgcaacggcaccuacgaccacgacgucuaccgcgacgaggcccucaacaaccgcuuccagaucaagggcgucgagcucaaguccggcuacaaggacuggauccucuggaucuccuucgccaucuccugcuuccuccucugcgucgcccuccucggcuucaucaugugggccugccagaagggcaacauccgcugcaacaucugcaucuga

SEQ ID NO: 107552 - RNA, 1701 nt, Artificial Sequence; identical to SEQ ID NO: 106030
  derived and/or modified CDS sequence (opt2) from hemagglutinin__InfluenzaA__AHL97144

SEQ ID NO: 107553 - RNA, 1701 nt, Artificial Sequence; identical to SEQ ID NO: 106030
  derived and/or modified CDS sequence (opt2) from hemagglutinin__InfluenzaA__AHL97156

SEQ ID NO: 107554 - RNA, 1701 nt, Artificial Sequence; identical to SEQ ID NO: 106030
  derived and/or modified CDS sequence (opt2) from hemagglutinin__InfluenzaA__AHL97168

SEQ ID NO: 107555 - RNA, 1701 nt, Artificial Sequence; identical to SEQ ID NO: 105904
  derived and/or modified CDS sequence (opt2) from hemagglutinin__InfluenzaA__AHL97180

SEQ ID NO: 107556 - RNA, 1701 nt, Artificial Sequence; identical to SEQ ID NO: 106030
  derived and/or modified CDS sequence (opt2) from hemagglutinin__InfluenzaA__AHL97192

SEQ ID NO: 107557 - RNA, 1701 nt, Artificial Sequence; identical to SEQ ID NO: 106030
  derived and/or modified CDS sequence (opt2) from hemagglutinin__InfluenzaA__AHL97204

SEQ ID NO: 107558 - RNA, 1701 nt, Artificial Sequence; identical to SEQ ID NO: 106030
  derived and/or modified CDS sequence (opt2) from hemagglutinin__InfluenzaA__AHL97216

SEQ ID NO: 107559 - RNA, 1701 nt, Artificial Sequence
  derived and/or modified CDS sequence (opt2) from hemagglutinin__InfluenzaA__AHL97228
augaagaccaucaucgcccucuccuacauccucugccucgucuucgcccagaagcuccccggcaacgacaacuccaccgccacccucugccucggccaccacgccguccccaacggcaccgucgucaagaccaucaccaacgaccgcaucgaggucaccaacgccaccgagcucguccagaacuccuccaucggcgagaucugcgacuccccccaccagauccucgacggcgagaacugcacccucaucgacgcccuccucggcgacccccagugcgacggcuuccagaacaagaagugggaccucuucgucgagcgcuccaaggccuacuccaacugcuaccccuacgacguccccgacuacgccucccuccgcucccucgucgccuccuccggcacccucgaguucaacaacgaguccuucaacuggaccggcgucacccagaacggcaccuccuccgccugcauccgccgcuccaacaacuccuucuucucccgccucaacuggcucacccaccucaacuucaaguaccccgcccucaacgucaccaugcccaacaacgagcaguucgacaagcucuacaucuggggcguccaccaccccggcaccgacaaggaccagaucuuccucuacgcccaguccuccggccgcaucaccgucuccaccaagcgcucccagcaggccgucauccccaacaucggcucccgcccccgcauccgcaacauccccucccgcaucuccaucuacuggaccaucgucaagcccggcgacauccuccucaucaacuccaccggcaaccucaucgccccccgcggcuacuucaagauccgcuccggcaaguccuccaucaugcgcuccgacgcccccaucggcaagugcaaguccgagugcaucacccccaacggcuccauccccaacgacaagcccuuccagaacgucaaccgcaucaccuacggcgccugcccccgcuacgucaagcaguccacccucaagcucgccaccggcaugcgcaacguccccgagaagcagacccgcggcaucuucggcgccaucgccggcuucaucgagaacggcugggagggcauggucgacggcugguacggcuuccgccaccagaacuccgagggccgcggccaggccgccgaccucaaguccacccaggccgccaucgaccagaucaacggcaagcucaaccgccucaucggcaagaccaacgagaaguuccaccagaucgagaaggaguucuccgaggucgagggccgcauccaggaccucgagaaguacgucgaggacaccaagaucgaccucugguccuacaacgccgagcuccucgucgcccucgagaaccagcacaccaucgaccucaccgacuccgagaugaacaagcucuucgagaagaccaagaagcagcuccgcgagaacgccgaggacaugggcaacggcugcuucaagaucuaccacaagugcgacaacgccugcaucggcuccauccgcaacggcaccuacgaccacgacgucuaccgcgacgaggcccucaacaaccgcuuccagaucaagggcgucgagcucaaguccggcuacaaggacuggauccucuggaucuccuucgccaucuccugcuuccuccucugcgucguccuccucggcuucaucaugugggccugccagaagggcaacauccgcugcaacaucugcaucuga

SEQ ID NO: 107560 - RNA, 1701 nt, Artificial Sequence; identical to SEQ ID NO: 106030
  derived and/or modified CDS sequence (opt2) from hemagglutinin__InfluenzaA__AHL97240

SEQ ID NO: 107561 - RNA, 1701 nt, Artificial Sequence
  derived and/or modified CDS sequence (opt2) from hemagglutinin__InfluenzaA__AHL97252
augaagaccaucaucgcccucuccuacauccucugccucgucuucgcccaggagcuccccggcaacgacgacuccaccgccacccucugccucggccaccacgccguccccaacggcaccaucgucaagaccaucaccaacgaccagaucgaggucaccaacgccaccgagcucguccaguccuccuccaccggcgagaucugcaacuccccccaccagauccucgacggcgagaacugcacccucaucgacgcccuccucggcgacccccagugcgacggcuuccagaacaagaagugggaccucuucgucgagcgcuccaaggcccacuccaacugcuaccccuacgacguccccgacuacgccucccuccgcucccucgucgccuccuccggcacccucgaguucaacaacgagaacuucaacuggaccggcgucacccagaacggcaccuccuccgccugcauccgccgcuccaacaacuccuucuucucccgccucaacuggcucacccaccucaacuucaaguaccccgcccucaacgucaccaugcccaacaacgagcaguucgacaagcucuacaucuggggcguccaccaccccggcaccgacaaggaccagaucuuccucuacgcccaggccuccggccgcaucaccgucuccaccaagcgcucccagcaggccgucauccccaacaucggcucccgcccccgcguccgcaacauccccucccgcgucuccaucuacuggaccaucgucaagcccggcgacauccuccucaucaacuccaccggcaaccucaucgccccccgcggcuacuucaagauccgcuccggcaaguccuccaucaugcgcuccgacgcccccaucggcaagugcaacuccgccugcaucacccccaacggcuccauccccaacgacaagcccuuccagaacgucaaccgcaucaccuacggcgccugcccccgcuacgucaagcagaacacccucaagcucgccaccggcaugcgcaacguccccgagaagcagacccgcggcaucuucggcgccaucgccggcuucaucgagaacggcugggagggcauggucgacggcugguacggcuuccgccaccagaacuccgagggccgcggccaggccgccgaccucaaguccacccaggccgccaucgaccagaucaacggcaagcucaaccgccucaucggcaagaccaacgagaaguuccaccagaucgagaaggaguucuccgaggucgagggccgcauccaggaccucgagaaguacgucgaggacaccaagaucgaccucugguccuacaacgccgagcuccucgucgcccucgagaaccagcacaccaucgaccucaccgacuccgagaugaacaagcucuucgagaagaccaagaagcagcuccgcgagaacgccgaggacaugggcaacggcugcuucaagaucuaccacaagugcgacaacgccugcaucggcuccauccgcaacggcaccuacgaccacgacgucuaccgcgacgaggcccucaacaaccgcuuccagaucaagggcgucgagcucaaguccggcuacaaggacuggauccucuggaucuccuucgccaucuccugcuuccuccucugcgucgcccuccucggcuucaucaugugggccugccagaagggcaacauccgcugcaacaucugcaucuga

SEQ ID NO: 107562 - RNA, 1701 nt, Artificial Sequence; identical to SEQ ID NO: 105894
  derived and/or modified CDS sequence (opt2) from hemagglutinin__InfluenzaA__AHL97264

SEQ ID NO: 107563 - RNA, 1701 nt, Artificial Sequence; identical to SEQ ID NO: 106030
  derived and/or modified CDS sequence (opt2) from hemagglutinin__InfluenzaA__AHL97276

SEQ ID NO: 107564 - RNA, 1701 nt, Artificial Sequence
  derived and/or modified CDS sequence (opt2) from hemagglutinin__InfluenzaA__AHL97288
augaagaccaucaucgcccucuccuacauccucugccucgucuucgcccagaagcuccccggcaacgacaacuccaccgccacccucugccucggccaccacgccguccccaacggcaccaucgucaagaccaucaccaacgaccgcaucgaggucaccaacgccaccgagcucguccagaacuccuccaucggcgagaucugcaacuccccccaccagauccucgacggcgagaacugcacccucaucgacgcccuccucggcgacccccagugcgacggcuuccagaacaagaagugggaccucuucgucgagcgcuccaaggccuacuccaacugcuaccccuacgacguccccgacuacgccucccuccgcucccucgucgccuccuccggcacccucgaguucaacaacgaguccuucaacuggaccggcgucacccagaacggcaccuccuccgccugcauccgccgcuccaacuccuccuucuucucccgccucaacuggcucacccaccucaacuucaaguaccccgcccucaacgucaccaugcccaacaacgagcaguucgacaagcucuacaucuggggcguccaccaccccggcaccgacaaggaccagaucuuccucuacgcccaguccuccggccgcaucaccgucuccaccaagcgcucccagcaggccgucauccccaacaucggcucccgcccccgcauccgcaacauccccucccgcaucuccaucuacuggaccaucgucaagcccggcgacauccuccucaucaacuccaccggcaaccucaucgccccccgcggcuacuucaagauccgcuccggcaaguccuccaucaugcgcuccgacgcccccaucggcaagugcaaguccgagugcaucacccccaacggcuccauccccaacgacaagcccuuccagaacgucaaccgcaucaccuacggcgccugcccccgcuacgucaagcaguccacccucaagcucgccaccggcaugcgcaacguccccgagaagcagacccgcggcaucuucggcgccaucgccggcuucaucgagaacggcugggagggcauggucgacggcugguacggcuuccgccaccagaacuccgagggccgcggccaggccgccgaccucaaguccacccaggccgccaucgaccagaucaacggcaagcucaaccgccucaucggcaagaccaacgagaaguuccaccagaucgagaaggaguucuccgaggucgagggccgcauccaggaccucgagaaguacgucgaggacaccaagaucgaccucugguccuacaacgccgagcuccucgucgcccucgagaaccagcacaccaucgaccucaccgacuccgagaugaacaagcucuucgagaagaucaagaagcagcuccgcgagaacgccgaggacaugggcaacggcugcuucaagaucuaccacaagugcgacaacgccugcaucggcuccauccgcaacggcaccuacgaccacaacgucuaccgcgacgaggcccucaacaaccgcuuccagaucaagggcgucgagcucaaguccggcuacaaggacuggauccucuggaucuccuucgccaucuccugcuuccuccucugcgucgcccuccucggcuucaucaugugggccugccagaagggcaacauccgcugcaacaucugcaucuga

SEQ ID NO: 107565 - RNA, 1701 nt, Artificial Sequence; identical to SEQ ID NO: 105904
  derived and/or modified CDS sequence (opt2) from hemagglutinin__InfluenzaA__AHL97300

SEQ ID NO: 107566 - RNA, 1701 nt, Artificial Sequence; identical to SEQ ID NO: 106030
  derived and/or modified CDS sequence (opt2) from hemagglutinin__InfluenzaA__AHL97312

SEQ ID NO: 107567 - RNA, 1701 nt, Artificial Sequence; identical to SEQ ID NO: 106030
  derived and/or modified CDS sequence (opt2) from hemagglutinin__InfluenzaA__AHL97336

SEQ ID NO: 107568 - RNA, 1701 nt, Artificial Sequence; identical to SEQ ID NO: 106030
  derived and/or modified CDS sequence (opt2) from hemagglutinin__InfluenzaA__AHL97348

SEQ ID NO: 107569 - RNA, 1701 nt, Artificial Sequence
  derived and/or modified CDS sequence (opt2) from hemagglutinin__InfluenzaA__AHL97372
augaagaccaucaucgcccucuccuacauccucugccucgucuucgcccagaagcuccccggcaacgacaacuccaccgccacccucugccucggccaccacgccguccccaacggcaccaucgucaagaccaucaccaacgaccgcaucgaggucaccaacgccaccgagcucguccagaacuccuccaucggcgagaucugcgacuccccccaccagauccucgacggcgagaacugcacccucaucgacgcccuccucggcgacccccagugcgacggcuuccagaacaagaagugggaccucuucgucgagcgcuccaacgccuacuccaacugcuaccccuacgacguccccgacuacgccucccuccgcucccucgucgccuccuccggcacccucgaguucaacaacgaguccuucaacugggccggcgucacccagaacggcaccuccuccgccugcauccgcggcuccaacuccuccuucuucucccgccucaacuggcucacccaccucaacuucaaguaccccgcccucaacgucaccaugcccaacaacgagcaguucgacaagcucuacaucuggggcguccaccaccccggcaccgacaaggaccagaucuuccucuacgcccaguccuccggccgcaucaccgucuccaccaagcgcucccagcaggccgucauccccaacaucggcucccgcccccgcauccgcaacauccccucccgcaucuccaucuacuggaccaucgucaagcccggcgacauccuccucaucaacuccaccggcaaccucaucgccccccgcggcuacuucaagauccgcuccggcaaguccuccaucaugcgcuccgacgcccccaucggcaagugcaaguccgagugcaucacccccaacggcuccauccccaacgacaagcccuuccagaacgucaaccgcaucaccuacggcgccugcccccgcuacgucaagcaguccacccucaagcucgccaccggcaugcgcaacguccccgagaagcagacccgcggcaucuucggcgccaucgccggcuucaucgagaacggcugggagggcauggucgacggcugguacggcuuccgccaccagaacuccgagggccgcggccaggccgccgaccucaaguccacccaggccgccaucgaccagaucaacggcaagcucaaccgccucaucggcaagaccaacgagaaguuccaccagaucgagaaggaguucuccgaggucgagggccgcauccaggaccucgagaaguacgucgaggacaccaagaucgaccucugguccuacaacgccgagcuccucgucgcccucgagaaccagcacaccaucgaccucaccgacuccgagaugaacaagcucuucgagaagaccaagaagcagcuccgcgagaacgccgaggacaugggcaacggcugcuucaagaucuaccacaagugcgacaacgccugcaucggcuccauccgcaacggcaccuacgaccacgacgucuaccgcgacgaggcccucaacaaccgcuuccagaucaagggcgucgagcucaaguccggcuacaaggacuggauccucuggaucuccuucgccaucuccugcuuccuccucugcgucgcccuccucggcuucaucaugugggccugccagaagggcaacauccgcugcaacaucugcaucuga

SEQ ID NO: 107570 - RNA, 1701 nt, Artificial Sequence; identical to SEQ ID NO: 106030
  derived and/or modified CDS sequence (opt2) from hemagglutinin__InfluenzaA__AHL97384

SEQ ID NO: 107571 - RNA, 1701 nt, Artificial Sequence; identical to SEQ ID NO: 105894
  derived and/or modified CDS sequence (opt2) from hemagglutinin__InfluenzaA__AHL97396

SEQ ID NO: 107572 - RNA, 1701 nt, Artificial Sequence; identical to SEQ ID NO: 105871
  derived and/or modified CDS sequence (opt2) from hemagglutinin__InfluenzaA__AHL97408

SEQ ID NO: 107573 - RNA, 1701 nt, Artificial Sequence; identical to SEQ ID NO: 107542
  derived and/or modified CDS sequence (opt2) from hemagglutinin__InfluenzaA__AHL97420

SEQ ID NO: 107574 - RNA, 1701 nt, Artificial Sequence
  derived and/or modified CDS sequence (opt2) from hemagglutinin__InfluenzaA__AHL97444
augaagaccaucaucgcccucuccuacauccucugccucgucuucgcccagaagcuccccggcaacgacaacuccaccgccacccucugccucggccaccacgccguccccaacggcaccaucgucaagaccaucaccaacgaccgcaucgaggucaccaacgccaccgagcucguccagaacuccuccaucggcgagaucugcgacuccccccaccagauccucgacggcgagaacugcacccucaucgacgcccuccucggcgacccccagugcgacggcuuccagaacaagaagugggaccucuucgucgagcgcuccaaggccuacuccaacugcuaccccuacgacguccccgacuacgccucccuccgcucccucgucgccuccuccggcacccucgaguucaacaacgaguccuucaacugggccggcgucacccagaacggcaccuccuccgccugcauccgcggcuccaacuccuccuucuucucccgccucaacuggcucacccaccucaacuucaaguaccccgcccucaacgucaccaugcccaacaacgagcaguucgacaagcucuacaucuggggcguccaccaccccggcaccgacaaggaccagaucuuccucuacgcccaguccuccggccgcaucaccgucuccaccaagcgcucccagcaggccgucauccccaacaucggcucccgcccccgcauccgcaacauccccucccgcaucuccaucuacuggaccaucgucaagcccggcgacauccuccucaucaacuccaccggcaaccucaucgccccccgcggcuacuucaagauccgcuccggcaaguccuccaucaugcgcuccgacgcccccaucggcaagugcaaguccgagugcaucacccccaacggcuccauccccaacgacaagcccuuccagaacgucaaccgcaucaccuacggcaccugcccccgcuacgucaagcaguccacccucaagcucgccaccggcaugcgcaacguccccgagaagcagacccgcggcaucuucggcgccaucgccggcuucaucgagaacggcugggagggcauggucgacggcugguacggcuuccgccaccagaacuccgagggccgcggccaggccgccgaccucaaguccacccaggccgccaucgaccagaucaacggcaagcucaaccgccucaucggcaagaccaacgagaaguuccaccagaucgagaaggaguucuccgaggucgagggccgcauccaggaccucgagaaguacgucgaggacaccaagaucgaccucugguccuacaacgccgagcuccucgucgcccucgagaaccagcacaccaucgaccucaccgacuccgagaugaacaagcucuucgagaagaccaagaagcagcuccgcgagaacgccgaggacaugggcaacggcugcuucaagaucuaccacaagugcgacaacgccugcaucggcuccauccgcaacggcaccuacgaccacgacgucuaccgcgacgaggcccucaacaaccgcuuccagaucaagggcgucgagcucaaguccggcuacaaggacuggauccucuggaucuccuucgccaucuccugcuuccuccucugcgucgcccuccucggcuucaucaugugggccugccagaagggcaacauccgcugcaacaucugcaucuga

SEQ ID NO: 107575 - RNA, 1701 nt, Artificial Sequence; identical to SEQ ID NO: 105904
  derived and/or modified CDS sequence (opt2) from hemagglutinin__InfluenzaA__AHL97456

SEQ ID NO: 107576 - RNA, 1701 nt, Artificial Sequence
  derived and/or modified CDS sequence (opt2) from hemagglutinin__InfluenzaA__AHL97468
augaagaccaucaucgcccucuccuacauccucugccucgucuucgcccagaagcuccccggcaacgacaacuccaccgccacccucugccucggccaccacgccguccccaacggcaccaucgucaagaccaucaccaacgaccgcaucgaggucaccaacgccaccgagcucguccagaacuccuccaucggcgagaucugcgacuccccccaccagauccucgacggcgagaacugcacccucaucgacgcccuccucggcgacccccagugcgacggcuuccagaacaagaagugggaccucuucgucgagcgcuccaaggccuacuccaacugcuaccccuacgacguccccgacuacgccucccuccgcucccucgucgccuccuccggcacccucgaguucaacaacgaguccuucaacuggaccggcgucacccagaacggcaccuccuccgccugcauccgccgcuccaacuccuccuucuucucccgccucaacuggcucacccaccucaacuucaaguaccccgcccucaacgucaccaugcccaacaacgagcaguucgacaagcucuacaucuggggcguccaccaccccggcaccgacaaggaccagaucuuccucuacgcccaguccuccggccgcaucaccgucuccaccaagcgcucccagcaggccgucauccccaacaucggcucccgcccccgcauccgcaacauccccucccgcaucuccaucuacuggaccaucgucaagcccggcgacauccuccucaucaacuccaccggcaaccucaucgccccccgcggcuacuucaagauccgcuccggcaaguccuccaucaugcgcuccgacgcccccaucggcaagugcaaguccgagugcaucacccccaacggcuccauccccaacgacaagcccuuccagaacgucaaccgcaucaccuacggcgccugcccccgcuacgucaagcaguccacccucaagcucgccaccggcaugcgcaacguccccgagaagcagacccgcggcaucuucggcgccaucgccggcuucaucgagaacggcugggagggcaugauggacggcugguacggcuuccgccaccagaacuccgagggccgcggccaggccgccgaccucaaguccacccaggccgccaucgaccagaucaacggcaagcucaaccgccucaucggcaagaccaacgagaaguuccaccagaucgagaaggaguucuccgaggucgagggccgcauccaggaccucgagaaguacgucgaggacaccaagaucgaccucugguccuacaacgccgagcuccucgucgcccucgagaaccagcacaccaucgaccucaccgacuccgagaugaacaagcucuucgagaagaccaagaagcagcuccgcgagaacgccgaggacaugggcaacggcugcuucaagaucuaccacaagugcgacaacgccugcaucggcuccauccgcaacggcaccuacgaccacaacgucuaccgcgacgaggcccucaacaaccgcuuccagaucaagggcgucgagcucaaguccggcuacaaggacuggauccucuggaucuccuucgccaucuccugcuuccuccucugcgucgcccuccucggcuucaucaugugggccugccagaagggcaacauccgcugcaacaucugcaucuga

SEQ ID NO: 107577 - RNA, 1701 nt, Artificial Sequence; identical to SEQ ID NO: 106030
  derived and/or modified CDS sequence (opt2) from hemagglutinin__InfluenzaA__AHL97480

SEQ ID NO: 107578 - RNA, 1701 nt, Artificial Sequence; identical to SEQ ID NO: 106030
  derived and/or modified CDS sequence (opt2) from hemagglutinin__InfluenzaA__AHL97493

SEQ ID NO: 107579 - RNA, 1701 nt, Artificial Sequence; identical to SEQ ID NO: 107542
  derived and/or modified CDS sequence (opt2) from hemagglutinin__InfluenzaA__AHL97505

SEQ ID NO: 107580 - RNA, 1701 nt, Artificial Sequence
  derived and/or modified CDS sequence (opt2) from hemagglutinin__InfluenzaA__AHL97517
augaagaccaucaucgcccucuccuacauccucugccucgucuucgcccagaagcuccccggcaacgacaacuccaccgccacccucugccucggccaccacgccguccccaacggcaccaucgucaagaccaucaccaacgaccgcaucgaggucaccaacgccaccgagcucguccagaacuccuccaucggcgagaucugcgacuccccccaccagauccucgacggcgagaacugcacccucaucgacgcccuccucggcgacccccagugcgacggcuuccagaacaagaagugggaccucuucgucgagcgcuccaaggccuacuccaacugcuaccccuacgacguccccgacuacgccucccuccgcucccucgucgccuccuccggcacccucgaguucaacaacgaguccuucaacuggaccggcgucacccagaacggcaccuccuccgccugcauccgccgcuccaacuccuccuucuucucccgccucaacuggcucacccaccucaacuucaaguaccccgcccucaacgucaccaugcccaacaacgagcaguucgacaagcucuacaucuggggcguccaccaccccggcaccgacaaggaccagaucuuccucuacgcccaguccuccggccgcaucaccgucuccacccagcgcucccagcaggccgucauccccaacaucggcucccgcccccgcauccgcaacauccccucccgcaucuccaucuacuggaccaucgucaagcccggcgacauccuccucaucaacuccaccggcaaccucaucgccccccgcggcuacuucaagauccgcuccggcaaguccuccaucaugcgcuccgacgcccccaucggcaagugcaaguccgagugcaucacccccaacggcuccauccccaacgacaagcccuuccagaacgucaaccgcaucaccuacggcgccugcccccgcuacgucaagcaguccacccucaagcucgccaccggcaugcgcaacguccccgagaagcagacccgcggcaucuucggcgccaucgccggcuucaucgagaacggcugggagggcauggucgacggcugguacggcuuccgccaccagaacuccgagggccgcggccaggccgccgaccucaaguccacccaggccgccaucgaccagaucaacggcaagcucaaccgccucaucggcaagaccaacgagaaguuccaccagaucgagaaggaguucuccgaggucgagggccgcauccaggaccucgagaaguacgucgaggacaccaagaucgaccucugguccuacaacgccgagcuccucgucgcccucgagaaccagcacaccaucgaccucaccgacuccgagaugaacaagcucuucgagaagaccaagaagcagcuccgcgagaacgccgaggacaugggcaacggcugcuucaagaucuaccacaagugcgacaacgccugcaucggcuccauccgcaacggcaccuacgaccacaacgucuaccgcgacgaggcccucaacaaccgcuuccagaucaagggcgucgagcucaaguccggcuacaaggacuggauccucuggaucuccuucgccaucuccugcuuccuccucugcgucgcccuccucggcuucaucaugugggccugccagaagggcaacauccgcugcaacaucugcaucuga

SEQ ID NO: 107581 - RNA, 1701 nt, Artificial Sequence; identical to SEQ ID NO: 105919
  derived and/or modified CDS sequence (opt2) from hemagglutinin__InfluenzaA__AHL97529

SEQ ID NO: 107582 - RNA, 1701 nt, Artificial Sequence; identical to SEQ ID NO: 105904
  derived and/or modified CDS sequence (opt2) from hemagglutinin__InfluenzaA__AHL97541

SEQ ID NO: 107583 - RNA, 1701 nt, Artificial Sequence; identical to SEQ ID NO: 106030
  derived and/or modified CDS sequence (opt2) from hemagglutinin__InfluenzaA__AHL97553

SEQ ID NO: 107584 - RNA, 1701 nt, Artificial Sequence; identical to SEQ ID NO: 105871
  derived and/or modified CDS sequence (opt2) from hemagglutinin__InfluenzaA__AHL97565

SEQ ID NO: 107585 - RNA, 1701 nt, Artificial Sequence
  derived and/or modified CDS sequence (opt2) from hemagglutinin__InfluenzaA__AHL97577
augaagaccaucaucgcccucuccuacauccucugccucgucuucgcccagaagauccccggcaacgacaacuccaccgccacccucugccucggccaccacgccguccccaacggcaccaucgucaagaccaucaccaacgaccgcaucgaggucaccaacgccaccgagcucguccagaacuccuccaucggcgagaucugcgacuccccccaccagauccucgacggcgagaacugcacccucaucgacgcccuccucggcgacccccagugcgacggcuuccagaacaagaagugggaccucuucgucgagcgcuccaaggccuacuccaacugcuaccccuacgacguccccgacuacgccucccuccgcucccucgucgccuccuccggcacccucgaguucaacaacgaguccuucaacuggaccggcgucacccagaacggcaccuccuccgccugcauccgcggcuccaacuccuccuucuucucccgccucaacuggcucacccaccucaacuucaaguaccccgcccucaacgucaccaugcccaacaacgagcaguucgacaagcucuacaucuggggcguccaccaccccggcaccgacaaggaccagaucuuccucuacgcccaguccuccggccgcaucaccgucuccaccaagcgcucccagcaggccgucauccccaacaucggcucccgcccccgcauccgcaacauccccucccgcaucuccaucuacuggaccaucgucaagcccggcgacauccuccucaucaacuccaccggcaaccucaucgccccccgcggcuacuucaagauccgcuccggcaaguccuccaucaugcgcuccgacgcccccaucggcaagugcaaguccgagugcaucacccccaacggcuccauccccaacgacaagcccuuccagaacgucaaccgcaucaccuacggcgccugcccccgcuacgucaagcaguccacccucaagcucgccaccggcaugcgcaacguccccgagaagcagacccgcggcaucuucggcgccaucgccggcuucaucgagaacggcugggagggcauggucgacggcugguacggcuuccgccaccagaacuccgagggccgcggccaggccgccgaccucaaguccacccaggccgccaucgaccagaucaacggcaagcucaaccgccucaucggcaagaccaacgagaaguuccaccagaucgagaaggaguucuccgaggucgagggccgcauccaggaccucgagaaguacgucgaggacaccaagaucgaccucugguccuacaacgccgagcuccucgucgcccucgagaaccagcacaccaucgaccucaccgacuccgagaugaacaagcucuucgagcgcaccaagaagcagcuccgcgagaacgccgaggacaugggcaacggcugcuucaagaucuaccacaagugcgacaacgccugcaucggcuccauccgcaacggcaccuacgaccacgacgucuaccgcgacgaggcccucaacaaccgcuuccagaucaagggcgucgagcucaagcccggcuacaaggacuggauccucuggaucuccuucgccaucuccugcuuccuccucugcgucgcccuccucggcuucaucaugugggccugccagaagggcaacauccgcugcaacaucugcaucuga

SEQ ID NO: 107586 - RNA, 1701 nt, Artificial Sequence; identical to SEQ ID NO: 106059
  derived and/or modified CDS sequence (opt2) from hemagglutinin__InfluenzaA__AHL97589

SEQ ID NO: 107587 - RNA, 1701 nt, Artificial Sequence; identical to SEQ ID NO: 106030
  derived and/or modified CDS sequence (opt2) from hemagglutinin__InfluenzaA__AHL97601

SEQ ID NO: 107588 - RNA, 1701 nt, Artificial Sequence; identical to SEQ ID NO: 105894
  derived and/or modified CDS sequence (opt2) from hemagglutinin__InfluenzaA__AHL97613

SEQ ID NO: 107589 - RNA, 1701 nt, Artificial Sequence; identical to SEQ ID NO: 107576
  derived and/or modified CDS sequence (opt2) from hemagglutinin__InfluenzaA__AHL97625

SEQ ID NO: 107590 - RNA, 1701 nt, Artificial Sequence; identical to SEQ ID NO: 105904
  derived and/or modified CDS sequence (opt2) from hemagglutinin__InfluenzaA__AHL97637

SEQ ID NO: 107591 - RNA, 1701 nt, Artificial Sequence
  derived and/or modified CDS sequence (opt2) from hemagglutinin__InfluenzaA__AHL97661
augaagaccaucaucgcccucggcuacauccucugccucgucuucgcccagaagcuccccggcaacgacaacuccaccgccacccucugccucggccaccacgccguccccaacggcaccaucgucaagaccaucaccaacgaccgcaucgaggucaccaacgccaccgagcucguccagaacuccuccaucggcgagaucugcgacuccccccaccagauccucgacggcgagaacugcacccucaucgacgcccuccucggcgacccccagugcgacggcuuccagaacaagaagugggaccucuucgucgagcgcuccaaggccuacuccaacugcuaccccuacgacguccccgacuacgccucccuccgcucccucgucgccuccuccggcacccucgaguucaacaacgaguccuucaacuggaccggcgucacccagaacggcaccuccuccgccugcauccgccgcuccaacuccuccuucuucucccgccucaacuggcucacccaccucaacuucaaguaccccgcccucaacgucaccaugcccaacaacgagcaguucgacaagcucuacaucuggggcguccaccaccccggcaccgacaaggaccagaucuuccucuacgcccaguccuccggccgcaucaccgucuccaccaagcgcucccagcaggccgucauccccaacaucggcucccgcccccgcauccgcaacauccccucccgcaucuccaucuacuggaccaucgucaagcccggcgacauccuccucaucaacuccaccggcaaccucaucgccccccgcggcuacuucaagauccgcuccggcaaguccuccaucaugcgcuccgacgcccccaucggcaagugcaaguccgagugcaucacccccaacggcuccauccccaacgacaagcccuuccagaacgucaaccgcaucaccuacggcgccugcccccgcuacgucaagcaguccacccucaagcucgccaccggcaugcgcaacguccccgagaagcagacccgcggcaucuucggcgccaucgccggcuucaucgagaacggcugggagggcauggucgacggcugguacggcuuccgccaccagaacuccgagggccgcggccaggccgccgaccucaaguccacccaggccgccaucgaccagaucaacggcaagcucaaccgccucaucggcaagaccaacgagaaguuccaccagaucgagaaggaguucuccgaggucgagggccgcauccaggaccucgagaaguacgucgaggacaccaagaucgaccucugguccuacaacgccgagcuccucgucgcccucgagaaccagcacaccaucgaccucaccgacuccgagaugaacaagcucuucgagaagaccaagaagcagcuccgcgagaacgccgaggacaugggcaacggcugcuucaagaucuaccacaagugcgacaacgccugcaucggcuccauccgcaacggcaccuacgaccacaacgucuaccgcgacgaggcccucaacaaccgcuuccagaucaagggcgucgagcucaaguccggcuacaaggacuggauccucuggaucuccuucgccaucuccugcuuccuccucugcgucgcccuccucggcuucaucaugugggccugccagaagggcaacauccgcugcaacaucugcaucuga

SEQ ID NO: 107592 - RNA, 1701 nt, Artificial Sequence
  derived and/or modified CDS sequence (opt2) from hemagglutinin__InfluenzaA__AHL97673
augaagaccaccaucgcccucuccuacauccucugccucgucuucgcccaggagcuccccggcaacgacgacuccaccgccacccucugccucggccaccacgccguccccaacggcaccaucgucaagaccaucaccaacgaccagaucgaggucaccaacgccaccgagcucguccaguccuccuccaccggcgagaucugcaacuccccccaccagauccucgacggcgagaacugcacccucaucgacgcccuccucggcgacccccagugcgacggcuuccagaacaagaagugggaccucuucgucgagcgcuccaaggcccacuccaacugcuaccccuacgacguccccgacuacgccucccuccgcucccucgucgccuccuccggcacccucgaguucaacaacgaguccuucaacuggaccggcgucacccagaacggcaccuccuccgccugcauccgccgcuccaacaacuccuucuucucccgccucaacuggcucacccaccucaacuucaaguaccccgcccucaacgucaccaugcccaacaacgagcaguucgacaagcucuacaucuggggcguccaccaccccggcaccgacaaggaccagaucuuccucuacgcccaggccuccggccgcaucaccgucuccaccaagcgcucccagcaggccgucauccccaacaucggcucccgcccccgcguccgcaacauccccucccgcgucuccaucuacuggaccaucgucaagcccggcgacauccuccucaucaacuccaccggcaaccucaucgccccccgcggcuacuucaagauccgcuccggcaaguccuccaucaugcgcuccgacgcccccaucggcaagugcaacuccgccugcaucacccccaacggcuccauccccaacgacaagcccuuccagaacgucaaccgcaucaccuacggcgccugcccccgcuacgucaagcagaacacccucaagcucgccaccggcaugcgcaacguccccgagaagcagacccgcggcaucuucggcgccaucgccggcuucaucgagaacggcugggagggcauggucgacggcugguacggcuuccgccaccagaacuccgagggccgcggccaggccgccgaccucaaguccacccaggccgccaucgaccagaucaacggcaagcucaaccgccucaucggcaagaccaacgagaaguuccaccagaucgagaaggaguucuccgaggucgagggccgcauccaggaccucgagaaguacgucgaggacaccaagaucgaccucugguccuacaacgccgagcuccucgucgcccucgagaaccagcacaccaucgaccucaccgacuccgagaugaacaagcucuucgagaagaccaagaagcagcuccgcgagaacgccgaggacaugggcaacggcugcuucaagaucuaccacaagugcgacaacgccugcaucggcuccauccgcaacggcaccuacgaccacgacgucuaccgcgacgaggcccucaacaaccgcuuccagaucaagggcgucgagcucaaguccggcuacaaggacuggauccucuggaucuccuucgccaucuccugcuuccuccucugcgucgcccuccucggcuucaucaugugggccugccagaagggcaacauccgcugcaacaucugcaucuga

SEQ ID NO: 107593 - RNA, 1701 nt, Artificial Sequence; identical to SEQ ID NO: 106030
  derived and/or modified CDS sequence (opt2) from hemagglutinin__InfluenzaA__AHL97685

SEQ ID NO: 107594 - RNA, 1701 nt, Artificial Sequence
  derived and/or modified CDS sequence (opt2) from hemagglutinin__InfluenzaA__AHL97697
augaagaccaucaucgcccucuccuacauccucugccucgucuucgcccagaagcuccccggcaacgacaacuccaccgccacccucugccucggccaccacgccguccccaacggcaccaucgucaagaccaucaccaacgaccgcaucgaggucaccaacgccaccgagcucguccagaacuccuccaucggcgagaucugcgacuccccccaccagauccucgacggcgagaacugcacccucaucgacgcccuccucggcgacccccagugcgacggcuuccagaacaagaagugggaccucuucgucgagcgcggcaaggccuacuccaacugcuaccccuacgacguccccgacuacgccucccuccgcucccucgucgccuccuccggcacccucgaguucaacaacgaguccuucaacugggccggcgucacccagaacggcaccuccuccgccugcauccgcggcuccaacuccuccuucuucucccgccucaacuggcucacccaccucaacuucaaguaccccgcccucaacgucaccaugcccaacaacgagcaguucgacaagcucuacaucuggggcguccaccaccccggcaccgacaaggaccagaucuuccucuacgcccaguccuccggccgcaucaccgucuccaccaagcgcucccagcaggccgucauccccaacaucggcucccgcccccgcauccgcaacauccccucccgcaucuccaucuacuggaccaucgucaagcccggcgacauccuccucaucaacuccaccggcaaccucaucgccccccgcggcuacuucaagauccgcuccggcaaguccuccaucaugcgcuccgacgcccccaucggcaagugcaaguccgagugcaucacccccaacggcuccauccccaacgacaagcccuuccagaacgucaaccgcaucaccuacggcgccugcccccgcuacgucaagcaguccacccucaagcucgccaccggcaugcgcaacguccccgagaagcagacccgcggcaucuucggcgccaucgccggcuucaucgagaacggcugggagggcauggucgacggcugguacggcuuccgccaccagaacuccgagggccgcggccaggccgccgaccucaaguccacccaggccgccaucgaccagaucaacggcaagcucaaccgccucaucggcaagaccaacgagaaguuccaccagaucgagaaggaguucuccgaggucgagggccgcauccaggaccucgagaaguacgucgaggacaccaagaucgaccucugguccuacaacgccgagcuccucgucgcccucgagaaccagcacaccaucgaccucaccgacuccgagaugaacaagcucuucgagaagaccaagaagcagcuccgcgagaacgccgaggacaugggcaacggcugcuucaagaucuaccacaagugcgacaacgccugcaucggcuccauccgcaacggcaccuacgaccacgacgucuaccgcgacgaggcccucaacaaccgcuuccagaucaagggcgucgagcucaaguccggcuacaaggacuggauccucuggaucuccuucgccaucuccugcuuccuccucugcgucgcccuccucggcuucaucaugugggccugccagaagggcaacauccgcugcaacaucugcaucuga

SEQ ID NO: 107595 - RNA, 1701 nt, Artificial Sequence; identical to SEQ ID NO: 105904
  derived and/or modified CDS sequence (opt2) from hemagglutinin__InfluenzaA__AHL97709

SEQ ID NO: 107596 - RNA, 1701 nt, Artificial Sequence; identical to SEQ ID NO: 106030
  derived and/or modified CDS sequence (opt2) from hemagglutinin__InfluenzaA__AHL97721

SEQ ID NO: 107597 - RNA, 1701 nt, Artificial Sequence; identical to SEQ ID NO: 105904
  derived and/or modified CDS sequence (opt2) from hemagglutinin__InfluenzaA__AHL97733

SEQ ID NO: 107598 - RNA, 1701 nt, Artificial Sequence; identical to SEQ ID NO: 105894
  derived and/or modified CDS sequence (opt2) from hemagglutinin__InfluenzaA__AHL97745

SEQ ID NO: 107599 - RNA, 1701 nt, Artificial Sequence; identical to SEQ ID NO: 106030
  derived and/or modified CDS sequence (opt2) from hemagglutinin__InfluenzaA__AHL97757

SEQ ID NO: 107600 - RNA, 1701 nt, Artificial Sequence; identical to SEQ ID NO: 106030
  derived and/or modified CDS sequence (opt2) from hemagglutinin__InfluenzaA__AHL97769

SEQ ID NO: 107601 - RNA, 1701 nt, Artificial Sequence
  derived and/or modified CDS sequence (opt2) from hemagglutinin__InfluenzaA__AHL97781
augaagaccaucaucgcccucuccuacauccucugccucgucuucgcccaggagcuccccggcaacgacgacuccaccgccacccucugccucggccaccacgccguccccaacggcaccaucgucaagaccaucaccaacgaccagaucgaggucaccaacgccaccgagcucguccaguccuccuccaccggcgagaucugcaacuccccccaccagauccucgacggcgagaacugcacccucaucgacgcccuccucggcgacccccagugcgacggcuuccagaacaagaagugggaccucuucgucgagcgcuccaaggcccacuccaacugcuaccccuacgacguccccgacuacgccucccuccgcucccucgucgccuccuccggcacccucgaguucaacaacgaguccuucaacuggaccggcgucacccagaacggcaccuccuccgccugcauccgccgcuccaacaacuccuucuucucccgccucaacuggcucacccaccucaacuucaaguaccccgcccucaacgucaccaugcccaacaacgagcaguucgacaagcucuacaucuggggcguccaccaccccggcaccgacaaggaccagaucuuccucuacgcccaggccuccggccgcaucaccgucuccaccaagcgcucccagcaggccgucauccccaacaucggcucccgcccccgcguccgcaacauccccucccgcgucuccaucuacuggaccaucgucaagcccggcgacauccuccucaucaacuccaccggcaaccucaucgccccccgcggcuacuucaagauccgcuccggcaacuccuccaucaugcgcuccgacgcccccaucggcaagugcaacuccaccugcaucacccccaacggcuccauccccaacgacaagcccuuccagaacgucaaccgcaucaccuacggcgccugcccccgcuacgucaagcagaacacccucaagcucgccaccggcaugcgcaacguccccgagaagcagacccgcggcaucuucggcgccaucgccggcuucaucgagaacggcugggagggcauggucgacggcugguacggcuuccgccaccagaacuccgagggccgcggccaggccgccgaccucaaguccacccaggccgccaucgaccagaucaacggcaagcucaaccgccucaucggcaagaccaacgagaaguuccaccagaucgagaaggaguucuccgaggucgagggccgcauccaggaccucgagaaguacgucgaggacaccaagaucgaccucugguccuacaacgccgagcuccucgucgcccucgagaaccagcacaccaucgaccucaccgacuccgagaugaacaagcucuucgagaagaccaagaagcagcuccgcgagaacgccgaggacaugggcaacggcugcuucaagaucuaccacaagugcgacaacgccugcaucggcuccauccgcaacggcaccuacgaccacgacgucuaccgcgacgaggcccucaacaaccgcuuccagaucaagggcgucgagcucaaguccggcuacaaggacuggauccucuggaucuccuucgccaucuccugcuuccuccucugcgucgcccuccucggcuucaucaugugggccugccagaagggcaacauccgcugcaacaucugcaucuga

SEQ ID NO: 107602 - RNA, 1701 nt, Artificial Sequence; identical to SEQ ID NO: 106030
  derived and/or modified CDS sequence (opt2) from hemagglutinin__InfluenzaA__AHL97793

SEQ ID NO: 107603 - RNA, 1701 nt, Artificial Sequence
  derived and/or modified CDS sequence (opt2) from hemagglutinin__InfluenzaA__AHL97805
augaagaccaucaucgcccucuccuacauccucugccucgucuucgcccagaagcuccccggcaacgacaacuccaccgccacccucugccucggccaccacgccguccccaacggcaccaucgucaagaccaucaccaacgaccgcaucgaggucaccaacgccaccgagcucguccagaacuccuccaucggcgagaucugcgacuccccccaccagauccucgacggcgagaacugcacccucaucgacgcccuccucggcgacccccagugcgacggcuuccagaacaagaagugggaccucuucgucgagcgcuccaaggccuacuccaacugcuaccccuacgacguccccgacuacgccucccuccgcucccucgucgccuccuccggcacccucgaguucaacaacgaguccuucaacugggccggcgucacccagaacggcaccuccuccgccugcauccgcggcuccaacuccuccuucuucucccgccucaacuggcucacccaccucaacuucaaguaccccgcccucaacgucaccaugcccaacaacgagcaguucgacaagcucuacaucuggggcguccaccaccccggcaccgacaaggaccagaucuuccucuacgcccaguccuccggccgcaucaccgucuccaccaagcgcucccagcaggccgucauccccaacaucggcucccgcccccgcauccgcaacauccccucccgcaucuccaucuacuggaccaucgucaagcccggcgacauccuccucaucaacuccaccggcaaccucaucgccccccgcggcuacuucaagauccgcuccggcaaguccuccaucaugcgcuccgacgcccccaucggcaagugcaaguccgagugcaucacccccaacggcuccauccccaacgacaagcccuuccagaacgucaaccgcaucaccuacggcgccugcccccgcuacgucaagcaguccacccucaagcucgccaccggcaugcgcaacguccccgagaagcagacccgcggcaucuucggcgccaucgccggcuucaucgagaacggcugggagggcauggucgacggcugguacggcuuccgccaccagaacuacgagggccgcggccaggccgccgaccucaaguccacccaggccgccaucgaccagaucaacggcaagcucaaccgccucaucggcaagaccaacgagaaguuccaccagaucgagaaggaguucuccgaggucgagggccgcauccaggaccucgagaaguacgucgaggacaccaagaucgaccucugguccuacaacgccgagcuccucgucgcccucgagaaccagcacaccaucgaccucaccgacuccgagaugaacaagcucuucgagaagaccaagaagcagcuccgcgagaacgccgaggacaugggcaacggcugcuucaagaucuaccacaagugcgacaacgccugcaucggcuccauccgcaacggcaccuacgaccacgacgucuaccgcgacgaggcccucaacaaccgcuuccagaucaagggcgucgagcucaaguccggcuacaaggacuggauccucuggaucuccuucgccaucuccugcuuccuccucugcgucgcccuccucggcuucaucaugugggccugccagaagggcaacauccgcugcaacaucugcaucuga

SEQ ID NO: 107604 - RNA, 1701 nt, Artificial Sequence; identical to SEQ ID NO: 105904
  derived and/or modified CDS sequence (opt2) from hemagglutinin__InfluenzaA__AHL97817

SEQ ID NO: 107605 - RNA, 1701 nt, Artificial Sequence; identical to SEQ ID NO: 107594
  derived and/or modified CDS sequence (opt2) from hemagglutinin__InfluenzaA__AHL97829

SEQ ID NO: 107606 - RNA, 1701 nt, Artificial Sequence; identical to SEQ ID NO: 106030
  derived and/or modified CDS sequence (opt2) from hemagglutinin__InfluenzaA__AHL97841

SEQ ID NO: 107607 - RNA, 1701 nt, Artificial Sequence; identical to SEQ ID NO: 106030
  derived and/or modified CDS sequence (opt2) from hemagglutinin__InfluenzaA__AHL97853

SEQ ID NO: 107608 - RNA, 1701 nt, Artificial Sequence; identical to SEQ ID NO: 106030
  derived and/or modified CDS sequence (opt2) from hemagglutinin__InfluenzaA__AHL97865

SEQ ID NO: 107609 - RNA, 1701 nt, Artificial Sequence; identical to SEQ ID NO: 106030
  derived and/or modified CDS sequence (opt2) from hemagglutinin__InfluenzaA__AHL97877

SEQ ID NO: 107610 - RNA, 1701 nt, Artificial Sequence; identical to SEQ ID NO: 105904
  derived and/or modified CDS sequence (opt2) from hemagglutinin__InfluenzaA__AHL97889

SEQ ID NO: 107611 - RNA, 1701 nt, Artificial Sequence; identical to SEQ ID NO: 105904
  derived and/or modified CDS sequence (opt2) from hemagglutinin__InfluenzaA__AHL97901

SEQ ID NO: 107612 - RNA, 1701 nt, Artificial Sequence; identical to SEQ ID NO: 105894
  derived and/or modified CDS sequence (opt2) from hemagglutinin__InfluenzaA__AHL97913

SEQ ID NO: 107613 - RNA, 1701 nt, Artificial Sequence
  derived and/or modified CDS sequence (opt2) from hemagglutinin__InfluenzaA__AHL97925
augaagaccaucaucgcccucuccuacauccucugccucgucuucgcccagaagcuccccggcaacgacaacuccaccgccacccucugccucggccaccacgccguccccaacggcaccaucgucaagaccaucaccaacgaccgcaucgaggucaccaacgccaccgagcucguccagaacuccuccaucggcgagaucugcgacuccccccaccagauccucgacggcgagaacugcacccucaucgacgcccuccucggcgacccccagugcgacggcuuccagaacaagaagugggaccucuucgucgagcgcuccaaggccuacuccaacugcuaccccuacgacguccccgacuacgccucccuccgcucccucgucgccuccuccggcacccucgaguucaacaacgaguccuucaacuggaccggcgucacccagaacggcaccuccuccgccugcauccgccgcuccaacaacuccuucuucucccgccucaacuggcucacccacuccaacuucaaguaccccgcccucaacgucaccaugcccaacaacgagcaguucgacaagcucuacaucuggggcguccaccaccccggcaccgacaaggaccagaucuuccucuacgcccaguccuccggccgcaucaccgucuccaccaagcgcucccagcaggccgucauccccaacaucggcucccgcccccgcauccgcaacauccccucccgcaucuccaucuacuggaccaucgucaagcccggcgacauccuccucaucaacuccaccggcaaccucaucgccccccgcggcuacuucaagauccgcuccggcaaguccuccaucaugcgcuccgacgcccccaucggcaagugcaaguccgagugcaucacccccaacggcuccauccccaacgacaagcccuuccagaacgucaaccgcaucaccuacggcgccugcccccgcuacgucaagcaguccacccucaagcucgccaccggcaugcgcaacguccccgagaagcagacccgcggcaucuucggcgccaucgccggcuucaucgagaacggcugggagggcaugauggacggcugguacggcuuccgccaccagaacuccgagggccgcggccaggccgccgaccucaaguccacccaggccgccaucgaccagaucaacggcaagcucaaccgccucaucggcaagaccaacgagaaguuccaccagaucgagaaggaguucuccgaggucgagggccgcauccaggaccucgagaaguacgucgaggacaccaagaucgaccucugguccuacaacgccgagcuccucgucgcccucgagaaccagcacaccaucgaccucaccgacuccgagaugaacaagcucuucgagaagaccaagaagcuccuccgcgagaacgccgaggacaugggcaacggcugcuucaagaucuaccacaagugcgacaacgccugcaucggcuccauccgcaacggcaccuacgaccacgacgucuaccgcgacgaggcccucaacaaccgcuuccagaucaagggcgucgagcucaaguccggcuacaaggacuggauccucuggaucuccuucgccaucuccugcuuccuccucugcgucgcccuccucggcuucaucaugugggccugccagaagggcaacauccgcugcaacaucugcaucuga

SEQ ID NO: 107614 - RNA, 1701 nt, Artificial Sequence; identical to SEQ ID NO: 105894
  derived and/or modified CDS sequence (opt2) from hemagglutinin__InfluenzaA__AHL97937

SEQ ID NO: 107615 - RNA, 1701 nt, Artificial Sequence; identical to SEQ ID NO: 107574
  derived and/or modified CDS sequence (opt2) from hemagglutinin__InfluenzaA__AHL97949

SEQ ID NO: 107616 - RNA, 1701 nt, Artificial Sequence; identical to SEQ ID NO: 105904
  derived and/or modified CDS sequence (opt2) from hemagglutinin__InfluenzaA__AHL97961

SEQ ID NO: 107617 - RNA, 1701 nt, Artificial Sequence; identical to SEQ ID NO: 105904
  derived and/or modified CDS sequence (opt2) from hemagglutinin__InfluenzaA__AHL97973

SEQ ID NO: 107618 - RNA, 1701 nt, Artificial Sequence; identical to SEQ ID NO: 105904
  derived and/or modified CDS sequence (opt2) from hemagglutinin__InfluenzaA__AHL97985

SEQ ID NO: 107619 - RNA, 1701 nt, Artificial Sequence
  derived and/or modified CDS sequence (opt2) from hemagglutinin__InfluenzaA__AHL97997
augaagaccaucaucgcccucuccuacauccucugccucgucuucgcccagaagcuccccggcaacgacaacuccaccgccacccucugccucggccaccacgccguccccaacggcaccaucgucaagaccaucaccaacgaccgcaucgaggucaccaacgccaccgagcucguccagaacuccuccaucggcgagaucugcgacuccccccaccagauccucgacggcgagaacugcacccucaucgacgcccuccucggcgacccccagugcgacggcuuccagaacaagaagugggaccucuucgucgagcgcuccaaggccuacuccaacugcuaccccuacgacguccccgacuacgccucccuccgcucccucgucgccuccuccggcacccucgaguucaacaacgaguccuucaacuggaccggcgucacccagaacggcaccuccuccgccugcauccgccgcuccaacuccuccuucuucucccgccucaacuggcucacccaccucaacuucaaguaccccgcccucaacgucaccaugcccaacaacgagcaguucgacaagcucuacaucuggggcguccaccaccccggcaccgacaaggaccagaucuuccucuacgcccaguccuccggccgcaucaccgucuccaccaagcgcucccagcaggccgucauccccaacaucggcucccgcccccgcauccgcaacauccccucccgcaucuccaucuacuggaccaucgucaagcccggcgacauccuccucaucaacuccaccggcaaccucaucgccccccgcggcuacuucaagauccgcuccggcaaguccuccaucaugcgcuccgacgcccccaucggcaagugcaaguccgagugcaucacccccaacggcuccauccccaacgacaagcccuuccagaacgucaaccgcaucaccuacggcgccugcccccgcuacgucaagcaguccacccucaagcucgccaccggcaugcgcaacguccccgagaagcagacccgcggcaucuucggcgccaucgccggcuucaucgagaacggcugggagggcauggucgacggcugguacggcuuccgccaccagaacuccgagggccgcggccaggccgccgaccucaaguccacccaggccgccaucgaccagaucaacggcaagcucaaccgccucaucggcaagaccaacgagaaguuccaccagaucgagaaggaguucuccgaggucgagggccgcauccaggaccucgagaaguacgucgaggacaccaagaucgaccucugguccuacaacgccgagcuccucgucgcccucgagaaccagcacaccaucgaccucaccgacuccgagaugaacaagcucuucgagaagaccaagaagcagcuccgcgagaacgccgaggacaugggcaacggcugcuucaagaucuaccacaagugcgacaacgccugcaucggcuccauccgcaacggcaccuacgaccacgacgucuaccgcgacgaggcccucaacaaccgcuuccagauccgcggcgucgagcucaaguccggcuacaaggacuggauccucuggaucuccuucgccaucuccugcuuccuccucugcgucgcccuccucggcuucaucaugugggccugccagaagggcaacauccgcugcaacaucugcaucuga

SEQ ID NO: 107620 - RNA, 1701 nt, Artificial Sequence; identical to SEQ ID NO: 106030
  derived and/or modified CDS sequence (opt2) from hemagglutinin__InfluenzaA__AHL98009

SEQ ID NO: 107621 - RNA, 1701 nt, Artificial Sequence
  derived and/or modified CDS sequence (opt2) from hemagglutinin__InfluenzaA__AHL98021
augaagaccaucaucgcccucuccuacauccucugccucgucuucgcccagaagcuccccggcaacgacaacuccaccgccacccucugccucggccaccacgccguccccaacggcaccaucgucaagaccaucaccaacgaccgcaucgaggucaccaacgccaccgagcucguccagaacuccuccaucggcaagaucugcgacuccccccaccagauccucgacggcgagaacugcacccucauggacgcccuccucggcgacccccagugcgacggcuuccagaacaagaagugggaccucuucgucgagcgcuccaaggccuacuccaacugcuaccccuacgacguccccgacuacgccucccuccgcucccucgucgccuccuccggcacccucgaguucaacaacgaguccuucaacugggccggcgucacccagaacggcaccuccuccgccugcauccgccgcuccaacuccuccuucuucucccgccucaacuggcucacccaccucaacuucaaguaccccgcccucaacgucaccaugcccaacaacgagcaguucgacaagcucuacaucuggggcguccaccaccccggcaccgacaaggaccagaucuuccucuacgcccaguccuccggccgcaucaccgucuccaccaagcgcucccagcaggccgucauccccaacaucggcucccgcccccgcauccgcaacauccccucccgcaucuccaucuacuggaccaucgucaagcccggcgacauccuccucaucaacuccaccggcaaccucaucgccccccgcggcuacuucaagauccgcuccggcaaguccuccaucaugcgcuccgacgcccccaucggcaagugcaaguccgagugcaucacccccaacggcuccauccccaacgacaagcccuuccagaacgucaaccgcaucaccuacggcgccugcccccgcuacgucaagcaguccacccucaagcucgccaccggcaugcgcaacguccccgagaagcagacccgcggcaucuucggcgccaucgccggcuucaucgagaacggcugggagggcaugauggacggcugguacggcuuccgccaccagaacuccgagggccgcggccaggccgccgaccucaaguccacccaggccgccaucgaccagaucaacggcaagcucaaccgccucaucggcaagaccaacgagaaguuccaccagaucgagaaggaguucuccgaggucgagggccgcauccaggaccucgagaaguacgucgaggacaccaagaucgaccucugguccuacaacgccgagcuccucgucgcccucgagaaccagcacaccaucgaccucaccgacuccgagaugaacaagcucuucgagaagaccaagaagcagcuccgcgagaacgccgaggacaugggcaacggcugcuucaagaucuaccacaagugcgacaacgccugcaucggcuccauccgcaacggcaccuacgaccacaacgucuaccgcgacgaggcccucaacaaccgcuuccagaucaagggcgucgagcucaaguccggcuacaaggacuggauccucuggaucuccuucgccaucuccugcuuccuccucugcgucgcccuccucggcuucaucaugugggccugccagaagggcaacauccgcugcaacaucugcaucuga

SEQ ID NO: 107622 - RNA, 1701 nt, Artificial Sequence; identical to SEQ ID NO: 105904
  derived and/or modified CDS sequence (opt2) from hemagglutinin__InfluenzaA__AHL98033

SEQ ID NO: 107623 - RNA, 1701 nt, Artificial Sequence; identical to SEQ ID NO: 107501
  derived and/or modified CDS sequence (opt2) from hemagglutinin__InfluenzaA__AHL98045

SEQ ID NO: 107624 - RNA, 1701 nt, Artificial Sequence; identical to SEQ ID NO: 107501
  derived and/or modified CDS sequence (opt2) from hemagglutinin__InfluenzaA__AHL98057

SEQ ID NO: 107625 - RNA, 1701 nt, Artificial Sequence; identical to SEQ ID NO: 107501
  derived and/or modified CDS sequence (opt2) from hemagglutinin__InfluenzaA__AHL98069

SEQ ID NO: 107626 - RNA, 1701 nt, Artificial Sequence
  derived and/or modified CDS sequence (opt2) from hemagglutinin__InfluenzaA__AHL98081
augaagaccaucaucgcccucuccuacauccucugccucgucuucgcccagaagcuccccggcaacgacaacuccaccgccacccucugccucggccaccacgccguccccaacggcaccaucgucaagaccaucaccaacgaccgcaucgaggucaccaacgccaccgagcucguccagaacuccuccaucggcgagaucugcgacuccccccaccagauccucgacggcgagaacugcacccucaucgacgcccuccucggcgacccccagugcgacggcuuccagaacaagaagugggaccucuucgucgagcgcuccaaggccuacuccaacugcuaccccuacgacguccccgacuacgccucccuccgcucccucgucgccuccuccggcacccucgaguucaacaacgaguccuucaacuggaccggcgucacccagaacggcaccuccuccgccugcauccgcaaguccaacuccuccuucuucucccgccucaacuggcucacccaccucaacuucaaguaccccgcccucaacgucaccaugcccaacaacgagcaguucgacaagcucuacaucuggggcguccaccaccccggcaccgacaaggaccagaucuuccucuacgcccaguccuccggccgcaucaccgucuccacccagcgcucccagcaggccgucauccccaacaucggcucccgcccccgcauccgcaacauccccucccgcaucuccaucuacuggaccaucgucaagcccggcgacauccuccucaucaacuccaccggcaaccucaucgccccccgcggcuacuucaagauccgcuccggcaaguccuccaucaugcgcuccgacgcccccaucggcaagugcaaguccgagugcaucacccccaacggcuccauccccaacgacaagcccuuccagaacgucaaccgcaucaccuacggcgccugcccccgcuacgucaagcaguccacccucaagcucgccaccggcaugcgcaacguccccgagaagcagacccgcggcaucuucggcgccaucgccggcuucaucgagaacggcugggagggcauggucgacggcugguacggcuuccgccaccagaacuccgagggccgcggccaggccgccgaccucaaguccacccaggccgccaucgaccagaucaacggcaagcucaaccgccucgucggcaagaccaacgagaaguuccaccagaucgagaaggaguucuccgaggucgagggccgcauccaggaccucgagaaguacgucgaggacaccaagaucgaccucugguccuacaacgccgagcuccucgucgcccucgagaaccagcacaccaucgaccucaccgacuccgagaugaacaagcucuucgagaagaccaagaagcagcuccgcgagaacgccgaggacaugggcaacggcugcuucaagaucuaccacaagugcgacaacgccugcaucggcuccauccgcaacggcaccuacgaccacgacgucuaccgcgacgaggcccucaacaaccgcuuccagaucaagggcgucgagcucaaguccggcuacaaggacuggauccucuggaucuccuucgccaucuccugcuuccuccucugcgucgcccuccucggcuucaucaugugggccugccagaagggcaacauccgcugcaacaucugcaucuga

SEQ ID NO: 107627 - RNA, 1701 nt, Artificial Sequence; identical to SEQ ID NO: 105894
  derived and/or modified CDS sequence (opt2) from hemagglutinin__InfluenzaA__AHL98093

SEQ ID NO: 107628 - RNA, 1701 nt, Artificial Sequence
  derived and/or modified CDS sequence (opt2) from hemagglutinin__InfluenzaA__AHL98105
augaaggccauccucgucgucaugcucuacaccuucgccaccgccaacgccgacacccucugcaucggcuaccacgccaacaacuccaccgacaccgucgacaccguccucgagaagaacgucaccgucacccacuccgucaaccuccucgaggacaagcacaacggcaagcucugcaagcuccgcggcgucgccccccuccaccucggcaagugcaacaucgccggcuggauccucggcaaccccgagugcgagucccucuccaccgccuccuccugguccuacaucgucgagaccuccggcuccgacaacggcaccugcuaccccggcgacuucaucgacuacgaggagcuccgcgagcagcucuccuccgucuccuccuucgagcgcuucgagaucuuccccaagaccuccuccuggcccaaccacgacuccaacaagggcgucaccgccgccugcccccacgccggcgccaagggcuucuacaagaaccucaucuggcucgucaagaagggcaacuccuaccccaagcucuccaucuccuacaucaacgacaagggcaaggagguccucguccucuggggcauccaccaccccuccaccaccgccgaccagcagucccucuaccagaacgccgacaccuacgucuucgucggcgccucccgcuacuccaagaaguucaagcccgagaucgccauccgccccaagguccgcgaccaggagggccgcaugaacuacuacuggacccucgucgagcccggcgacaagaucaccuucgaggccaccggcaaccucgucgucccccgcuacgccuucgccauggagcgcaacgccggcuccggcaucaucaucuccgacacccccguccacgacugcaacaccaccugccagacccccaagggcgccaucaacaccucccuccccuuccagaacauccaccccaucaccaucggcaagugccccaaguacgucaaguccaccaagcuccgccucgccaccggccuccgcaacguccccuccauccagucccgcggccucuucggcgccaucgccggcuucaucgagggcggcuggaccggcauggucgacggcugguacggcuaccaccaccagaacgagcagggcuccggcuacgccgccgaccucaaguccacccagaacgccaucgacaagaucaccaacaaggucaacuccgucaucgagaagaugaacacccaguucaccgccgucggcaaggaguucaaccaccucgagaagcgcaucgagaaccucaacaagaaggucgacgacggcuuccucgacaucuggaccuacaacgccgagcuccucguccuccucgagaacgagcgcacccucgacuaccacgacuccaacgucaagaaccucuacgagaagguccgcaaccagcucaagaacaacgccaaggagaucggcaacggcugcuucgaguucuaccacaagugcgacaacaccugcauggaguccgucaagaacggcaccuacgacuaccccaaguacuccgaggaggccaagcucaaccgcgaggagaucgacggcgucaagcucgaguccacccgcaucuaccagauccucgccaucuacuccaccgccgccuccucccucguccucgucgucucccucggcgccaucuccuucuggaugugcuccaacggcucccuccagugccgcaucugcaucuga

SEQ ID NO: 107629 - RNA, 1701 nt, Artificial Sequence; identical to SEQ ID NO: 105894
  derived and/or modified CDS sequence (opt2) from hemagglutinin__InfluenzaA__AHL98116

SEQ ID NO: 107630 - RNA, 1701 nt, Artificial Sequence; identical to SEQ ID NO: 105904
  derived and/or modified CDS sequence (opt2) from hemagglutinin__InfluenzaA__AHL98128

SEQ ID NO: 107631 - RNA, 1701 nt, Artificial Sequence; identical to SEQ ID NO: 105894
  derived and/or modified CDS sequence (opt2) from hemagglutinin__InfluenzaA__AHL98140

SEQ ID NO: 107632 - RNA, 1701 nt, Artificial Sequence; identical to SEQ ID NO: 105894
  derived and/or modified CDS sequence (opt2) from hemagglutinin__InfluenzaA__AHL98152

SEQ ID NO: 107633 - RNA, 1701 nt, Artificial Sequence; identical to SEQ ID NO: 105904
  derived and/or modified CDS sequence (opt2) from hemagglutinin__InfluenzaA__AHL98164

SEQ ID NO: 107634 - RNA, 1701 nt, Artificial Sequence; identical to SEQ ID NO: 105904
  derived and/or modified CDS sequence (opt2) from hemagglutinin__InfluenzaA__AHL98176

SEQ ID NO: 107635 - RNA, 1701 nt, Artificial Sequence; identical to SEQ ID NO: 105894
  derived and/or modified CDS sequence (opt2) from hemagglutinin__InfluenzaA__AHL98188

SEQ ID NO: 107636 - RNA, 1701 nt, Artificial Sequence; identical to SEQ ID NO: 106059
  derived and/or modified CDS sequence (opt2) from hemagglutinin__InfluenzaA__AHL98200

SEQ ID NO: 107637 - RNA, 1701 nt, Artificial Sequence; identical to SEQ ID NO: 105894
  derived and/or modified CDS sequence (opt2) from hemagglutinin__InfluenzaA__AHL98212

SEQ ID NO: 107638 - RNA, 1701 nt, Artificial Sequence; identical to SEQ ID NO: 105894
  derived and/or modified CDS sequence (opt2) from hemagglutinin__InfluenzaA__AHL98224

SEQ ID NO: 107639 - RNA, 1701 nt, Artificial Sequence; identical to SEQ ID NO: 106030
  derived and/or modified CDS sequence (opt2) from hemagglutinin__InfluenzaA__AHL98236

SEQ ID NO: 107640 - RNA, 1701 nt, Artificial Sequence; identical to SEQ ID NO: 105904
  derived and/or modified CDS sequence (opt2) from hemagglutinin__InfluenzaA__AHL98248

SEQ ID NO: 107641 - RNA, 1701 nt, Artificial Sequence; identical to SEQ ID NO: 105894
  derived and/or modified CDS sequence (opt2) from hemagglutinin__InfluenzaA__AHL98260

SEQ ID NO: 107642 - RNA, 1701 nt, Artificial Sequence; identical to SEQ ID NO: 105904
  derived and/or modified CDS sequence (opt2) from hemagglutinin__InfluenzaA__AHL98272

SEQ ID NO: 107643 - RNA, 1701 nt, Artificial Sequence; identical to SEQ ID NO: 107500
  derived and/or modified CDS sequence (opt2) from hemagglutinin__InfluenzaA__AHL98284

SEQ ID NO: 107644 - RNA, 1701 nt, Artificial Sequence
  derived and/or modified CDS sequence (opt2) from hemagglutinin__InfluenzaA__AHL98295
augaagaccaucaucgcccucuccuacauccucugccucgucuucgcccagaagauccccggcaacgacaacuccaccgccacccucugccucggccaccacgccguccccaacggcaccaucgucaagaccaucaccaacgaccgcaucgaggucaccaacgccaccgagcucguccagaacuccuccaucggcgagaucugcgacuccccccaccagauccucgacggcgagaacugcacccucaucgacgcccuccucggcgacccccagugcgacggcuuccagaacaagaagugggaccucuucgucgagcgcuccaaggccuacuccaacugcuaccccuacgacguccccgacuacgccucccuccgcucccucgucgccuccuccggcacccucgaguucaacaacgaguccuucaacugggccggcgucacccagaacggcaccuccuccgccugcauccgcggcuccaacuccuccuucuucucccgccucaacuggcucacccaccucaacuucaaguaccccgcccucaacgucaccaugcccaacaacgagcaguucgacaagcucuacaucuggggcguccaccaccccggcaccgacaaggaccagaucuuccucuacgcccaguccuccggccgcaucaccgucuccaccaagcgcucccagcaggccgucauccccaacaucggcucccgcccccgcauccgcaacauccccucccgcaucuccaucuacuggaccaucgucaagcccggcgacauccuccucaucaacuccaccggcaaccucaucgccccccgcggcuacuucaagauccgcuccggcaaguccuccaucaugcgcuccgacgcccccaucggcaagugcaaguccgagugcaucacccccaacggcuccauccccaacgacaagcccuuccagaacgucaaccgcaucaccuacggcgccugcccccgcuacgucaagcaguccacccucaagcucgccaccggcaugcgcaacguccccgagaagcagacccgcggcaucuucggcgccaucgccggcuucaucgagaacggcugggagggcaugauggacggcugguacggcuuccgccaccagaacuccgagggccgcggccaggccgccgaccucaaguccacccaggccgccaucgaccagaucaacggcaagcucaaccgccucaucggcaagaccaacgagaaguuccaccagaucgagaaggaguucuccgaggucgagggccgcauccaggaccucgagaaguacgucgaggacaccaagaucgaccucugguccuacaacgccgagcuccucgucgcccucgagaaccagcacaccaucgaccucaccgacuccgagaugaacaagcucuucgagaagaccaagaagcagcuccgcgagaacgccgaggacaugggcaacggcugcuucaagaucuaccacaagugcgacaacgccugcaucggcuccauccgcaacggcaccuacgaccacgacgucuaccgcgacgaggcccucaacaaccgcuuccagaucaagggcgucgagcucaaguccggcuacaaggacuggauccucuggaucuccuucgccaucuccugcuuccuccucugcgucgcccuccucggcuucaucaugugggccugccagaagggcaacauccgcugcaacaucugcaucuga

SEQ ID NO: 107645 - RNA, 1701 nt, Artificial Sequence; identical to SEQ ID NO: 107542
  derived and/or modified CDS sequence (opt2) from hemagglutinin__InfluenzaA__AHL98307

SEQ ID NO: 107646 - RNA, 1701 nt, Artificial Sequence; identical to SEQ ID NO: 105904
  derived and/or modified CDS sequence (opt2) from hemagglutinin__InfluenzaA__AHL98319

SEQ ID NO: 107647 - RNA, 1701 nt, Artificial Sequence; identical to SEQ ID NO: 105904
  derived and/or modified CDS sequence (opt2) from hemagglutinin__InfluenzaA__AHL98331

SEQ ID NO: 107648 - RNA, 1701 nt, Artificial Sequence; identical to SEQ ID NO: 106030
  derived and/or modified CDS sequence (opt2) from hemagglutinin__InfluenzaA__AHL98343

SEQ ID NO: 107649 - RNA, 1701 nt, Artificial Sequence; identical to SEQ ID NO: 107542
  derived and/or modified CDS sequence (opt2) from hemagglutinin__InfluenzaA__AHL98354

SEQ ID NO: 107650 - RNA, 1701 nt, Artificial Sequence; identical to SEQ ID NO: 105894
  derived and/or modified CDS sequence (opt2) from hemagglutinin__InfluenzaA__AHL98366

SEQ ID NO: 107651 - RNA, 1701 nt, Artificial Sequence; identical to SEQ ID NO: 105894
  derived and/or modified CDS sequence (opt2) from hemagglutinin__InfluenzaA__AHL98378

SEQ ID NO: 107652 - RNA, 1701 nt, Artificial Sequence; identical to SEQ ID NO: 105894
  derived and/or modified CDS sequence (opt2) from hemagglutinin__InfluenzaA__AHL98390

SEQ ID NO: 107653 - RNA, 1701 nt, Artificial Sequence; identical to SEQ ID NO: 105894
  derived and/or modified CDS sequence (opt2) from hemagglutinin__InfluenzaA__AHL98402

SEQ ID NO: 107654 - RNA, 1701 nt, Artificial Sequence; identical to SEQ ID NO: 105904
  derived and/or modified CDS sequence (opt2) from hemagglutinin__InfluenzaA__AHL98414

SEQ ID NO: 107655 - RNA, 1701 nt, Artificial Sequence
  derived and/or modified CDS sequence (opt2) from hemagglutinin__InfluenzaA__AHL98426
augaagaccaucaucgcccucuccuacauccucugccucgucuucgcccagaagcuccccggcaacgacaacuccaccgccacccucugccucggccaccacgccguccccaacggcaccaucgucaagaccaucaccaacgaccgcaucgaggucaccaacgccaccgagcucguccagaacuccuccaucggcgagaucugcgacuccccccaccagauccucgacggcgagaacugcacccucaucgacgcccuccucggcgacccccagugcgacggcuuccagaacaagaagugggaccucuucgucgagcgcuccaaggccuacuccaacugcuaccccuacgacguccccgacuacgccucccuccgcucccucgucgccuccuccggcacccucgaguucaacaacgaguccuucaacuggaccggcgucacccagaacggcaccuccuccgccugcauccgccgcuccaacaacuccuucuucucccgccucaacuggcucacccacuccaacuucaaguaccccgcccucaacgucaccaugcccaacaacgagcaguucgacaagcucuacaucuggggcguccaccaccccggcaccgacaaggaccagaucuuccucuacgcccaguccuccggccgcaucaccgucuccaccaagcgcucccagcaggccgucauccccaacaucggcucccgcccccgcauccgcaacauccccucccgcaucuccaucuacuggaccaucgucaagcccggcgacauccuccucaucaacuccaccggcaaccucaucgccccccgcggcuacuucaagauccgcuccggcaaguccuccaucaugcgcuccgacgcccccaucggcaagugcaaguccgagugcaucacccccaacggcuccauccccaacgacaagcccuuccagaacgucaaccgcaucaccuacggcgccugcccccgcuacgucaagcaguccacccucaagcucgccaccggcaugcgcaacguccccgagaagcagacccgcggcaucuucggcgccaucgccggcuucaucgagaacggcugggagggcaugauggacggcugguacggcuuccgccaccagaacuccgagggccgcggccaggccgccgaccucaaguccacccaggccgccaucgaccagaucaacggcaagcucaaccgccucaucggcaagaccaacgagaaguuccaccagaucgagaaggaguucuccgaggucgagggccgcauccaggaccucgagaaguacgucgaggacaccaagaucgaccucugguccuacaacgccgagcuccucgucgcccucgagaaccagcacaccaucgaccucaccgacuccgagaugaacaagcucuucgagaagaccaagaagcagcuccgcgagaacgccgaggacaugggcaacggcugcuucaagaucuaccacaagugcgacaacgccugcaucggcuccauccgcaacggcaccuacgaccacgacgucuaccgcgacgaggcccucaacaaccgcuuccaggucaagggcgucgagcucaaguccggcuacaaggacuggauccucuggaucuccuucgccaucuccugcuuccuccucugcgucgcccuccucggcuucaucaugugggccugccagaagggcaacauccgcugcaacaucugcaucuga

SEQ ID NO: 107656 - RNA, 1701 nt, Artificial Sequence; identical to SEQ ID NO: 106076
  derived and/or modified CDS sequence (opt2) from hemagglutinin__InfluenzaA__AHL98438

SEQ ID NO: 107657 - RNA, 1701 nt, Artificial Sequence; identical to SEQ ID NO: 106076
  derived and/or modified CDS sequence (opt2) from hemagglutinin__InfluenzaA__AHL98449

SEQ ID NO: 107658 - RNA, 1701 nt, Artificial Sequence
  derived and/or modified CDS sequence (opt2) from hemagglutinin__InfluenzaA__AHL98471
augaaggccauccucgucguccuccucuacaccuucgccaccgccaacgccgacacccucugcaucggcuaccacgccaacaacuccaccgacaccgucgacaccguccucgagaagaacgucaccgucacccacuccgucaaccuccucgaggacaagcacaacggcaagcucugcaagcuccgcggcgucgccccccuccaccucggcaagugcaacaucgccggcuggauccucggcaaccccgagugcgagucccucuccaccgccuccuccugguccuacaucgucgagaccuccuccuccgacaacggcaccugcuaccccggcgacuucaucaacuacgaggagcuccgcgagcagcucuccuccgucuccuccuucgagaaguucgagaucuuccccaagaccuccuccuggcccaaccacgacuccaacaagggcgucaccgccgccugcccccacgccggcgccaaguccuucuacaagaaccucaucuggcucgucaagaagggcaacuccuaccccaagcuccgcgaguccuacaucaacgacaagggcaaggagguccucguccucuggggcauccaccaccccuccaccaccgccgaccagcagucccucuaccagaacgccgacgccuacgucuucgucggcaccucccgcuacuccaagaaguucaagcccgagaucgccauccgccccaagguccgcgaccaggagggccgcaugaacuacuacuggacccucaucgagcccggcgacaagaucaccuucgaggccaccggcaaccucgucgucccccgcuacgccuucgccauggagcgcaacgccggcuccggcaucaucaucuccgacacccccguccacgacugcaacaccaccugccagacccccgagggcgccaucaacaccucccuccccuuccagaacauccaccccaucaccaucggcaagugccccaaguacgucaaguccaccaagcuccgccucgccaccggccuccgcaacguccccuccauccagucccgcggccucuucggcgccaucgccggcuucaucgagggcggcuggaccggcauggucgacggcugguacggcuaccaccaccagaacgagcagggcuccggcuacgccgccgaccucaaguccacccagaacgccaucgacaagaucaccaacaaggucaacuccgucaucgagaagaugaacacccaguucaccgccgucggcaaggaguucaaccaccucgagaagcgcaucgagaaccucaacaagaaggucgacgacggcuuccucgacaucuggaccuacaacgccgagcuccucguccuccucgagaacgagcgcacccucgacuaccacgacuccaacgucaagaaccucuacgagaagguccgcaaccagcucaagaacaacgccaaggagaucggcaacggcugcuucgaguucuaccacaagugcgacaacaccugcauggaguccgucaagaacggcaccuacgacuaccccaaguacuccgaggaggccaagcucaaccgcgagaagaucgacggcgucaagcucgaguccacccgcaucuaccagauccucgccaucuacuccaccgucgccuccucccucguccucgucgucucccucggcgccaucuccuucuggaugugcuccaacggcucccuccagugccgcaucugcaucuga

SEQ ID NO: 107659 - RNA, 1701 nt, Artificial Sequence; identical to SEQ ID NO: 106030
  derived and/or modified CDS sequence (opt2) from hemagglutinin__InfluenzaA__AHL98482

SEQ ID NO: 107660 - RNA, 1701 nt, Artificial Sequence; identical to SEQ ID NO: 105871
  derived and/or modified CDS sequence (opt2) from hemagglutinin__InfluenzaA__AHL98494

SEQ ID NO: 107661 - RNA, 1701 nt, Artificial Sequence; identical to SEQ ID NO: 106030
  derived and/or modified CDS sequence (opt2) from hemagglutinin__InfluenzaA__AHL98506

SEQ ID NO: 107662 - RNA, 1701 nt, Artificial Sequence; identical to SEQ ID NO: 106030
  derived and/or modified CDS sequence (opt2) from hemagglutinin__InfluenzaA__AHL98518

SEQ ID NO: 107663 - RNA, 1701 nt, Artificial Sequence; identical to SEQ ID NO: 105871
  derived and/or modified CDS sequence (opt2) from hemagglutinin__InfluenzaA__AHL98530

SEQ ID NO: 107664 - RNA, 1701 nt, Artificial Sequence; identical to SEQ ID NO: 106030
  derived and/or modified CDS sequence (opt2) from hemagglutinin__InfluenzaA__AHL98542

SEQ ID NO: 107665 - RNA, 1701 nt, Artificial Sequence; identical to SEQ ID NO: 106030
  derived and/or modified CDS sequence (opt2) from hemagglutinin__InfluenzaA__AHL98554

SEQ ID NO: 107666 - RNA, 1701 nt, Artificial Sequence; identical to SEQ ID NO: 105904
  derived and/or modified CDS sequence (opt2) from hemagglutinin__InfluenzaA__AHL98566

SEQ ID NO: 107667 - RNA, 1701 nt, Artificial Sequence; identical to SEQ ID NO: 105904
  derived and/or modified CDS sequence (opt2) from hemagglutinin__InfluenzaA__AHL98578

SEQ ID NO: 107668 - RNA, 1701 nt, Artificial Sequence; identical to SEQ ID NO: 106030
  derived and/or modified CDS sequence (opt2) from hemagglutinin__InfluenzaA__AHL98590

SEQ ID NO: 107669 - RNA, 1701 nt, Artificial Sequence; identical to SEQ ID NO: 105894
  derived and/or modified CDS sequence (opt2) from hemagglutinin__InfluenzaA__AHL98602

SEQ ID NO: 107670 - RNA, 1701 nt, Artificial Sequence; identical to SEQ ID NO: 105871
  derived and/or modified CDS sequence (opt2) from hemagglutinin__InfluenzaA__AHL98614

SEQ ID NO: 107671 - RNA, 1701 nt, Artificial Sequence
  derived and/or modified CDS sequence (opt2) from hemagglutinin__InfluenzaA__AHL98626
augaagaccaucaucgcccucuccuacauccucugccucgucuucgcccaggagcuccccggcaacgacgacuccaccgccacccucugccucggccaccacgccguccccaacggcaccaucgucaagaccaucaccaacgaccagaucgaggucaccaacgccaccgagcucguccaguccuccuccaccggcgagaucugcaacuccccccaccagauccucgacggcgagaacugcacccucaucgacgcccuccucggcgacccccagugcgacggcuuccagaacaagcgcugggaccucuucgucgagcgcuccaaggcccacuccaacugcuaccccuacgacguccccgacuacgccucccuccgcucccucgucgccuccuccggcacccucgaguucaacaacgaguccuucaacuggaccggcgucacccagaacggcaccuccuccgccugcauccgccgcuccaacaacuccuucuucucccgccucaacuggcucacccaccucaacuucaaguaccccgcccucaacgucaccaugcccaacaacgagcaguucgacaagcucuacaucuggggcguccaccaccccggcaccgacaaggaccagaucuuccucuacgcccaggccuccggccgcaucaccgucuccaccaagcgcucccagcaggccgucauccccaacaucggcucccgcccccgcguccgcaacauccccucccgcgucuccaucuacuggaccaucgucaagcccggcgacauccuccucaucaacuccaccggcaaccucaucgccccccgcggcuacuucaagauccgcuccggcaaguccuccaucaugcgcuccgacgcccccaucggcaagugcaacuccgccugcaucacccccaacggcuccauccccaacgacaagcccuuccagaacgucaaccgcaucaccuacggcgccugcccccgcuacgucaagcagaacacccucaagcucgccaccggcaugcgcaacguccccgagaagcagacccgcggcaucuucggcgccaucgccggcuucaucgagaacggcugggagggcauggucgacggcugguacggcuuccgccaccagaacuccgagggccgcggccaggccgccgaccucaaguccacccaggccgccaucgaccagaucaacggcaagcucaaccgccucaucggcaagaccaacgagaaguuccaccagaucgagaaggaguucuccgaggucgagggccgcauccaggaccucgagaaguacgucgaggacaccaagaucgaccucugguccuacaacgccgagcuccucgucgcccucgagaaccagcacaccaucgaccucaccgacuccgagaugaacaagcucuucgagaagaccaagaagcagcuccgcgagaacgccgaggacaugggcaacggcugcuucaagaucuaccacaagugcgacaacgccugcaucggcuccauccgcaacggcaccuacgaccacgacgucuaccgcgacgaggcccucaacaaccgcuuccagaucaagggcgucgagcucaaguccggcuacaaggacuggauccucuggaucuccuucgccaucuccugcuuccuccucugcgucgcccuccucggcuucaucaugugggccugccagaagggcaacauccgcugcaacaucugcaucuga

SEQ ID NO: 107672 - RNA, 1701 nt, Artificial Sequence; identical to SEQ ID NO: 105894
  derived and/or modified CDS sequence (opt2) from hemagglutinin__InfluenzaA__AHL98638

SEQ ID NO: 107673 - RNA, 1701 nt, Artificial Sequence; identical to SEQ ID NO: 105904
  derived and/or modified CDS sequence (opt2) from hemagglutinin__InfluenzaA__AHL98650

SEQ ID NO: 107674 - RNA, 1701 nt, Artificial Sequence
  derived and/or modified CDS sequence (opt2) from hemagglutinin__InfluenzaA__AHL98662
augaagaccaucaucgcccucuccuacauccucugccucgucuucgcccagaagcuccccggcaacgacaacuccaccgccacccucugccucggccaccacgccguccccaacggcaccauggucaagaccaucaccaacgaccgcaucgaggucaccaacgccaccgagcucguccagaacuccuccaucggcgagaucugcgacuccccccaccagauccucgacggcgagaacugcacccucaucgacgcccuccucggcgacccccagugcgacggcuuccagaacaagaagugggaccucuucgucgagcgcuccaaggccuacuccaacugcuaccccuacgacguccccgacuacgccucccuccgcucccucgucgccuccuccggcacccucgaguucaacaacgaguccuucaacuggaccggcgucacccagaacggcaccuccuccgccugcauccgccgcuccaacaacuccuucuucucccgccucaacuggcucacccacuccaacuucaaguaccccgcccucaacgucaccaugcccaacaacgagcaguucgacaagcucuacaucuggggcguccaccaccccggcaccgacaaggaccagaucuuccucuacgcccaguccuccggccgcaucaccgucuccaccaagcgcucccagcaggccgucauccccaacaucggcucccgcccccgcauccgcaacauccccucccgcaucuccaucuacuggaccaucgucaagcccggcgacauccuccucaucaacuccaccggcaaccucaucgccccccgcggcuacuucaagauccgcuccggcaaguccuccaucaugcgcuccgacgcccccaucggcaagugcaaguccgagugcaucacccccaacggcuccauccccaacgacaagcccuuccagaacgucaaccgcaucaccuacggcgccugcccccgcuacgucaagcaguccacccucaagcucgccaccggcaugcgcaacguccccgagaagcagacccgcggcaucuucggcgccaucgccggcuucaucgagaacggcugggagggcaugauggacggcugguacggcuuccgccaccagaacuccgagggccgcggccaggccgccgaccucaaguccacccaggccgccaucgaccagaucaacggcaagcucaaccgccucaucggcaagaccaacgagaaguuccaccagaucgagaaggaguucuccgaggucgagggccgcauccaggaccucgagaaguacgucgaggacaccaagaucgaccucugguccuacaacgccgagcuccucgucgcccucgagaaccagcacaccaucgaccucaccgacuccgagaugaacaagcucuucgagaagaccaagaagcagcuccgcgagaacgccgaggacaugggcaacggcugcuucaagaucuaccacaagugcgacaacgccugcaucggcuccauccgcaacggcaccuacgaccacgacgucuaccgcgacgaggcccucaacaaccgcuuccagaucaagggcgucgagcucaaguccggcuacaaggacuggauccucuggaucuccuucgccaucuccugcuuccuccucugcgucgcccuccucggcuucaucaugugggccugccagaagggcaacauccgcugcaacaucugcaucuga

SEQ ID NO: 107675 - RNA, 1701 nt, Artificial Sequence; identical to SEQ ID NO: 107542
  derived and/or modified CDS sequence (opt2) from hemagglutinin__InfluenzaA__AHL98674

SEQ ID NO: 107676 - RNA, 1701 nt, Artificial Sequence; identical to SEQ ID NO: 105894
  derived and/or modified CDS sequence (opt2) from hemagglutinin__InfluenzaA__AHL98686

SEQ ID NO: 107677 - RNA, 1701 nt, Artificial Sequence; identical to SEQ ID NO: 106030
  derived and/or modified CDS sequence (opt2) from hemagglutinin__InfluenzaA__AHL98699

SEQ ID NO: 107678 - RNA, 1701 nt, Artificial Sequence; identical to SEQ ID NO: 106159
  derived and/or modified CDS sequence (opt2) from hemagglutinin__InfluenzaA__AHL98711

SEQ ID NO: 107679 - RNA, 1701 nt, Artificial Sequence; identical to SEQ ID NO: 106503
  derived and/or modified CDS sequence (opt2) from hemagglutinin__InfluenzaA__AHL98722

SEQ ID NO: 107680 - RNA, 1701 nt, Artificial Sequence; identical to SEQ ID NO: 105904
  derived and/or modified CDS sequence (opt2) from hemagglutinin__InfluenzaA__AHL98734

SEQ ID NO: 107681 - RNA, 1701 nt, Artificial Sequence; identical to SEQ ID NO: 106030
  derived and/or modified CDS sequence (opt2) from hemagglutinin__InfluenzaA__AHL98746

SEQ ID NO: 107682 - RNA, 1701 nt, Artificial Sequence; identical to SEQ ID NO: 105904
  derived and/or modified CDS sequence (opt2) from hemagglutinin__InfluenzaA__AHL98758

SEQ ID NO: 107683 - RNA, 1701 nt, Artificial Sequence; identical to SEQ ID NO: 105894
  derived and/or modified CDS sequence (opt2) from hemagglutinin__InfluenzaA__AHL98770

SEQ ID NO: 107684 - RNA, 1701 nt, Artificial Sequence; identical to SEQ ID NO: 106033
  derived and/or modified CDS sequence (opt2) from hemagglutinin__InfluenzaA__AHL98782

SEQ ID NO: 107685 - RNA, 1701 nt, Artificial Sequence
  derived and/or modified CDS sequence (opt2) from hemagglutinin__InfluenzaA__AHL98794
augaagaccaucaucgcccucuccuacauccucugccucgucuucgcccagaagcuccccggcaacgacaacuccaccgccacccucugccucggccaccacgccguccccaacggcaccaucgucaagaccaucaccaacgaccgcaucgaggucaccaacgccaccgagcucguccagaacuccuccaucggcgagaucugcgacuccccccaccagauccucgacggcgagaacugcacccucaucgacgcccuccucggcgacccccagugcgacggcuuccagaacaagaagugggaccucuucgucgagcgcuccaaggccuacuccaacugcuaccccuacgacguccccgacuacgccucccuccgcucccucgucgccuccuccggcacccucgaguucaacaacgaguccuucaacugggccggcgucacccagaacggcaccuccuccgccugcauccgcggcuccaacuccuccuucuucucccgccucaacuggcucacccaccucaacuucaaguaccccgcccucaacgucaccaugcccaacaacgagcaguucgacaagcucuacaucuggggcguccaccaccccggcaccgacaaggaccagaucuuccucuacgcccaguccuccggccgcaucaccgucuccaccaagcgcucccagcaggccgucauccccaacaucggcucccgcccccgcauccgcaacauccccucccgcaucuccaucuacuggaccaucgucaagcccggcgacauccuccucaucaacuccaccggcaaccucaucgccccccgcggcuacuucaagauccgcuccggcaaguccuccaucaugcgcuccgacgcccccaucggcaagugccgcuccgagugcaucacccccaacggcuccauccccaacgacaagcccuuccagaacgucaaccgcaucaccuacggcgccugcccccgcuacgucaagcaguccacccucaagcucgccaccggcaugcgcaacguccccgagaagcagacccgcggcaucuucggcgccaucgccggcuucaucgagaacggcugggagggcauggucgacggcugguacggcuuccgccaccagaacuccgagggccgcggccaggccgccgaccucaaguccacccaggccgccaucgaccagaucaacggcaagcucaaccgccucaucggcaagaccaacgagaaguuccaccagaucgagaaggaguucuccgaggucgagggccgcauccaggaccucgagaaguacgucgaggacaccaagaucgaccucugguccuacaacgccgagcuccucgucgcccucgagaaccagcacaccaucgaccucaccgacuccgagaugaacaagcucuucgagaagaccaagaagcagcuccgcgagaacgccgaggacaugggcaacggcugcuucaagaucuaccacaagugcgacaacgccugcaucggcuccauccgcaacggcaccuacgaccacgacgucuaccgcgacgaggcccucaacaaccgcuuccagaucaagggcgucgagcucaaguccggcuacaaggacuggauccucuggaucuccuucgccaucuccugcuuccuccucugcgucgcccuccucggcuucaucaugugggccugccagaagggcaacauccgcugcaacaucugcaucuga

SEQ ID NO: 107686 - RNA, 1701 nt, Artificial Sequence
  derived and/or modified CDS sequence (opt2) from hemagglutinin__InfluenzaA__AHL98806
augaagaccaucaucgcccucuccuacauccucugccucgucuucgcccagaagcuccccggcaacgacaacuccaccgccacccucugccucggccaccacgccguccccaacggcaccaucgucaagaccaucaccaacgaccgcaucgaggucaccaacgccaccgagcucguccagaacuccuccaucggcgagaucugcgacuccccccaccagauccucgacggcgagaacugcacccucaucgacgcccuccucggcgacccccagugcgacggcuuccagaacaagaagugggaccucuucgucgagcgcuccaaggccuacuccaacugcuaccccuacgacguccccgacuacgccucccuccgcucccucgucgccuccuccggcacccucgaguucaacaacgaguccuucaacugggccggcgucacccagaacggcaccuccuccgccugcauccgcggcuccaacuccuccuucuucucccgccucaacuggcucacccaccucaacuucaaguaccccgcccucaacgucaccaugcccaacaacgagcaguucgacaagcucuacaucuggggcguccaccaccccggcaccgacaaggaccagaucuuccucuacgcccaguccuccggccgcaucaccgucuccaccaagcgcucccagcaggccgucauccccaacaucggcucccgcccccgcauccgcaacauccccucccgcaucuccaucuacuggaccaucgucaagcccggcgacauccuccucaucaacuccaccggcaaccucaucgccccccgcggcuacuucaagauccgcuccggcaaguccuccaucaugcgcuccgacgcccccaucggcaagugcaaguccgagugcaucacccccaacggcuccauccccaacgacaagcccuuccagaacgucaaccgcaucaccuacggcgccugcccccgcuacgucaagcaguccacccucaagcucgccaccggcaugcgcaacguccccgagaagcagacccgcggcaucuucggcgccaucgccggcuucaucgagaacggcugggagggcauggucgacggcugguacggcuuccgccaccagaacuccgagggccgcggccaggccgccgaccucaaguccacccagaccgccaucgaccagaucaacggcaagcucaaccgccucaucggcaagaccaacgagaaguuccaccagaucgagaaggaguucuccgaggucgagggccgcauccaggaccucgagaaguacgucgaggacaccaagaucgaccucugguccuacaacgccgagcuccucgucgcccucgagaaccagcacaccaucgaccucaccgacuccgagaugaacaagcucuucgagaagaccaagaagcagcuccgcgagaacgccgaggacaugggcaacggcugcuucaagaucuaccacaagugcgacaacgccugcaucggcuccauccgcaacggcaccuacgaccacgacgucuaccgcgacgaggcccucaacaaccgcuuccagaucaagggcgucgagcucaaguccggcuacaaggacuggauccucuggaucuccuucgccaucuccugcuuccuccucugcgucgcccuccucggcuucaucaugugggccugccagaagggcaacauccgcugcaacaucugcaucuga

SEQ ID NO: 107687 - RNA, 1701 nt, Artificial Sequence; identical to SEQ ID NO: 105894
  derived and/or modified CDS sequence (opt2) from hemagglutinin__InfluenzaA__AHL98818

SEQ ID NO: 107688 - RNA, 1701 nt, Artificial Sequence; identical to SEQ ID NO: 105904
  derived and/or modified CDS sequence (opt2) from hemagglutinin__InfluenzaA__AHL98830

SEQ ID NO: 107689 - RNA, 1701 nt, Artificial Sequence; identical to SEQ ID NO: 105894
  derived and/or modified CDS sequence (opt2) from hemagglutinin__InfluenzaA__AHL98842

SEQ ID NO: 107690 - RNA, 1701 nt, Artificial Sequence; identical to SEQ ID NO: 105894
  derived and/or modified CDS sequence (opt2) from hemagglutinin__InfluenzaA__AHL98854

SEQ ID NO: 107691 - RNA, 1701 nt, Artificial Sequence
  derived and/or modified CDS sequence (opt2) from hemagglutinin__InfluenzaA__AHL98878
augaagaccaucaucgcccucuccuacauccucugccucgucuucacccagaagcuccccggcaacgacaacuccaccgccacccucugccucggccaccacgccguccccaacggcaccaucgucaagaccaucaccaacgaccgcaucgaggucaccaacgccaccgagcucguccagaacuccuccaucggcgagaucugcgacuccccccaccagauccucgacggcgagaacugcacccucaucgacgcccuccucggcgacccccagugcgacggcuuccagaacaagaagugggaccucuucgucgagcgcuccaaggccuacuccaacugcuaccccuacgacguccccgacuacgccucccuccgcucccucgucgccuccuccggcacccucgaguucaacaacgaguccuucaacuggaccggcgucacccagaacggcaccuccuccgccugcauccgccgcuccaacuccuccuucuucucccgccucaacuggcucacccaccucaacuucaaguaccccgcccucaacgucaccaugcccaacaacgagcaguucgacaagcucuacaucuggggcguccaccaccccggcaccgacaaggaccagaucuuccucuacgcccaguccuccggccgcaucaccgucuccaccaagcgcucccagcaggccgucauccccaacaucggcucccgcccccgcauccgcaacauccccucccgcaucuccaucuacuggaccaucgucaagcccggcgacauccuccucaucaacuccaccggcaaccucaucgccccccgcggcuacuucaagauccgcuccggcaaguccuccaucaugcgcuccgacgcccccaucggcaagugcaaguccgagugcaucacccccaacggcuccauccccaacgacaagcccuuccagaacgucaaccgcaucaccuacggcgccugcccccgcuacgucaagcaguccacccucaagcucgccaccggcaugcgcaacguccccgagaagcagacccgcggcaucuucggcgccaucgccggcuucaucgagaacggcugggagggcauggucgacggcugguacggcuuccgccaccagaacuccgagggccgcggccaggccgccgaccucaaguccacccaggccgccaucgaccagaucaacggcaagcucaaccgccucaucggcaagaccaacgagaaguuccaccagaucgagaaggaguucuccgaggucgagggccgcauccaggaccucgagaaguacgucgaggacaccaagaucgaccucugguccuacaacgccgagcuccucgucgcccucgagaaccagcacaccaucgaccucaccgacuccgagaugaacaagcucuucgagaagaccaagaagcagcuccgcgagaacgccgaggacaugggcaacggcugcuucaagaucuaccacaagugcgacaacgccugcaucggcuccauccgcaacggcaccuacgaccacaacgucuaccgcgacgaggcccucaacaaccgcuuccagaucaagggcgucgagcucaaguccggcuacaaggacuggauccucuggaucuccuucgccaucuccugcuuccuccucugcgucgcccuccucggcuucaucaugugggccugccagaagggcaacauccgcugcaacaucugcaucuga

SEQ ID NO: 107692 - RNA, 1701 nt, Artificial Sequence
  derived and/or modified CDS sequence (opt2) from hemagglutinin__InfluenzaA__AHL98890
augaagaccaucaucgcccucuccuacauccucugccucgucuucgcccagaagcuccccggcaacgacaacuccaccgccacccucugccucggccaccacgccguccccaacggcaccaucgucaagaccaucaccaacgaccgcaucgaggucaccaacgccaccgagcucguccagaacuccuccaucggcgagaucugcgacuccccccaccagauccucgacggcgagaacugcacccucaucgacgcccuccucggcgacccccagugcgacggcuuccagaacaagaagugggaccucuucgucgagcgcuccaaggccuacuccaacugcuaccccuacgacguccccgacuacgccucccuccgcucccucgucgccuccuccggcacccucgaguucaacaacgaguccuucaacugggccggcgucacccagaacggcaccuccuccgccugcauccgcggcuccaacuccuccuucuucucccgccucaacuggcucacccaccucaacuucaaguaccccgcccucaacgucaccaugcccaacaacgagcaguucgacaagcucuacaucuggggcguccaccaccccggcaccgacaaggaccagaucuuccucuacgcccaguccuccggccgcaucaccgucuccaccaagcgcucccagcaggccgucauccccaacaucggcucccgcccccgcauccgcaacauccccucccgcaucuccaucuacuggaccaucgucaagcccggcgacauccuccucaucaacuccaccggcaaccucaucgccccccgcggcuacuucaagauccgcuccggcaaguccuccaucaugcgcuccgacgcccccaucggcaagugcaaguccgagugcaucacccccaacggcuccauccccaacgacaagcccuuccagaacgucaaccgcaucaccuacggcgccugcccccgcuacgucaagcaguccacccucaagcucgccaccggcaugcgcaacguccccgagaagcagacccgcggcaucuucggcgccaucgccggcuucaucgagaacggcugggagggcauggucgacggcugguacggcuuccgccaccagaacuccgagggccgcggccaggccgccgaccucaaguccacccaggccgccaucgaccagaucaacggcaagcucaaccgccucaucggcaagaccaacgagaaguuccaccagaucgagaaggaguucuccgaggucgagggccgcauccaggaccucgagaaguacgucgaggacaccaagaucgaccucugguccuacaacgccgagcuccucgucgcccucgagaaccagcacaccaucgaccucaccgacuccgagaugaacaagcucuucgagaagaccaagaagcagcuccgcgagaacgccgaggacaugggcaacggcugcuucaagaucuaccacaagugcgacaacgccugcaucggcuccauccgcaacggcaccuacgaccacgacgucuaccgcgacgaggcccucaacaaccgcuuccagaucaagggcgucgagcucaaguccggcuacaaggacuggauccucuggaucuccuucgccaucuccugccuccuccucugcgucgcccuccucggcuucaucaugugggccugccagaagggcaacauccgcugcaacaucugcaucuga

SEQ ID NO: 107693 - RNA, 1701 nt, Artificial Sequence
  derived and/or modified CDS sequence (opt2) from hemagglutinin__InfluenzaA__AHL98902
augaagaccaucaucgcccucuccuacauccucugccucgucuucgcccagaagcuccccggcaacgacaacuccaccgccacccucugccucggccaccacgccguccccaacggcaccgucgucaagaccaucaccaacgaccgcaucgaggucaccaacgccaccgagcucguccagaacuccuccaucggcgagaucugcgacuccccccaccagauccucgacggcgagaacugcacccucaucgacgcccuccucggcgacccccagugcgacggcuuccagaacaagaagugggaccucuucgucgagcgcuccaaggccuacuccaacugcuaccccuacgacguccccgacuacgccucccuccgcucccucgucgccuccuccggcacccucgaguucaacaacgaguccuucaacugggccggcgucacccagaacggcaccuccuccgccugcauccgcggcuccaacuccuccuucuucucccgccucaacuggcucacccaccucaacuucaaguaccccgcccucaacgucaccaugcccaacaacgagcaguucgacaagcucuacaucuggggcguccaccaccccggcaccgacaaggaccagaucuuccucuacgcccaguccuccggccgcaucaccgucuccaccaagcgcucccagcaggccgucauccccaacaucggcucccgcccccgcauccgcaacauccccucccgcaucuccaucuacuggaccaucgucaagcccggcgacauccuccucaucaacuccaccggcaaccucaucgccccccgcggcuacuucaagauccgcuccggcaaguccuccaucaugcgcuccgacgcccccaucggcaagugcaaguccgagugcaucacccccaacggcuccauccccaacgacaagcccuuccagaacgucaaccgcaucaccuacggcgccugcccccgcuacgucaagcaguccacccucaagcucgccaccggcaugcgcaacguccccgagaagcagacccgcggcaucuucggcgccaucgccggcuucaucgagaacggcugggagggcauggucgacggcugguacggcuuccgccaccagaacuccgagggccgcggccaggccgccgaccucaaguccacccaggccgccaucgaccagaucaacggcaagcucaaccgccucaucggcaagaccaacgagaaguuccaccagaucgagaaggaguucuccgaggucgagggccgcauccaggaccucgagaaguacgucgaggacaccaagaucgaccucugguccuacaacgccgagcuccucgucgcccucgagaaccagcacaccaucgaccucaccgacuccgagaugaacaagcucuucgagaagaccaagaagcagcuccgcgagaacgccgaggacaugggcaacggcugcuucaagaucuaccacaagugcgacaacgccugcaucggcuccauccgcaacggcaccuacgaccacgacgucuaccgcgacgaggcccucaacaaccgcuuccagaucaagggcgucgagcucaaguccggcuacaaggacuggauccucuggaucuccuucgccaucuccugcuuccuccucugcgucgcccuccucggcuucaucaugugggccugccagaagggcaacauccgcugcaacaucugcaucuga

SEQ ID NO: 107694 - RNA, 1701 nt, Artificial Sequence; identical to SEQ ID NO: 105904
  derived and/or modified CDS sequence (opt2) from hemagglutinin__InfluenzaA__AHL98913

SEQ ID NO: 107695 - RNA, 1701 nt, Artificial Sequence; identical to SEQ ID NO: 105894
  derived and/or modified CDS sequence (opt2) from hemagglutinin__InfluenzaA__AHL98925

SEQ ID NO: 107696 - RNA, 1701 nt, Artificial Sequence; identical to SEQ ID NO: 106033
  derived and/or modified CDS sequence (opt2) from hemagglutinin__InfluenzaA__AHL98937

SEQ ID NO: 107697 - RNA, 1701 nt, Artificial Sequence; identical to SEQ ID NO: 106030
  derived and/or modified CDS sequence (opt2) from hemagglutinin__InfluenzaA__AHL98961

SEQ ID NO: 107698 - RNA, 1701 nt, Artificial Sequence
  derived and/or modified CDS sequence (opt2) from hemagglutinin__InfluenzaA__AHL98973
augaagaccaucaucgcccucuccuacauccucugccucgucuucgcccagaagcuccccggcaacgacaacuccaccgccacccucugccucggccaccacgccguccccaacggcaccaucgucaagaccaucaccaacgaccgcaucgaggucaccaacgccaccgagcucguccagaacuccuccaucggcgagaucugcgacuccccccaccagauccucgacggcgagaacugcacccucaucgacgcccuccucggcgacccccagugcgacggcuuccagaacaagaagugggaccucuucgucgagcgcuccaaggccuacuccaacugcuaccccuacgacguccccgacuacgccucccuccgcucccucgucgccuccuccggcacccucgaguucaacaacgaguccuucaacuggaccggcgucacccagaacggcaccuccuccgccugcauccgccgcuccaacuccuccuucuucucccgccucaacuggcucacccaccucaacuucaaguaccccgcccucaacgucaccaugcccaacaacgagcaguucgacaagcucuacaucuggggcguccaccaccccggcaccgacaaggaccagaucuuccucuacgcccaguccuccggccgcaucaccgucuccaccaagcgcucccagcaggccgucguccccaacaucggcucccgcccccgcauccgcaacauccccucccgcaucuccaucuacuggaccaucgucaagcccggcgacauccuccucaucaacuccaccggcaaccucaucgccccccgcggcuacuucaagauccgcuccggcaaguccuccaucaugcgcuccgacgcccccaucggcaagugcaaguccgagugcaucacccccaacggcuccauccccaacgacaagcccuuccagaacgucaaccgcaucaccuacggcgccugcccccgcuacgucaagcaguccacccucaagcucgccaccggcaugcgcaacguccccgagaagcagacccgcggcaucuucggcgccaucgccggcuucaucgagaacggcugggagggcauggucgacggcugguacggcuuccgccaccagaacuccgagggccgcggccaggccgccgaccucaaguccacccaggccgccaucgaccagaucaacggcaagcucaaccgccucaucggcaagaccaacgagaaguuccaccagaucgagaaggaguucuccgaggucgagggccgcauccaggaccucgagaaguacgucgaggacaccaagaucgaccucugguccuacaacgccgagcuccucgucgcccucgagaaccagcacaccaucgaccucaccgacuccgagaugaacaagcucuucgagaagaccaagaagcagcuccgcgagaacgccgaggacaugggcaacggcugcuucaagaucuaccacaagugcgacaacgccugcaucggcuccauccgcaacggcaccuacgaccacgacgucuaccgcgacgaggcccucaacaaccgcuuccagaucaagggcgucgagcucaaguccggcuacaaggacuggauccucuggaucuccuucgccauguccugcuuccuccucugcgucgcccuccucggcuucaucaugugggccugccagaagggcaacauccgcugcaacaucugcaucuga

SEQ ID NO: 107699 - RNA, 1701 nt, Artificial Sequence
  derived and/or modified CDS sequence (opt2) from hemagglutinin__InfluenzaA__AHL98985
augaagaccaucaucgcccucuccuacauccucugccucgucuucgcccagaagcuccccggcaacgacaacuccaccgccacccucugccucggccaccacgccguccccaacggcaccaucgucaagaccaucaccaacgaccgcaucgaggucaccaacgccaccgagcucguccagaacuccuccaucggcgagaucugcgacuccccccaccagauccucgacggcgagaacugcaccaucaucgacgcccuccucggcgacccccagugcgacggcuuccagaacaagaagugggaccucuucgucgagcgcuccaaggccuacuccaacugcuaccccuacgacguccccgacuacgccucccuccgcucccucgucgccuccuccggcacccucgaguucaacaacgaguccuucaacugggccggcgucacccagaacggcaccuccuccgccugcauccgcggcuccaacuccuccuucuucucccgccucaacuggcucacccaccucaacuucaaguaccccgcccucaacgucaccaugcccaacaacgagcaguucgacaagcucuacaucuggggcguccaccaccccggcaccgacaaggaccagaucuuccucuacgcccaguccuccggccgcaucaccgucuccaccaagcgcucccagcaggccgucauccccaacaucggcucccgcccccgcauccgcaacauccccucccgcaucuccaucuacuggaccaucgucaagcccggcgacauccuccucaucaacuccaccggcaaccucaucgccccccgcggcuacuucaagauccgcuccggcaaguccuccaucaugcgcuccgacgcccccaucggcaagugcaaguccgagugcaucacccccaacggcuccauccccaacgacaagcccuuccagaacgucaaccgcaucaccuacggcgccugcccccgcuacgucaagcaguccacccucaagcucgccaccggcaugcgcaacguccccgagaagcagacccgcggcaucuucggcgccaucgccggcuucaucgagaacggcugggagggcauggucgacggcugguacggcuuccgccaccagaacuccgagggccgcggccaggccgccgaccucaaguccacccaggccgccaucgaccagaucaacggcaagcucaaccgccucaucggcaagaccaacgagaaguuccaccagaucgagaaggaguucuccgaggucgagggccgcauccaggaccucgagaaguacgucgaggacaccaagaucgaccucugguccuacaacgccgagcuccucgucgcccucgagaaccagcacaccaucgaccucaccgacuccgagaugaacaagcucuucgagaagaccaagaagcagcuccgcgagaacgccgaggacaugggcaacggcugcuucaagaucuaccacaagugcgacaacgccugcaucggcuccauccgcaacggcaccuacgaccacgacgucuaccgcgacgaggcccucaacaaccgcuuccagaucaagggcgucgagcucaaguccggcuacaaggacuggauccucuggaucuccuucgccaucuccugcuuccuccucugcgucgcccuccucggcuucaucaugugggccugccagaagggcaacauccgcugcaacaucugcaucuga

SEQ ID NO: 107700 - RNA, 1701 nt, Artificial Sequence; identical to SEQ ID NO: 106030
  derived and/or modified CDS sequence (opt2) from hemagglutinin__InfluenzaA__AHL98997

SEQ ID NO: 107701 - RNA, 1701 nt, Artificial Sequence; identical to SEQ ID NO: 105894
  derived and/or modified CDS sequence (opt2) from hemagglutinin__InfluenzaA__AHL99009

SEQ ID NO: 107702 - RNA, 1701 nt, Artificial Sequence; identical to SEQ ID NO: 105904
  derived and/or modified CDS sequence (opt2) from hemagglutinin__InfluenzaA__AHL99021

SEQ ID NO: 107703 - RNA, 1701 nt, Artificial Sequence
  derived and/or modified CDS sequence (opt2) from hemagglutinin__InfluenzaA__AHL99045
augaagaccaucaucgcccucuccuacauccucugccucgucuucgcccagaagauccccggcaacgacaacuccaccgccacccucugccucggccaccacgccguccccaacggcaccaucgucaagaccaucaccaacgaccgcaucgaggucaccaacgccaccgagcucguccagaacuccuccaucggcgagaucugcgacuccccccaccagauccucgacggcgagaacugcacccucaucgacgcccuccucggcgacccccagugcgacggcuuccagaacaagaagugggaccucuucgucgagcgcuccaaggccuacuccaacugcuaccccuacgacguccccgacuacgccucccuccgcucccucgucgccuccuccggcacccucgaguucaacaacgaguccuucaacuggaccggcgucacccagaacggcaccuccuccgccugcauccgccgcuccaacuccuccuucuucucccgccucaacuggcucacccaccucaacuucaaguaccccgcccucaacgucaccaugcccaacaacgagcaguucgacaagcucuacaucuggggcguccaccaccccggcaccgacaaggaccagaucuuccucuacgcccaguccuccggccgcaucaccgucuccaccaagcgcucccagcaggccgucauccccaacaucggcucccgcccccgcauccgcaacauccccucccgcaucuccaucuacuggaccaucgucaagcccggcgacauccuccucaucaacuccaccggcaaccucaucgccccccgcggcuacuucaagauccgcuccggcaaguccuccaucaugcgcuccgacgcccccaucggcaagugcaaguccgagugcaucacccccaacggcuccauccccaacgacaagcccuuccagaacgucaaccgcaucaccuacggccccugcccccgcuacgucaagcaguccacccucaagcucgccaccggcaugcgcaacguccccgagaagcagacccgcggcaucuucggcgccaucgccggcuucaucgagaacggcugggagggcauggucgacggcugguacggcuuccgccaccagaacuccgagggccgcggccaggccgccgaccucaaguccacccaggccgccaucgaccagaucaacggcaagcucaaccgccucaucggcaagaccaacgagaaguuccaccagaucgagaaggaguucuccgaggucgagggccgcauccaggaccucgagaaguacgucgaggacaccaagaucgaccucugguccuacaacgccgagcuccucgucgcccucgagaaccagcacaccaucgaccucaccgacuccgagaugaacaagcucuucgagaagaccaagaagcagcuccgcgagaacgccgaggacaugggcaacggcugcuucaagaucuaccacaagugcgacaacgccugcaucggcuccauccgcaacggcaccuacgaccacgacgucuaccgcgacgaggcccucaacaaccgcuuccagaucaagggcgucgagcucaaguccggcuacaaggacuggauccucuggaucuccuucgccaucuccugcuuccuccucugcgucgcccuccucggcuucaucaugugggccugccagaagggcaacauccgcugcaacaucugcaucuga

SEQ ID NO: 107704 - RNA, 1701 nt, Artificial Sequence
  derived and/or modified CDS sequence (opt2) from hemagglutinin__InfluenzaA__AHL99057
augaagaccaucaucgcccucuccuacauccucugccucgucuucgcccagaagcuccccggcaacgacaacuccaccgccacccucugccucggccaccacgccguccccaacggcaccaucgucaagaccaucaccaacgaccgcaucgaggucaccaacgccaccgagcucguccagaacuccuccaucggcgagaucugcgacuccccccaccagaucaucgacggcgagaacugcacccucaucgacgcccuccucggcgacccccagugcgacggcuuccagaacaagaagugggaccucuucgucgagcgcuccaaggccuacuccaacugcuaccccuacgacguccccgacuacgccucccuccgcucccucgucgccuccuccggcacccucgaguucaacaacgaguccuucaacugggccggcgucacccagaacggcaccuccuccgccugcauccgcggcuccaacuccuccuucuucucccgccucaacuggcucacccaccucaacuucaaguaccccgcccucaacgucaccaugcccaacaacgagcaguucgacaagcucuacaucuggggcguccaccaccccggcaccgacaaggaccagaucuuccucuacgcccaguccuccggccgcaucaccgucuccaccaagcgcucccagcaggccgucauccccaacaucggcucccgcccccgcauccgcaacauccccucccgcaucuccaucuacuggaccaucgucaagcccggcgacauccuccucaucaacuccaccggcaaccucaucgccccccgcggcuacuucaagauccgcuccggcaaguccuccaucaugcgcuccgacgcccccaucggcaagugcaaguccgagugcaucacccccaacggcuccauccccaacgacaagcccuuccagaacgucaaccgcaucaccuacggcgccugcccccgcuacgucaagcaguccacccucaagcucgccaccggcaugcgcaacguccccgagaagcagacccgcggcaucuucggcgccaucgccggcuucaucgagaacggcugggagggcauggucgacggcugguacggcuuccgccaccagaacuccgagggccgcggccaggccgccgaccucaaguccacccaggccgccaucgaccagaucaacggcaagcucaaccgccucaucggcaagaccaacgagaaguuccaccagaucgagaaggaguucuccgaggucgagggccgcauccaggaccucgagaaguacgucgaggacaccaagaucgaccucugguccuacaacgccgagcuccucgucgcccucgagaaccagcacaccaucgaccucaccgacuccgagaugaacaagcucuucgagaagaccaagaagcagcuccgcgagaacgccgaggacaugggcaacggcugcuucaagaucuaccacaagugcgacaacgccugcaucggcuccauccgcaacggcaccuacgaccacgacgucuaccgcgacgaggcccucaacaaccgcuuccagaucaagggcgucgagcucaaguccggcuacaaggacuggauccucuggaucuccuucgccaucuccugcuuccuccucugcgucgcccuccucggcuucaucaugugggccugccagaagggcaacauccgcugcaacaucugcaucuga

SEQ ID NO: 107705 - RNA, 1701 nt, Artificial Sequence
  derived and/or modified CDS sequence (opt2) from hemagglutinin__InfluenzaA__AHL99069
augaagaccaucaucgcccucuccuacauccucugccucgucuucgcccagaagcuccccggcaacgacaacuccaccgccacccucugccucggccaccacgccguccccaacggcaccaucgucaagaccaucaccaacgaccgcaucgaggucaccaacgccaccgagcucguccagaacuccuccaucggcgagaucugcgacuccccccaccagauccucgacggcgagaacugcacccucaucgacgcccuccucggcgacccccagugcgacggcuuccagaacaagaagugggaccucuucgucgagcgcuccaaggccuacuccaacugcuaccccuacgacguccccgacuacgccucccuccgcucccucgucgccuccuccggcacccucgaguucaacaacgaguccuucaacugggccggcgucacccagaacggcaccuccuccgccugcauccgcggcuccaacuccuccuucuucucccgccucaacuggcucacccaccucaacuucaaguaccccgcccucaacgucaccaugcccaacaacgagcaguucgacaagcucuacaucuggggcguccaccaccccggcaccgacaaggaccagaucuuccucuacgcccaguccuccggccgcaucaccgucuccaccaagcgcucccagcaggccgucauccccaacaucggcucccgcccccgcauccgcaacauccccucccgcaucuccaucuacuggaccaucgucaagcccggcgacacccuccucaucaacuccaccggcaaccucaucgccccccgcggcuacuucaagauccgcuccggcaaguccuccaucaugcgcuccgacgcccccaucggcaagugcaaguccgagugcaucacccccaacggcuccauccccaacgacaagcccuuccagaacgucaaccgcaucaccuacggcgccugcccccgcuacgucaagcaguccacccucaagcucgccaccggcaugcgcaacguccccgagaagcagacccgcggcaucuucggcgccaucgccggcuucaucgagaacggcugggagggcauggucgacggcugguacggcuuccgccaccagaacuccgagggccgcggccaggccgccgaccucaaguccacccaggccgccaucgaccagaucaacggcaagcucaaccgccucaucggcaagaccaacgagaaguuccaccagaucgagaaggaguucuccgaggucgagggccgcauccaggaccucgagaaguacgucgaggacaccaagaucgaccucugguccuacaacgccgagcuccucgucgcccucgagaaccagcacaccaucgaccucaccgacuccgagaugaacaagcucuucgagaagaccaagaagcagcuccgcgagaacgccgaggacaugggcaacggcugcuucaagaucuaccacaagugcgacaacgccugcaucggcuccauccgcaacggcaccuacgaccacaacgucuaccgcgacgaggcccucaacaaccgcuuccagaucaagggcgucgagcucaaguccggcuacaaggacuggauccucuggaucuccuucgccaucuccugcuuccuccucugcgucgcccuccucggcuucaucaugugggccugccagaagggcaacauccgcugcaacaucugcaucuga

SEQ ID NO: 107706 - RNA, 1701 nt, Artificial Sequence
  derived and/or modified CDS sequence (opt2) from hemagglutinin__InfluenzaA__AHL99081
augaagaccaucaucgcccucuccuacauccucugccucgucuucgcccagaagcuccccggcaacgacaacuccaccgccacccucugccucggccaccacgccguccccaacggcaccaucgucaagaccaucaccaacgaccgcaucgaggucaccaacgccaccgagcucguccagaacuccuccaucggcgagaucugcgacuccccccaccagauccucgacggcgagaacugcacccucaucgacgcccuccucggcgacccccagugcgacggcuuccagaacaagaagugggaccucuucgucgagcgcuccaaggccuacuccaacugcuaccccuacgacguccccgacuacgccucccuccgcucccucgucgccuccuccggcacccucgaguucaacaacgaguccuucaacuggaccggcgucacccagaacggcaccuccuccgccugcauccgccgcuccaacuccuccuucuucucccgccucaacuggcucacccaccucaacuucaaguaccccgcccucaacgucaccaugcccaacaacgagcaguucgacaagcucuacaucuggggcguccaccaccccggcaccgacaaggaccagaucuuccucuacgcccaguccuccggccgcaucaccgucuccaccaagcgcucccagcaggccgucauccccaacaucggcucccgcccccgcauccgcaacauccccucccgcaucuccaucuacuggaccaucgucaagcccggcgacauccuccucaucaacuccaccggcaaccucaucgccccccgcggcuacuucaagauccgcuccggcaaguccuccaucaugcgcuccgacgcccccaucggcaagugcaaguccgagugcaucacccccaacggcuccauccccaacgacaagcccuuccagaacgucaaccgcaucaccuacggcgccugcccccgcuacgucaagcagggcacccucaagcucgccaccggcaugcgcaacguccccgagaagcagacccgcggcaucuucggcgccaucgccggcuucaucgagaacggcugggagggcauggucgacggcugguacggcuuccgccaccagaacuccgagggccgcggccaggccgccgaccucaaguccacccaggccgccaucgaccagaucaacggcaagcucaaccgccucaucggcaagaccaacgagaaguuccaccagaucgagaaggaguucuccgaggucgagggccgcauccaggaccucgagaaguacgucgaggacaccaagaucgaccucugguccuacaacgccgagcuccucgucgcccucgagaaccagcacaccaucgaccucaccgacuccgagaugaacaagcucuucgagaagaccaagaagcagcuccgcgagaacgccgaggacaugggcaacggcugcuucaagaucuaccacaagugcgacaacgccugcaucggcuccauccgcaacggcaccuacgaccacaacgucuaccgcgacgaggcccucaacaaccgcuuccagaucaagggcgucgagcucaaguccggcuacaaggacuggauccucuggaucuccuucgccaucuccugcuuccuccucugcgucgcccuccucggcuucaucaugugggccugccagaagggcaacauccgcugcaacaucugcaucuga

SEQ ID NO: 107707 - RNA, 1701 nt, Artificial Sequence
  derived and/or modified CDS sequence (opt2) from hemagglutinin__InfluenzaA__AHL99093
augaagaccaucaucgcccucuccuacauccucugccucaucuucgcccagaagcuccccggcaacgacaacuccaccgccacccucugccucggccaccacgccguccccaacggcaccaucgucaagaccaucaccaacgaccgcaucgaggucaccaacgccaccgagcucguccagaacuccuccaucggcgagaucugcgacuccccccaccagauccucgacggcgagaacugcacccucaucgacgcccuccucggcgacccccagugcgacggcuuccagaacaagaagugggaccucuucgucgagcgcuccaaggccuacuccaacugcuaccccuacgacguccccgacuacgccucccuccgcucccucgucgccuccuccggcacccucgaguucaacaacgaguccuucaacuggaccggcgucacccagaacggcaccuccuccgccugcauccgccgcuccaacuccuccuucuucucccgccucaacuggcucacccaccucaacuucaaguaccccgcccucaacgucaccaugcccaacaacgagcaguucgacaagcucuacaucuggggcguccaccaccccggcaccgacaaggaccagaucuuccucuacgcccaguccuccggccgcaucaccgucuccaccaagcgcucccagcaggccgucauccccaacaucggcucccgcccccgcauccgcaacauccccucccgcaucuccaucuacuggaccaucgucaagcccggcgacauccuccucaucaacuccaccggcaaccucaucgccccccgcggcuacuucaagauccgcuccggcaaguccuccaucaugcgcuccgacgcccccaucggcaagugcaaguccgagugcaucacccccaacggcuccauccccaacgacaagcccuuccagaacgucaaccgcaucaccuacggcgccugcccccgcuacgucaagcaguccacccucaagcucgccaccggcaugcgcaacguccccgagaagcagacccgcggcaucuucggcgccaucgccggcuucaucgagaacggcugggagggcauggucgacggcugguacggcuuccgccaccagaacuccgagggccgcggccaggccgccgaccucaaguccacccaggccgccaucgaccagaucaacggcaagcucaaccgccucaucggcaagaccaacgagaaguuccaccagaucgagaaggaguucuccgaggucgagggccgcauccaggaccucgagaaguacgucgaggacaccaagaucgaccucugguccuacaacgccgagcuccucgucgcccucgagaaccagcacaccaucgaccucaccgacuccgagaugaacaagcucuucgagaagaccaagaagcagcuccgcgagaacgccgaggacaugggcaacggcugcuucaagaucuaccacaagugcgacaacgccugcaucggcuccauccgcaacggcaccuacgaccacaacgucuaccgcgacgaggcccucaacaaccgcuuccagaucaagggcgucgagcucaaguccggcuacaaggacuggauccucuggaucuccuucgccaucuccugcuuccuccucugcgucgcccuccucggcuucaucaugugggccugccagaagggcaacaucaagugcaacaucugcaucuga

SEQ ID NO: 107708 - RNA, 1701 nt, Artificial Sequence; identical to SEQ ID NO: 105894
  derived and/or modified CDS sequence (opt2) from hemagglutinin__InfluenzaA__AHL99117

SEQ ID NO: 107709 - RNA, 1701 nt, Artificial Sequence
  derived and/or modified CDS sequence (opt2) from hemagglutinin__InfluenzaA__AHL99129
augaagaccaucaucgcccucuccuacauccucugccucgucuucgcccagaagcuccccggcaacgacaacuccaccgccacccucugccucggccaccacgccguccccaacggcaccaucgucaagaccaucaccaacgaccgcaucgaggucaccaacgccaccgagcucguccagaacuccuccaucggcgagaucugcgacuccccccaccagauccucgacggcgagaacugcacccucaucgacgcccuccucggcgacccccagugcgacggcuuccagaacaagaagugggaccucuucgucgagcgcuccaaggccuacuccaacugcuaccccuacgacguccccgacuacgccucccuccgcucccucgucgccuccuccggcacccucgaguucaacaacgaguccuucaacuggaccggcgucacccagaacggcaccuccuccgccugcauccgccgcuccaacuccuccuucuucucccgccucaacuggcucacccaccucaacuucaaguaccccgcccucaacgucaccaugcccaacaacgagcaguucgacaagcucuacaucuggggcguccaccaccccggcaccgacaaggaccagaucuuccucuacgcccaguccuccggccgcaucaccgucuccaccaagcgcucccagcaggccgucauccccaacaucggcucccgcccccgcauccgcaacauccccucccgcaucuccaucuacuggaccaucgucaagcccggcgacauccuccucaucaacuccaccggcaaccucaucgccccccgcggcuacuucaagauccgcuccggcaaguccuccaucaugcgcuccgacgcccccaucggcaagugcaaguccgagugcaucacccccaacggcuccauccccaacgacaagcccuuccagaacgucaaccgcaucaccuacggcgccugcccccgcuacgucaagcaguccacccucaagcucgccaccggcaugcgcaacguccccgagaagcagacccgcggcaucuucggcgccaucgccggcuucaucgagaacggcugggagggcauggucgacggcugguacggcuuccgccaccagaacuccgagggccgcggccaggccgccgaccucaaguccacccaggccgccaucgaccagaucaacggcaagcucaaccgccucaucggcaagaccaacgagaaguuccaccagaucgagaaggaguucuccgaggucgagggccgcauccaggacaucgagaaguacgucgaggacaccaagaucgaccucugguccuacaacgccgagcuccucgucgcccucgagaaccagcacaccaucgaccucaccgacuccgagaugaacaagcucuucgagaagaccaagaagcagcuccgcgagaacgccgaggacaugggcaacggcugcuucaagaucuaccacaagugcgacaacgccugcaucggcuccauccgcaacggcaccuacgaccacaacgucuaccgcgacgaggcccucaacaaccgcuuccagaucaagggcgucgagcucaaguccggcuacaaggacuggauccucuggaucuccuucgccaucuccugcuuccuccucugcgucgcccuccucggcuucaucaucugggccugccagaagggcaacauccgcugcaacaucugcaucuga

SEQ ID NO: 107710 - RNA, 1701 nt, Artificial Sequence
  derived and/or modified CDS sequence (opt2) from hemagglutinin__InfluenzaA__AHL99141
augaagaccaucaucgcccucuccuacauccucugccucgucuucgcccagaagcuccccggcaacgacaacuccaccgccacccucugccucggccaccacgccguccccaacggcaccaucgucaagaccaucaccaacgaccagaucgaggucaccaacgccaccgagcucguccagaacuccuccaucggcgagaucugcgacuccccccaccagauccucgacggcgagaacugcacccucaucgacgcccuccucggcgacccccagugcgacggcuuccagaacaagaagugggaccucuucgucgagcgcuccaaggccuacuccaacugcuaccccuacgacguccccgacuacgccucccuccgcucccucgucgccuccuccggcacccucgaguucaacaacgaguccuucaacuggaccggcgucacccagaacggcaccuccuccgccugcauccgccgcuccaacuccuccuucuucucccgccucaacuggcucacccaccucgacuucaaguaccccgcccucaacgucaccaugcccaacaacgagcaguucgacaagcucuacaucuggggcguccaccaccccggcaccgacaaggaccagaucuuccucuacgcccaguccuccggccgcaucaccgucuccaccaagcgcucccagcaggccgucauccccaacaucggcucccgcccccgcauccgcaacauccccucccgcaucuccaucuacuggaccaucgucaagcccggcgacauccuccucaucaacuccaccggcaaccucaucgccccccgcggcuacuucaagauccgcuccggcaaguccuccaucaugcgcuccgacgcccccaucggcaagugcaaguccgagugcaucacccccaacggcuccauccccaacgacaagcccuuccagaacgucaaccgcaucaccuacggcgccugcccccgcuacgucaagcaguccacccucaagcucgccaccggcaugcgcaacguccccgagaagcagacccgcggcaucuucggcgccaucgccggcuucaucgagaacggcugggagggcauggucgacggcugguacggcuuccgccaccagaacuccgagggccgcggccaggccgccgaccucaaguccacccaggccgccaucgaccagaucaacggcaagcucaaccgccucaucggcaagaccaacgagaaguuccaccagaucgagaaggaguucuccgaggucgagggccgcauccaggaccucgagaaguacgucgaggacaccaagaucgaccucugguccuacaacgccgagcuccucgucgcccucgagaaccagcacaccaucgaccucaccgacuccgagaugaacaagcucuucgagaagaccaagaagcagcuccgcgagaacgccgaggacaugggcaacggcugcuucaagaucuaccacaagugcgacaacgccugcaucggcuccauccgcaacggcaccuacgaccacgacgucuaccgcgacgaggcccucaacaaccgcuuccagaucaagggcgucgagcucaaguccggcuacaaggacuggauccucuggaucuccuucgccaucuccugcuuccuccucugcgucgcccuccucggcuucaucaugugggccugccagaagggcaacauccgcugcaacaucugcaucuga

SEQ ID NO: 107711 - RNA, 1701 nt, Artificial Sequence
  derived and/or modified CDS sequence (opt2) from hemagglutinin__InfluenzaA__AHL99153
augaagaccaucaucgcccucuccuacauccucugccucgucuucgcccagaagcuccccggcaacgacaacuccaccgccacccucugccucggccaccacgccguccccaacggcaccaucgucaagaccaucaccaacgaccgcaucgaggucaccaacgccaccgagcucguccagaacuccuccaucggcgagaucugcgacuccccccaccagauccucgacggcgagaacugcacccucaucgacgcccuccucggcgacccccagugcgacggcuuccagaacaagaagugggaccucuucgucgagcgcuccaaggccuacuccaacugcuaccccuacgacguccccgacuacgccucccuccgcucccucgucgccuccuccggcacccucgaguucaacaacgaguccuucaacugggccggcgucacccagaacggcaccuccuccgccugcauccgcggcuccaacuccuccuucuucucccgccucaacuggcucacccaccucaacuucaaguaccccgcccucaacgucaccaugcccaacaacgagcaguucgacaagcucuacaucuggggcguccaccaccccggcaccgacaaggaccagaucuuccucuacgcccaguccuccggccgcaucaccgucuccaccaagcgcucccagcaggccgucacccccaacaucggcucccgcccccgcauccgcgacauccccucccgcaucuccaucuacuggaccaucgucaagcccggcgacauccuccucaucaacuccaccggcaaccucaucgccccccgcggcuacuucaagauccgcuccggcaaguccuccaucaugcgcuccgacgcccccaucggcaagugcaaguccgagugcaucacccccaacggcuccauccccaacgacaagcccuuccagaacgucaaccgcaucaccuacggcgccugcccccgcuacgucaagcaguccacccucaagcucgccaccggcaugcgcaacguccccgagaagcagacccgcggcaucuucggcgccaucgccggcuucaucgagaacggcugggagggcaugauggacggcugguacggcuuccgccaccagaacuccgagggccgcggccaggccgccgaccucaaguccacccaggccgccaucgaccagaucaacggcaagcucaaccgccucaucggcaagaccaacgagaaguuccaccagaucgagaaggaguucuccgaggucgagggccgcauccaggaccucgagaaguacgucgaggacaccaagaucgaccucugguccuacaacgccgagcuccucgucgcccucgagaaccagcacaccaucgaccucaccgacuccgagaugaacaagcucuucgagaagaccaagaagcagcuccgcgagaacgccgaggacaugggcaacggcugcuucaagaucuaccacaagugcgacaacgccugcaucggcuccauccgcaacggcaccuacgaccacgacgucuaccgcgacgaggcccucaacaaccgcuuccagaucaagggcgucgagcucaaguccggcuacaaggacuggauccucuggaucuccuucgccaucuccugcuuccuccucugcgucgcccuccucggcuucaucaugugggccugccagaagggcaacauccgcugcaacaucugcaucuga

SEQ ID NO: 107712 - RNA, 1701 nt, Artificial Sequence; identical to SEQ ID NO: 106033
  derived and/or modified CDS sequence (opt2) from hemagglutinin__InfluenzaA__AHL99165

SEQ ID NO: 107713 - RNA, 1701 nt, Artificial Sequence; identical to SEQ ID NO: 106518
  derived and/or modified CDS sequence (opt2) from hemagglutinin__InfluenzaA__AHL99177

SEQ ID NO: 107714 - RNA, 1701 nt, Artificial Sequence; identical to SEQ ID NO: 105894
  derived and/or modified CDS sequence (opt2) from hemagglutinin__InfluenzaA__AHL99189

SEQ ID NO: 107715 - RNA, 1701 nt, Artificial Sequence; identical to SEQ ID NO: 106030
  derived and/or modified CDS sequence (opt2) from hemagglutinin__InfluenzaA__AHL99225

SEQ ID NO: 107716 - RNA, 1701 nt, Artificial Sequence; identical to SEQ ID NO: 106503
  derived and/or modified CDS sequence (opt2) from hemagglutinin__InfluenzaA__AHL99237

SEQ ID NO: 107717 - RNA, 1701 nt, Artificial Sequence; identical to SEQ ID NO: 105904
  derived and/or modified CDS sequence (opt2) from hemagglutinin__InfluenzaA__AHL99249

SEQ ID NO: 107718 - RNA, 1701 nt, Artificial Sequence; identical to SEQ ID NO: 105894
  derived and/or modified CDS sequence (opt2) from hemagglutinin__InfluenzaA__AHL99261

SEQ ID NO: 107719 - RNA, 1701 nt, Artificial Sequence; identical to SEQ ID NO: 106033
  derived and/or modified CDS sequence (opt2) from hemagglutinin__InfluenzaA__AHL99273

SEQ ID NO: 107720 - RNA, 1701 nt, Artificial Sequence
  derived and/or modified CDS sequence (opt2) from hemagglutinin__InfluenzaA__AHL99285
augaagaccaucaucgcccucuccuacauccucugccucgucuucgcccagaagcuccccggcaacgacaacuccaccgccacccucugccucggccaccacgccguccccaacggcaccaucgucaagaccaucaccaacgaccgcaucgaggucaccaacgccaccgagcucguccagaacuccuccaucggcgagaucugcgacuccccccaccagauccucgacggcgagaacugcacccucaucgacgcccuccucggcgacccccagugcgacggcuuccagaacaagaagugggaccucuucgucgagcgcuccaaggccuacuccaacugcuaccccuacgacguccccgacuacgccucccuccgcucccucgucgccuccuccggcacccucgaguucaacaacgaguccuucaacuggaccggcgucacccagaacggcaccuccuccgccugcauccgccgcuccaacuccuccuucuucucccgccucaacuggcucacccaccucaacuucaaguaccccgcccucaacgucaccaugcccaacaacgagcaguucgacaagcucuacaucuggggcguccaccaccccggcaccgacaaggaccagaucuuccucuacgcccaguccuccggccgcaucaccgucuccaccaagcgcucccagcaggccgucauccccaacaucggcucccgcccccgcauccgcaacauccccucccgcaucuccaucuacuggaccaucgucaagcccggcgacauccuccucaucaacuccaccggcaaccucaucgccccccgcggcuacuucaagauccaguccggcaaguccuccaucaugcgcuccgacgcccccaucggcaagugcaaguccgagugcaucacccccaacggcuccauccccaacgacaagcccuuccagaacgucaaccgcaucaccuacggcgccugcccccgcuacgucaagcaguccacccucaagcucgccaccggcaugcgcaacguccccgagaagcagacccgcggcaucuucggcgccaucgccggcuucaucgagaacggcugggagggcauggucgacggcugguacggcuuccgccaccagaacuccgagggccgcggccaggccgccgaccucaaguccacccaggccgccaucgaccagaucaacggcaagcucaaccgccucaucggcaagaccaacgagaaguuccaccagaucgagaaggaguucuccgaggucgagggccgcauccaggaccucgagaaguacgucgaggacaccaagaucgaccucugguccuacaacgccgagcuccucgucgcccucgagaaccagcacaccaucgaccucaccgacuccgagaugaacaagcucuucgagaagaccaagaagcagcuccgcgagaacgccgaggacaugggcaacggcugcuucaagaucuaccacaagugcgacaacgccugcaucggcuccauccgcaacggcaccuacgaccacaacgucuaccgcgacgaggcccucaacaaccgcuuccagaucaagggcgucgagcucaaguccggcuacaaggacuggauccucuggaucuccuucgccaucuccugcuuccuccucugcgucgcccuccucggcuucaucaugugggccugccagaagggcaacauccgcugcaacaucugcaucuga

SEQ ID NO: 107721 - RNA, 1701 nt, Artificial Sequence; identical to SEQ ID NO: 106059
  derived and/or modified CDS sequence (opt2) from hemagglutinin__InfluenzaA__AHL99297

SEQ ID NO: 107722 - RNA, 1701 nt, Artificial Sequence; identical to SEQ ID NO: 105904
  derived and/or modified CDS sequence (opt2) from hemagglutinin__InfluenzaA__AHL99309

SEQ ID NO: 107723 - RNA, 1701 nt, Artificial Sequence
  derived and/or modified CDS sequence (opt2) from hemagglutinin__InfluenzaA__AHL99321
augaagaccaucaucgcccucuccuacauccucugccucgucuucacccagaagcuccccggcaacgacaacuccaccgccacccucugccucggccaccacgccguccccaacggcaccaucgucaagaccaucaccaacgaccagaucgaggucaccaacgccaccgagcucguccagaacuccuccaucggcgagaucugcgacuccccccaccagauccucgacggcgagaacugcacccucaucgacgcccuccucggcgacccccagugcgacggcuuccagaacaagaagugggaccucuucgucgagcgcuccaaggccuacuccaacugcuaccccuacgacguccccgacuacgccucccuccgcucccucgucgccuccuccggcacccucgaguucaacaacgaguccuucaacugggccggcgucacccagaacggcaccuccuccgccugcauccgcggcuccaacuccuccuucuucucccgccucaacuggcucacccaccucaacuucaaguaccccgcccucaacgucaccaugcccaacaacgagcaguucgacaagcucuacaucuggggcguccaccaccccggcaccgacaaggaccagaucuuccucuacgcccaguccuccggccgcaucaccgucuccaccaagcgcucccagcaggccgucauccccaacaucggcucccgcccccgcauccgcaacauccccucccgcaucuccaucuacuggaccaucgucaagcccggcgacauccuccucaucaacuccaccggcaaccucaucgccccccgcggcuacuucaagauccgcuccggcaaguccuccaucaugcgcuccgacgcccccaucggcaagugcaaguccgagugcaucacccccaacggcuccauccccaacgacaagcccuuccagaacgucaaccgcaucaccuacggcgccugcccccgcuacgucaagcaguccacccucaagcucgccaccggcaugcgcaacguccccgagaagcagacccgcggcaucuucggcgccaucgccggcuucaucgagaacggcugggagggcauggucgacggcugguacggcuuccgccaccagaacuccgagggccgcggccaggccgccgaccucaaguccacccaggccgccaucgaccagaucaacggcaagcucaaccgccucaucggcaagaccaacgagaaguuccaccagaucgagaaggaguucuccgaggucgagggccgcauccaggaccucgagaaguacgucgaggacaccaagaucgaccucugguccuacaacgccgagcuccucgucgcccucgagaaccagcacaccaucgaccucaccgacuccgagaugaacaagcucuucgagaagaccaagaagcagcuccgcgagaacgccgaggacaugggcaacggcugcuucaagaucuaccacaagugcgacaacgccugcaucggcuccauccgcaacggcaccuacgaccacgacgucuaccgcgacgaggcccucaacaaccgcuuccagaucaagggcgucgagcucaaguccggcuacaaggacuggauccucuggaucuccuucgccaucuccugcuuccuccucugcgucgcccuccucggcuucaucaugugggccugccagaagggcaacauccgcugcaacaucugcaucuga

SEQ ID NO: 107724 - RNA, 1701 nt, Artificial Sequence
  derived and/or modified CDS sequence (opt2) from hemagglutinin__InfluenzaA__AHL99333
augaagaccaucaucgcccucuccuacauccucugccucgucuucgcccaggagcuccccggcaacgacgacuccaccgccacccucugccucggccaccacgccguccccaacggcaccaucgucaagaccaucaccaacgaccagaucgaggucaccaacgccaccgagcucguccaguccuccuccaccggcgagaucugcaacuccccccaccagauccucgacggcgagaacugcacccucaucgacgcccuccucggcgacccccagugcgacggcuuccagaacaagaagugggaccucuucgucgagcgcuccaaggcccacuccaacugcuaccccuacgacguccccgacuacgccucccuccgcucccucgucgccuccuccggcacccucgaguucaacaacgaguccuucaacuggaccggcgucacccagaacggcaccuccuccgccugcauccgccgcuccaacaacuccuucuucucccgccucaacuggcucacccaccucaacuucaaguaccccgcccucaacgucaccaugcccaacaacgagcaguucgacaagcucuacaucuggggcguccaccaccccggcaccgacaaggaccagaucuuccucuacgcccaggccuccggccgcaucaccgucuccaccaagcgcucccagcaggccgucauccccaacaucggcucccgcccccgcguccgcaacauccccucccgcgucuccaucuacuggaccaucgucaagcccggcgacauccuccucaucaacuccaccggcaaccucaucgccccccgcggcuacuucaagauccgcuccggcaaguccuccaucaugcgcuccgacgcccccaucggcaagugcaacuccgccugcaucacccccaacggcuccauccccaacgacaagcccuuccagaacgucaaccgcaucaccuacggcgccugcccccgcuacgucaagcagaacacccucaagcucgccaccggcaugcgcaacguccccgagaagcagacccgcggcaucuucggcgccaucgccggcuucaucgagaacggcugggagggcauggucgacggcugguacggcuuccgccaccagaacuccgagggccgcggccaggccgccgaccucaaguccacccaggccgccaucgaccagaucaacggcaagcucaaccgccucaucggcaagaccaacgagaaguuccaccagaucgagaaggaguucuccgaggucgagggccgcauccaggaccucgagaaguacgucgaggacaccaagaucgaccucugguccuacaacgccgagcuccucgucgcccucgagaaccagcacaccaucgaccucaccgacuccgagaugaacaagcucuucgagaagaccaagaagcagcuccgcgagaacgccgaggacaugggcaacggcugcuucaagaucuaccacaagugcgacaacgccugcaucggcuccauccgcaacggcaccuacgaccacaacgucuaccgcgacgaggcccucaacaaccgcuuccagaucaagggcgucgagcucaaguccggcuacaaggacuggauccucuggaucuccuucgccaucuccugcuuccuccucugcgucgcccuccucggcuucaucaugugggccugccagaagggcaacauccgcugcaacaucugcaucuga

SEQ ID NO: 107725 - RNA, 1701 nt, Artificial Sequence
  derived and/or modified CDS sequence (opt2) from hemagglutinin__InfluenzaA__AHL99356
augaaggccauccucgucguccuccucuacaccuucgccaccgccaacgccgacacccucugcaucggcuaccacgccaacaacuccaccgacaccgucgacaccguccucgagaagaacgucaccgucacccacuccgucaaccuccucgaggacaagcacaacggcaagcucugcaagcuccgcggcgucgccccccuccaccucggcaagugcaacaucgccggcuggauccucggcaaccccgagugcgagucccucuccaccgccuccuccugguccuacaucgucgagaccuccuccuccgacaacggcaccugcuaccccggcgacuucaucaacuacgaggagcuccgcgagcagcucuccuccgucuccuccuucgagcgcuucgagaucuuccccaagaccuccuccuggcccaaccacgacuccaacaagggcgucaccgccgccugcccccacgccggcgccaaguccuucuacaagaaccucaucuggcucgucaagaagggcaacuccuaccccaagcucuccaaguccuacaucaacgacaagggcaaggagguccucguccucuggggcauccaccaccccuccaccaccgccgaccagcagucccucuaccagaacgccgacgccuacgucuucgucggcaccuccaaguacuccaagaaguucaagcccgagaucgccauccgccccaagguccgcgaccaggagggccgcaugaacuacuacuggacccucaucgagcccggcgacaagaucaccuucgaggccaccggcaaccucgucgucccccgcuacgccuucgccauggagcgcaacgccggcuccggcaucaucaucuccgacacccccguccacgacugcaacaccaccugccagacccccgagggcgccaucaacaccucccuccccuuccagaacauccaccccaucaccaucggcaagugccccaaguacgucaaguccaccaagcuccgccucgccaccggccuccgcaacguccccuccauccagucccgcggccucuucggcgccaucgccggcuucaucgagggcggcuggaccggcauggucgacggcugguacggcuaccaccaccagaacgagcagggcuccggcuacgccgccgaccucaaguccacccagaacgccaucgacaagaucaccaacaaggucaacuccgucaucgagaagaugaacacccaguucaccgccgucggcaaggaguucaaccaccucgagaagcgcaucgagaaccucaacaagaaggucgacgacggcuuccucgacaucuggaccuacaacgccgagcuccucguccuccucgagaacgagcgcacccucgacuaccacgacuccaacgucaagaaccucuacgagaagguccgcaaccagcucaagaacaacgccaaggagaucggcaacggcugcuucgaguucuaccacaagugcgacaacaccugcauggaguccgucaagaacggcaccuacgacuaccccaaguacuccgaggaggccaagcucaaccgcgagaagaucgacggcgucaagcucgaguccacccgcaucuaccagauccucgccaucuacuccaccgucgccuccucccucguccucgucgucucccucggcgccaucuccuucuggaugugcuccaacggcucccuccagugccgcaucugcaucuga

SEQ ID NO: 107726 - RNA, 1701 nt, Artificial Sequence; identical to SEQ ID NO: 105919
  derived and/or modified CDS sequence (opt2) from hemagglutinin__InfluenzaA__AHL99367

SEQ ID NO: 107727 - RNA, 1701 nt, Artificial Sequence
  derived and/or modified CDS sequence (opt2) from hemagglutinin__InfluenzaA__AHL99379
augaaggccauccucgucgucaugcucuacaccuucgccaccgccaacgccgacacccucugcaucggcuaccacgccaacaacuccaccgacaccgucgacaccguccucgagaagaacgucaccgucacccacuccgucaaccuccucgaggacaagcacaacggcaagcucugcaagcuccgcggcgucgccccccuccaccucggcaagugcaacaucgccggcuggauccucggcaaccccgagugcgagucccucuccaccgccuccuccugguccuacaucgucgagaccuccggcuccgacaacggcaccugcuaccccggcgacuucaucgacuacgaggagcuccgcgagcagcucuccuccgucuccuccuucgagcgcuucgagaucuuccccaagaccuccuccuggcccaaccacgacuccaacaagggcgucaccgccgccugcccccacgccggcgccaagggcuucuacaagaaccucaucuggcucgucaagaagggcaacuccuaccccaagcucuccaucuccuacaucaacgacaagggcaaggagguccucguccucuggggcauccaccaccccuccaccaccgccgaccagcagucccucuaccagaacgccgacaccuacgucuucgucggcaccucccgcuacuccaagaaguucaagcccgagaucgccauccgccccaagguccgcgaccaggagggccgcaugaacuacuacuggacccucgucgagcccggcgacaagaucaccuucgaggccaccggcaaccucgucgucccccgcuacgccuucgccauggagcgcaacgccggcuccggcaucaucaucuccgacacccccguccacgacugcaacaccaccugccagacccccaagggcgccaucaacaccucccuccccuuccagaacauccaccccaucaccaucggcaagugccccaaguacgucaaguccaccaagcuccgccucgccaccggccuccgcaacguccccuccauccagucccgcggccucuucggcgccaucgccggcuucaucgagggcggcuggaccggcauggucgacggcugguacggcuaccaccaccagaacgagcagggcuccggcuacgccgccgaccucaaguccacccagaacgccaucgacaagaucaccaacaaggucaacuccgucaucgagaagaugaacacccaguucaccgccgucggcaaggaguucaaccaccucgagaagcgcaucgagaaccucaacaagaaggucgacgacggcuuccucgacaucuggaccuacaacgccgagcuccucguccuccucgagaacgagcgcacccucgacuaccacgacuccaacgucaagaaccucuacgagaagguccgcaaccagcucaagaacaacgccaaggagaucggcaacggcugcuucgaguucuaccacaagugcgacaacaccugcauggaguccgucaagaacggcaccuacgacuaccccaaguacuccgaggaggccaagcucaaccgcgagaagaucgacggcgucaagcucgaguccacccgcaucuaccagauccucgccaucuacuccaccgccgccuccucccucguccucgucgucucccucggcgccaucuccuucuggaugugcuccaacggcucccuccagugccgcaucugcaucuga

SEQ ID NO: 107728 - RNA, 1701 nt, Artificial Sequence; identical to SEQ ID NO: 107720
  derived and/or modified CDS sequence (opt2) from hemagglutinin__InfluenzaA__AHL99390

SEQ ID NO: 107729 - RNA, 1701 nt, Artificial Sequence; identical to SEQ ID NO: 105894
  derived and/or modified CDS sequence (opt2) from hemagglutinin__InfluenzaA__AHL99402

SEQ ID NO: 107730 - RNA, 1701 nt, Artificial Sequence
  derived and/or modified CDS sequence (opt2) from hemagglutinin__InfluenzaA__AHL99426
augaagaccaucaucgcccucuccuacauccucugccucgucuucgcccagaagcuccccggcaacgacaacuccaccgccacccucugccucggccaccacgccguccccaacggcaccaucgucaagaccaucaccaacgaccgcaucgaggucaccaacgccaccgagcucguccagaacuccuccaucggcgagaucugcgacuccccccaccagauccucgacggcgagaacugcacccucaucgacgcccuccucggcgacccccagugcgacggcuuccagaacaagaagugggaccucuucgucgagcgcuccaaggccuacuccaacugcuaccccuacgacguccccgacuacgccucccuccgcucccucgucgccuccuccggcacccucgaguucaacaacgaguccuucaacuggaccggcgucacccagaacggcaccuccuccgccugcauccgccgcuccaacuccuccuucuucucccgccucaacuggcucacccaccucaacuucaaguaccccgcccucaacgucaccaugcccaacaacgagcaguucgacaagcucuacaucuggggcguccaccaccccggcaccgacaaggaccagaucuuccucuacgcccaguccuccggccgcaucaccgucuccaccaagcgcucccagcaggccgucauccccaacaucggcucccgcccccgcauccgcaacauccccucccgcaucuccaucuacuggaccaucgucaagcccggcgacauccuccucaucaacuccaccggcaaccucaucgccccccgcggcuacuucaagauccgcuccggcaaguccuccaugaugcgcuccgacgcccccaucggcaagugcaaguccgagugcaucacccccaacggcuccauccccaacgacaagcccuuccagaacgucaaccgcaucaccuacggcgccugcccccgcuacgucaagcaguccacccucaagcucgccaccggcaugcgcaacguccccgagaagcagacccgcggcaucuucggcgccaucgccggcuucaucgagaacggcugggagggcauggucgacggcugguacggcuuccgccaccagaacuccgagggccgcggccaggccgccgaccucaaguccacccaggccgccaucgaccagaucaacggcaagcucaaccgccucaucggcaagaccaacgagaaguuccaccagaucgagaaggaguucuccgaggucgagggccgcauccaggaccucgagaaguacgucgaggacaccaagaucgaccucugguccuacaacgccgagcuccucgucgcccucgagaaccagcacaccaucgaccucaccgacuccgagaugaacaagcucuucgagaagaccaagaagcagcuccgcgagaacgccgaggacaugggcaacggcugcuucaagaucuaccacaagugcgacaacgccugcaucggcuccauccgcaacggcaccuacgaccacgacgucuaccgcgacgaggcccucaacaaccgcuuccagaucaagggcgucgagcucaaguccggcuacaaggacuggauccucuggaucuccuucgccaucuccugcuuccuccucugcgucgcccuccucggcuucaucaugugggccugccagaagggcaacauccgcugcaacaucugcaucuga

SEQ ID NO: 107731 - RNA, 1701 nt, Artificial Sequence
  derived and/or modified CDS sequence (opt2) from hemagglutinin__InfluenzaA__AHL99438
augaagaccaucaucgcccucuccuacauccucugccucgucuucgcccagaagcuccccggcaacgacaacuccaccgccacccucugccucggccaccacgccguccccaacggcaccaucgucaagaccaucaccaacgaccgcaucgaggucaccaacgccaccgagcucguccagaacuccuccaucggcgagaucugcgacuccccccaccagauccucgacggcgagaacugcacccucaucgacgcccuccucggcgacccccagugcgacggcuuccagaacaagaagugggaccucuucgucgagcgcuccaaggccuacuccaacugcuaccccuacgacguccccgacuacgccucccuccgcucccucgucgccuccuccggcacccucgaguucaacaacgaguccuucaacuggaccggcgucacccagaacggcaccuccuccgccugcauccgccgcuccaacuccuccuucuucucccgccucaacuggcucacccaccucaacuucaaguaccccgcccucaacgucaccaugcccaacaacgagcaguucgacaagcucuacaucuggggcguccaccaccccggcaccgacaaggaccagaucuuccucuacgcccaguccuccggccgcaucaccgucuccaccaagcgcucccagcaggccgucauccccaacaucggcucccgcccccgcauccgcaacauccccucccgcaucuccaucuacuggaccaucgucaagcccggcgacauccuccucaucaacuccaccggcaaccucaucgccccccgcggcuacuucaagauccaguccggcaaguccuccaucaugcgcuccgacgcccccaucggcaagugcaaguccgagugcaucacccccaacggcuccauccccaacgacaagcccuuccagaacgucaaccgcaucaccuacggcgccugcccccgcuacgucaagcaguccacccucaagcucgccaccggcaugcgcaacguccccgagaagcagacccgcggcaucuucggcgccaucgccggcuucaucgagaacggcugggagggcauggucgacggcugguacggcuuccgccaccagaacuccgagggccgcggccaggccgccgaccucaaguccacccaggccgccaucgaccagaucaacggcaagcucaaccgccucaucggcaagaccaacgagaaguuccaccagaucgagaaggaguucuccgaggucgagggccgcauccaggaccucgagaaguacgucgaggacaccaagaucgaccucugguccuacaacgccgagcuccucgucgcccucgagaaccagcacaccaucgaccucaccgacuccgagaugaacaagcucuucgagaagaccaagaagcagcuccgcgagaacgccgaggacaugggcaacggcugcuucaagaucuaccacaagugcgacaacgccugcaucggcuccauccgcaacggcaccuacgaccacgacgucuaccgcgacgaggcccucaacaaccgcuuccagaucaagggcgucgagcucaaguccggcuacaaggacuggauccucuggaucuccuucgccaucuccugcuuccuccucugcgucgcccuccucggcuucaucaugugggccugccagaagggcaacauccgcugcaacaucugcaucuga

SEQ ID NO: 107732 - RNA, 1701 nt, Artificial Sequence; identical to SEQ ID NO: 106030
  derived and/or modified CDS sequence (opt2) from hemagglutinin__InfluenzaA__AHL99450

SEQ ID NO: 107733 - RNA, 1701 nt, Artificial Sequence; identical to SEQ ID NO: 106503
  derived and/or modified CDS sequence (opt2) from hemagglutinin__InfluenzaA__AHL99462

SEQ ID NO: 107734 - RNA, 1701 nt, Artificial Sequence; identical to SEQ ID NO: 106033
  derived and/or modified CDS sequence (opt2) from hemagglutinin__InfluenzaA__AHL99474

SEQ ID NO: 107735 - RNA, 1701 nt, Artificial Sequence; identical to SEQ ID NO: 106059
  derived and/or modified CDS sequence (opt2) from hemagglutinin__InfluenzaA__AHL99486

SEQ ID NO: 107736 - RNA, 1701 nt, Artificial Sequence; identical to SEQ ID NO: 106030
  derived and/or modified CDS sequence (opt2) from hemagglutinin__InfluenzaA__AHL99498

SEQ ID NO: 107737 - RNA, 1701 nt, Artificial Sequence; identical to SEQ ID NO: 105894
  derived and/or modified CDS sequence (opt2) from hemagglutinin__InfluenzaA__AHL99510

SEQ ID NO: 107738 - RNA, 1701 nt, Artificial Sequence; identical to SEQ ID NO: 105894
  derived and/or modified CDS sequence (opt2) from hemagglutinin__InfluenzaA__AHL99522

SEQ ID NO: 107739 - RNA, 1701 nt, Artificial Sequence; identical to SEQ ID NO: 105919
  derived and/or modified CDS sequence (opt2) from hemagglutinin__InfluenzaA__AHL99534

SEQ ID NO: 107740 - RNA, 1701 nt, Artificial Sequence; identical to SEQ ID NO: 105894
  derived and/or modified CDS sequence (opt2) from hemagglutinin__InfluenzaA__AHL99546

SEQ ID NO: 107741 - RNA, 1701 nt, Artificial Sequence; identical to SEQ ID NO: 105894
  derived and/or modified CDS sequence (opt2) from hemagglutinin__InfluenzaA__AHL99558

SEQ ID NO: 107742 - RNA, 1701 nt, Artificial Sequence
  derived and/or modified CDS sequence (opt2) from hemagglutinin__InfluenzaA__AHL99570
augaagaccaucaucgcccucuccuacauccucugccucgucuucgcccagaagcuccccggcaacgacaacuccaccgccacccucugccucggccaccacgccguccccaacggcaccaucgucaagaccaucaccaacgaccgcaucgaggucaccaacgccaccgagcucguccagaacuccuccaucggcgagaucugcgacuccccccaccagauccucgacggcgagaacugcacccucaucgacgcccuccucggcgacccccagugcgacggcuuccagaacaagaagugggaccucuucgucgagcgcuccaaggccuacuccuccugcuaccccuacgacguccccgacuacgccucccuccgcucccucgucgccuccuccggcacccucgaguucaacaacgaguccuucaacuggaccggcgucacccagaacggcaccuccuccgccugcauccgccgcuccaacuccuccuucuucucccgccucaacuggcucacccaccucaacuucaaguaccccgcccucaacgucaccaugcccaacaacgagcaguucgacaagcucuacaucuggggcguccaccaccccggcaccgacaaggaccagaucuuccucuacgcccaguccuccggccgcaucaccgucuccaccaagcgcucccagcaggccgucauccccaacaucggcucccgcccccgcauccgcaacauccccucccgcaucuccaucuacuggaccaucgucaagcccggcgacauccuccucaucaacuccaccggcaaccucaucgccccccgcggcuacuucaagauccgcuccggcaaguccuccaucaugcgcuccgacgcccccaucggcaagugcaaguccgagugcaucacccccaacggcuccauccccaacgacaagcccuuccagaacgucaaccgcaucaccuacggcgccugcccccgcuacaucaagcaguccacccucaagcucgccaccggcaugcgcaacguccccgagaagcagacccgcggcaucuucggcgccaucgccggcuucaucgagaacggcugggagggcauggucgacggcugguacggcuuccgccaccagaacuccgagggccgcggccaggccgccgaccucaaguccacccaggccgccaucgaccagaucaacggcaagcucaaccgccucaucggcaagaccaacgagaaguuccaccagaucgagaaggaguucuccgaggucgagggccgcauccaggaccucgagaaguacgucgaggacaccaagaucgaccucugguccuacaacgccgagcuccucgucgcccucgagaaccagcacaccaucgaccucaccgacuccgagaugaacaagcucuucgagaagaccaagaagcagcuccgcgagaacgccgaggacaugggcaacggcugcuucaagaucuaccacaagugcgacaacgccugcaucggcuccauccgcaacggcaccuacgaccacgacgucuaccgcgacgaggcccucaacaaccgcuuccagaucaagggcgucgagcucaaguccggcuacaaggacuggauccucuggaucuccuucgccaucuccugcuuccuccucugcgucgcccuccucggcuucaucaugugggccugccagaagggcaacauccgcugcaacaucugcaucuga

SEQ ID NO: 107743 - RNA, 1701 nt, Artificial Sequence; identical to SEQ ID NO: 105894
  derived and/or modified CDS sequence (opt2) from hemagglutinin__InfluenzaA__AHL99582

SEQ ID NO: 107744 - RNA, 1701 nt, Artificial Sequence
  derived and/or modified CDS sequence (opt2) from hemagglutinin__InfluenzaA__AHL99594
augaaggccauccucgucgucaugcucuacaccuucgccaccgccaacgccgacacccucugcaucggcuaccacgccaacaacuccaccgacaccgucgacaccguccucgagaagaacgucaccgucacccacuccgucaaccuccucgaggacaagcacaacggcaagcucugcaagcuccgcggcgucgccccccuccaccucggcaagugcaacaucgccggcuggauccucggcaaccccgagugcgagucccucuccaccgccuccuccugguccuacaucgucgagaccuccggcuccgacaacggcaccugcuaccccggcgacuucaucgacuacgaggagcuccgcgagcagcucuccuccgucuccuccuucgagcgcuucgagaucuuccccaagaccuccuccuggcccaaccacgacuccaacaagggcgucaccgccgccugcccccgcgccggcgccaagggcuucuacaagaaccucaucuggcucgucaagaagggcaacuccuaccccaagcucuccaucuccuacaucaacgacaagggcaaggagguccucguccucuggggcauccaccaccccuccaccaccgccgaccagcagucccucuaccagaacgccgacaccuacgucuucgucggcaccucccgcuacuccaagaaguucaagcccgagaucgccauccgccccaagguccgcgaccaggagggccgcaugaacuacuacuggacccucgucgagcccggcgacaagaucaccuucgaggccaccggcaaccucgucgucccccgcuacgccuucgccauggagcgcaacgccggcuccggcaucaucaucuccgacacccccguccacgacugcaacaccaccugccagacccccaagggcgccaucaacaccucccuccccuuccagaacauccaccccaucaccaucggcaagugccccaaguacgucaaguccaccaagcuccgccucgccaccggccuccgcaacguccccuccauccagucccgcggccucuucggcgccaucgccggcuucaucgagggcggcuggaccggcauggucgacggcugguacggcuaccaccaccagaacgagcagggcuccggcuacgccgccgaccucaaguccacccagaacgccaucgacaagaucaccaacaaggucaacuccgucaucgagaagaugaacacccaguucaccgccgucggcaaggaguucaaccaccucgagaagcgcaucgagaaccucaacaagaaggucgacgacggcuuccucgacaucuggaccuacaacgccgagcuccucguccuccucgagaacgagcgcacccucgacuaccacgacuccaacgucaagaaccucuacgagaagguccgcaaccagcucaagaacaacgccaaggagaucggcaacggcugcuucgaguucuaccacaagugcgacaacaccugcauggaguccgucaagaacggcaccuacgacuaccccaaguacuccgaggaggccaagcucaaccgcgaggagaucgacggcgucaagcucgaguccacccgcaucuaccagauccucgccaucuacuccaccgccgccuccucccucguccucgucgucucccucggcgccaucuccuucuggaugugcuccaacggcucccuccagugccgcaucugcaucuga

SEQ ID NO: 107745 - RNA, 1701 nt, Artificial Sequence; identical to SEQ ID NO: 106503
  derived and/or modified CDS sequence (opt2) from hemagglutinin__InfluenzaA__AHL99605

SEQ ID NO: 107746 - RNA, 1701 nt, Artificial Sequence; identical to SEQ ID NO: 106033
  derived and/or modified CDS sequence (opt2) from hemagglutinin__InfluenzaA__AHL99617

SEQ ID NO: 107747 - RNA, 1701 nt, Artificial Sequence; identical to SEQ ID NO: 105894
  derived and/or modified CDS sequence (opt2) from hemagglutinin__InfluenzaA__AHL99629

SEQ ID NO: 107748 - RNA, 1701 nt, Artificial Sequence
  derived and/or modified CDS sequence (opt2) from hemagglutinin__InfluenzaA__AHL99641
augaagaccaucaucgcccucuccuacauccucugccucgucuucgcccagaagcuccccggcaacgacaacuccaccgccacccucugccucggccaccacgccguccccaacggcaccaucgucaagaccaucaccaacgaccgcaucgaggucaccaacgccaccgagcucguccagaacuccuccaucggcgagaucugcgacuccccccaccagauccucgacggcgagaacugcacccucaucgacgcccuccucggcgacccccagugcgacggcuuccagaacaagaagugggaccucuucgucgagcgcuccaaggccuacuccaacugcuaccccuacgacguccccgacuacgccucccuccgcucccucgucgccuccuccggcacccucgaguucaacaacgaguccuucaacuggaccggcgucacccagaacggcaccuccuccgccugcauccgccgcuccaacuccuccuucuucucccgccucaacuggcucacccaccucaacuucaaguaccccgcccucaacgucaccaugcccaacaacgagcaguucgacaagcucuacaucuggggcguccaccaccccggcaccgacaaggaccagaucuuccucuacgcccaguccuccggccgcaucaccgucuccaccaagcgcucccagcaggccgucguccccaacaucggcucccgcccccgcauccgcaacauccccucccgcaucuccaucuacuggaccaucgucaagcccggcgacauccuccucaucaacuccaccggcaaccucaucgccccccgcggcuacuucaagauccgcuccggcaaguccuccaucaugcgcuccgacgcccccaucggcaagugcaaguccgagugcaucacccccaacggcuccauccccaacgacaagcccuuccagaacgucaaccgcaucaccuacggcgccugcccccgcuacgucaagcaguccacccucaagcucgccaccggcaugcgcaacguccccgagaagcagacccgcggcaucuucggcgccaucgccggcuucaucgagaacggcugggagggcauggucgacggcugguacggcuuccgccaccagaacuccgagggccgcggccaggccgccgaccucaaguccacccaggccgccaucgaccagaucaacggcaagcucaaccgccucaucggcaagaccaacgagaaguuccaccagaucgagaaggaguucuccgaggucgagggccgcauccaggaccucgagaaguacgucgaggacaccaagaucgaccucugguccuacaacgccgagcuccucgucgcccucgagaaccagcacaccaucgaccucaccgacuccgagaugaacaagcucuucgagaagaccaagaagcagcuccgcgagaacgccgaggacaugggcaacggcugcuucaagaucuaccacaagugcgacaacgccugcaucggcuccauccgcaacggcaccuacaaccacgacgucuaccgcgacgaggcccucaacaaccgcuuccagaucaagggcgucgagcucaaguccggcuacaaggacuggauccucuggaucuccuucgccauguccugcuuccuccucugcgucgcccuccucggcuucaucaugugggccugccagaagggcaacauccgcugcaacaucugcaucuga

SEQ ID NO: 107749 - RNA, 1701 nt, Artificial Sequence
  derived and/or modified CDS sequence (opt2) from hemagglutinin__InfluenzaA__AHL99665
augaagaccaucaucgcccucuccuacauccucugccucgucuucgcccagaagcuccccggcaacgacaacuccaccgccacccucugccucggccaccacgccguccccaacggcaccaucgucaagaccaucaccaacgaccgcaucgaggucaccaacgccaccgagcucguccagaacuccuccaucggcgagaucugcgacuccccccaccagauccucgacggcgagaacugcacccucaucgacgcccuccucggcgacccccagugcgacggcuuccagaacaagaagugggaccucuucgucgagcgcuccaaggccuacuccaacugcuaccccuacgacguccccgacuacgccucccuccgcucccucgucgccuccuccggcacccucgaguucaacaacgaguccuucaacuggaccggcgucacccagaacggcaccuccuccgccugcauccgccgcuccaacuccuccuucuucucccgccucaacuggcucacccaccucaacuucaaguaccccgcccucaacgucaccaugcccaacaacgagcaguucgacaagcucuacaucuggggcguccaccaccccggcaccgacaaggaccagaucuuccucuacgcccaguccuccggccgcaucaccgucuccaccaagcgcucccagcaggccgucauccccaacaucggcucccgcccccgcauccgcaacauccccucccgcaucuccaucuacuggaccaucgucaagcccggcgacauccuccucaucaacuccaccggcaaccucaucgccccccgcggcuacuucaagauccgcuccggcaaguccuccaucaugcgcuccgacgcccccaucggcaagugcaaguccgagugcaucacccccaacggcuccauccccaacgacaagcccuuccagaacgucaaccgcaucaccuacggcgccugcccccgcuacaucaagcaguccacccucaagcucgccaccggcaugcgcaacguccccgagaagcagacccgcggcaucuucggcgccaucgccggcuucaucgagaacggcugggagggcauggucgacggcugguacggcuuccgccaccagaacuccgagggccgcggccaggccgccgaccucaaguccacccaggccgccaucgaccagaucaacggcaagcucaaccgccucaucggcaagaccaacgagaaguuccaccagaucgagaaggaguucuccgaggucgagggccgcauccaggaccucgagaaguacgucgaggacaccaagaucgaccucugguccuacaacgccgagcuccucgucgcccucgagaaccagcacaccaucgaccucaccgacuccgagaugaacaagcucuucgagaagaccaagaagcagcuccgcgagaacgccgaggacaugggcaacggcugcuucaagaucuaccacaagugcgacaacgccugcaucggcuccauccgcaacggcaccuacgaccacgacgucuaccgcgacgaggcccucaacaaccgcuuccagaucaagggcgucgagcucaaguccggcuacaaggacuggauccucuggaucuccuucgccaucuccugcuuccuccucugcgucgcccuccucggcuucaucaugugggccugccagaagggcaacauccgcugcaacaucugcaucuga

SEQ ID NO: 107750 - RNA, 1701 nt, Artificial Sequence; identical to SEQ ID NO: 105894
  derived and/or modified CDS sequence (opt2) from hemagglutinin__InfluenzaA__AHL99677

SEQ ID NO: 107751 - RNA, 1701 nt, Artificial Sequence; identical to SEQ ID NO: 105894
  derived and/or modified CDS sequence (opt2) from hemagglutinin__InfluenzaA__AHL99689

SEQ ID NO: 107752 - RNA, 1701 nt, Artificial Sequence
  derived and/or modified CDS sequence (opt2) from hemagglutinin__InfluenzaA__AHL99701
augaagaccaucaucgcccucuccuacauccucugccucgucuucgcccagaagcuccccggcaacgacaacuccaccgccacccucugccucggccaccacgccguccccaacggcaccaucgucaagaccaucaccaacgaccgcaucgaggucaccaacgccaccgagcucguccagaacuccuccaucggcgagaucugcgacuccccccaccagauccucgacggcgagaacugcacccucaucgacgcccuccucggcgacccccagugcgacggcuuccagaacaagaagugggaccucuucgucgagcgcuccaaggccuacuccaacugcuaccccuacgacguccccgacuacgccucccuccgcucccucgucgccuccuccggcacccucgaguucaacaacgaguccuucaacugggccggcgucacccagaacggcaccuccuccgccugcauccgcggcuccaacuccuccuucuucucccgccucaacuggcucacccaccucaacuucaaguaccccgcccucaacgucaccaugcccaacaacgagcaguucgacaagcucuacaucuggggcguccaccaccccggcaccgacaaggaccagaucuuccucuacgcccaguccuccggccgcaucaccgucuccaccaagcgcucccagcaggccgucacccccaacaucggcucccgcccccgcauccgcaacauccccucccgcaucuccaucuacuggaccaucgucaagcccggcgacauccuccucaucaacuccaccggcaaccucaucgccccccgcggcuacuucaagauccgcuccggcaaguccuccaucaugcgcuccgacgcccccaucggcaagugcaaguccgagugcaucacccccaacggcuccauccccaacgacaagcccuuccagaacgucaaccgcaucaccuacggcgccugcccccgcuacgucaagcaguccacccucaagcucgccaccggcaugcgcaacguccccgagaagcagacccgcggcaucuucggcgccaucgccggcuucaucgagaacggcugggagggcaugauggacggcugguacggcuuccgccaccagaacuccgagggccgcggccaggccgccgaccucaaguccacccaggccgccaucgaccagaucaacggcaagcucaaccgccucaucggcaagaccaacgagaaguuccaccagaucgagaaggaguucuccgaggucgagggccgcauccaggaccucgagaaguacgucgaggacaccaagaucgaccucugguccuacaacgccgagcuccucgucgcccucgagaaccagcacaccaucgaccucaccgacuccgagaugaacaagcucuucgagaagaccaagaagcagcuccgcgagaacgccgaggacaugggcaacggcugcuucaagaucuaccacaagugcgacaacgccugcaucggcuccauccgcaacggcaccuacgaccacgacgucuaccgcgacgaggcccucaacaaccgcuuccagaucaagggcgucgagcucaaguccggcuacaaggacuggauccucuggaucuccuucgccaucuccugcuuccuccucugcgucgcccuccucggcuucaucaugugggccugccagaagggcaacauccgcugcaacaucugcaucuga

SEQ ID NO: 107753 - RNA, 1701 nt, Artificial Sequence
  derived and/or modified CDS sequence (opt2) from hemagglutinin__InfluenzaA__AHL99713
augaagaccaucaucgcccucuccuacauccucugccucgucuucgcccagaagcuccccggcaacgacaacuccaccgccacccucugccucggccaccacgccguccccaacggcaccaucgucaagaccaucaccaacgaccgcaucgaggucaccaacgccaccgagcucguccagaacuccuccaucggcgagaucugcgacuccccccaccagauccucgacggcgagaacugcacccucaucgacgcccuccucggcgacccccagugcgacggcuuccagaacaagaagugggaccucuucgucgagcgcuccaaggccuacuccaacugcuaccccuacgacguccccgacuacaccucccuccgcucccucgucgccuccuccggcacccucgaguucaacaacgaguccuucaacuggaccggcgucacccagaacggcaccuccuccgccugcauccgccgcuccaacuccuccuucuucucccgccucaacuggcucacccaccucaacuucaaguaccccgcccucaacgucaccaugcccaacaacgagcaguucgacaagcucuacaucuggggcguccaccaccccggcaccgacaaggaccagaucuuccucuacgcccaguccuccggccgcaucaccgucuccaccaagcgcucccagcaggccgucauccccaacaucggcucccgcccccgcauccgcaacauccccucccgcaucuccaucuacuggaccaucgucaagcccggcgacauccuccucaucaacuccaccggcaaccucaucgccccccgcggcuacuucaagauccgcuccggcaaguccuccaucaugcgcuccgacgcccccaucggcaagugcaaguccgagugcaucacccccaacggcuccauccccaacgacaagcccuuccagaacgucaaccgcaucaccuacggcgccugcccccgcuacgucaagcaguccacccucaagcucgccaccggcaugcgcaacguccccgagaagcagacccgcggcaucuucggcgccaucgccggcuucaucgagaacggcugggagggcauggucgacggcugguacggcuuccgccaccagaacuccgagggccgcggccaggccgccgaccucaaguccacccaggccgccaucgaccagaucaacggcaagcucaaccgccucaucggcaagaccaacgagaaguuccaccagaucgagaaggaguucuccgaggucgagggccgcauccaggaccucgagaaguacgucgaggacaccaagaucgaccucugguccuacaacgccgagcuccucgucgcccucgagaaccagcacaccaucgaccucaccgacuccgagaugaacaagcucuucgagaagaccaagaagcagcuccgcgagaacgccgaggacaugggcaacggcugcuucaagaucuaccacaagugcgacaacgccugcaucggcuccauccgcaacggcaccuacgaccacgacgucuaccgcgacgaggcccucaacaaccgcuuccagaucaagggcgucgagcucaaguccggcuacaaggacuggauccucuggaucuccuucgccaucaccugcuuccuccucugcgucgcccuccucggcuucaucaugugggccugccagaagggcaacauccgcugcaacaucugcaucuga

SEQ ID NO: 107754 - RNA, 1701 nt, Artificial Sequence; identical to SEQ ID NO: 105894
  derived and/or modified CDS sequence (opt2) from hemagglutinin__InfluenzaA__AHL99725

SEQ ID NO: 107755 - RNA, 1701 nt, Artificial Sequence; identical to SEQ ID NO: 106096
  derived and/or modified CDS sequence (opt2) from hemagglutinin__InfluenzaA__AHL99737

SEQ ID NO: 107756 - RNA, 1701 nt, Artificial Sequence; identical to SEQ ID NO: 105894
  derived and/or modified CDS sequence (opt2) from hemagglutinin__InfluenzaA__AHL99748

SEQ ID NO: 107757 - RNA, 1701 nt, Artificial Sequence; identical to SEQ ID NO: 105894
  derived and/or modified CDS sequence (opt2) from hemagglutinin__InfluenzaA__AHL99760

SEQ ID NO: 107758 - RNA, 1701 nt, Artificial Sequence; identical to SEQ ID NO: 105904
  derived and/or modified CDS sequence (opt2) from hemagglutinin__InfluenzaA__AHL99772

SEQ ID NO: 107759 - RNA, 1701 nt, Artificial Sequence; identical to SEQ ID NO: 105919
  derived and/or modified CDS sequence (opt2) from hemagglutinin__InfluenzaA__AHL99784

SEQ ID NO: 107760 - RNA, 1701 nt, Artificial Sequence; identical to SEQ ID NO: 106059
  derived and/or modified CDS sequence (opt2) from hemagglutinin__InfluenzaA__AHL99796

SEQ ID NO: 107761 - RNA, 1701 nt, Artificial Sequence; identical to SEQ ID NO: 105894
  derived and/or modified CDS sequence (opt2) from hemagglutinin__InfluenzaA__AHL99808

SEQ ID NO: 107762 - RNA, 1701 nt, Artificial Sequence
  derived and/or modified CDS sequence (opt2) from hemagglutinin__InfluenzaA__AHL99820
augaagaccaucaucgcccucuccuacauccucugccucgucuucgcccagaagcuccccggcaacgacaacuccaccgccacccucugccucggccaccacgccguccccaacggcaccaucgucaagaccaucaccaacgaccgcaucgaggucaccaacgccaccgagcucguccagaacuccuccaucggcgagaucugcgacuccccccaccagauccucgacggcgagaacugcacccucaucgacgcccuccucggcgacccccagugcgacggcuuccagaacaagaagugggaccucuucgucgagcgcuccaaggccuacuccaacugcuaccccuacgacguccccgacuacgccucccuccgcucccucgucgccuccuccggcacccucgaguucaacaacgaguccuucaacuggaccggcgucacccagaacggcaccuccuccgccugcauccgccgcuccaacuccuccuucuucucccgccucaacuggcucacccaccucaacuucaaguaccccgcccucaacgucaccaugcccaacaacgagcaguucgacaagcucuacaucuggggcguccaccaccccggcaccgacaaggaccagaucuuccucuacgcccaguccuccggccgcaucaccgucuccaccaagcgcucccagcaggccgucauccccaacaucggcucccgcccccgcauccgcaacauccccucccgcaucuccaucuacuggaccaucgucaagcccggcgacauccuccucaucaacuccaccggcaaccucaucgccccccgcggcuacuucaagauccgcuccggcaaguccuccaucaugcgcuccgacgcccccaucggcaagugcaaguccgagugcaucacccccaacggcuccauccccaacgacaagcccuuccagaacgucaaccgcaucaccuacggcgccugcccccgcuacgucaagcaguccacccucaagcucgccaccggcaugcgcaacguccccgagaagcagacccgcggcaucuucggcgccaucgccggcuucaucgagaacggcugggagggcauggucgacggcugguacggcuuccgccaccagaacuccgacggccgcggccaggccgccgaccucaaguccacccaggccgccaucgaccagaucaacggcaagcucaaccgccucaucggcaagaccaacgagaaguuccaccagaucgagaaggaguucuccgaggucgagggccgcauccaggaccucgagaaguacgucgaggacaccaagaucgaccucugguccuacaacgccgagcuccucgucgcccucgagaaccagcacaccaucgaccucaccgacuccgagaugaacaagcucuucgagaagaccaagaagcagcuccgcgagaacgccgaggacaugggcaacggcugcuucaagaucuaccacaagugcgacaacgccugcaucggcuccauccgcaacggcaccuacgaccacgacgucuaccgcgacgaggcccucaacaaccgcuuccagaucaagggcgucgagcucaaguccggcuacaaggacuggauccucuggaucuccuucgccaucuccugcuuccuccucugcgucguccuccucggcuucaucaugugggccugccagaagggcaacauccgcugcaacaucugcaucuga

SEQ ID NO: 107763 - RNA, 1701 nt, Artificial Sequence; identical to SEQ ID NO: 105894
  derived and/or modified CDS sequence (opt2) from hemagglutinin__InfluenzaA__AHL99832

SEQ ID NO: 107764 - RNA, 1701 nt, Artificial Sequence; identical to SEQ ID NO: 105919
  derived and/or modified CDS sequence (opt2) from hemagglutinin__InfluenzaA__AHL99844

SEQ ID NO: 107765 - RNA, 1701 nt, Artificial Sequence; identical to SEQ ID NO: 105871
  derived and/or modified CDS sequence (opt2) from hemagglutinin__InfluenzaA__AHL99856

SEQ ID NO: 107766 - RNA, 1701 nt, Artificial Sequence
  derived and/or modified CDS sequence (opt2) from hemagglutinin__InfluenzaA__AHL99868
augaagaccaucaucgcccucuccuacauccucugccucgucuucgcccaggagcuccccggcaacgacgacuccaccgccacccucugccucggccaccacgccguccccaacggcaccaucgucaagaccaucaccaacgaccagaucgaggucaccaacgccaccgagcucguccaguccuccuccaccggcgagaucugcaacuccccccaccagauccucgacggcgagaacugcacccucaucgacgcccuccucggcgacccccagugcgacggcuuccagaacaagaagugggaccucuucgucgagcgcuccaaggcccacuccaacugcuaccccuacgacguccccgacuacgccucccuccgcucccucgucgccuccuccggcacccucgaguucaacaacgaguccuucaacuggaccggcgucacccagaacggcaccuccuccgccugcauccgccgcuccaacaacuccuucuucucccgccucaacuggcucacccaccucaacuucaaguaccccgcccucaacgucaccaugcccaacaacgagcaguucgacaagcucuacaucuggggcguccaccaccccggcaccgacaaggaccagaucuuccucuacgcccaggccuccggccgcaucaccgucuccaccaagaagucccagcaggccgucauccccaacaucggcucccgcccccgcguccgcaacauccccucccgcgucuccaucuacuggaccaucgucaagcccggcgacauccuccucaucaacuccaccggcaaccucaucgccccccgcggcuacuucaagauccgcuccggcaaguccuccaucaugcgcuccgacgcccccaucggcaagugcaacuccgccugcaucacccccaacggcuccauccccaacgacaagcccuuccagaacgucaaccgcaucaccuacggcgccugcccccgcuacgucaagcagaacacccucaagcucgccaccggcaugcgcaacguccccgagaagcagacccgcggcaucuucggcgccaucgccggcuucaucgagaacggcugggagggcauggucgacggcugguacggcuuccgccaccagaacuccgagggccgcggccaggccgccgaccucaaguccacccaggccgccaucgaccagaucaacggcaagcucaaccgccucaucggcaagaccaacgagaaguuccaccagaucgagaaggaguucuccgaggucgagggccgcauccaggaccucgagaaguacgucgaggacaccaagaucgaccucugguccuacaacgccgagcuccucgucgcccucgagaaccagcacaccaucgaccucaccgacuccgagaugaacaagcucuucgagaagaccaagaagcagcuccgcgagaacgccgaggacaugggcaacggcugcuucaagaucuaccacaagugcgacaacgccugcaucggcuccauccgcaacggcaccuacgaccacgacgucuaccgcgacgaggcccucaacaaccgcuuccagaucaagggcgucgagcucaaguccggcuacaaggacuggauccucuggaucuccuucgccaucuccugcuuccuccucugcgucgcccuccucggcuucaucaugugggccugccagaagggcaacauccgcugcaacaucugcaucuga

SEQ ID NO: 107767 - RNA, 1701 nt, Artificial Sequence; identical to SEQ ID NO: 106033
  derived and/or modified CDS sequence (opt2) from hemagglutinin__InfluenzaA__AHL99880

SEQ ID NO: 107768 - RNA, 1701 nt, Artificial Sequence; identical to SEQ ID NO: 105894
  derived and/or modified CDS sequence (opt2) from hemagglutinin__InfluenzaA__AHL99892

SEQ ID NO: 107769 - RNA, 1701 nt, Artificial Sequence; identical to SEQ ID NO: 106030
  derived and/or modified CDS sequence (opt2) from hemagglutinin__InfluenzaA__AHL99904

SEQ ID NO: 107770 - RNA, 1701 nt, Artificial Sequence
  derived and/or modified CDS sequence (opt2) from hemagglutinin__InfluenzaA__AHL99916
augaagaccaucaucgcccucuccuacauccucugccucgucuucgcccagaagcuccccggcaacgacaacuccaccgccacccucugccucggccaccacgccguccccaacggcaccaucgucaagaccaucaccaacgaccgcaucgaggucaccaacgccaccgagcucguccagaacuccuccaucggcgagaucugcgacuccccccaccagauccucgacggcgagaacugcacccucaucgacgcccuccucggcgacccccagugcgacggcuuccagaacaagaagugggaccucuucgucgagcgcuccaaggccuacuccaacugcuaccccuacgacguccccgacuacgccucccuccgcucccucgucgccuccuccggcacccucgaguucaacaacgaguccuucaacugggccggcgucacccagaacggcaccuccuccgccugcauccgcggcuccaacuccuccuucuucucccgccucaacuggcucacccaccucaacuucaaguaccccgcccucaacgucaccaugcccaacaacgagcaguucgacaagcucuacaucuggggcguccaccaccccggcaccgacaaggaccagaucuuccucuacgcccaguccuccggccgcaucaccgucuccaccaagcgcucccagcaggccgucauccccaacaucggcucccgcccccgcauccgcaacauccccucccgcaucuccaucuacuggaccaucgucaagcccggcgacauccuccucaucaacuccaccggcaaccucaucgccccccgcggcuacuucaagaugcgcuccggcaaguccuccaucaugcgcuccgacgcccccaucggcaagugcaaguccgagugcaucacccccaacggcuccauccccaacgacaagcccuuccagaacgucaaccgcaucaccuacggcgccugcccccgcuacgucaagcaguccacccucaagcucgccaccggcaugcgcaacguccccgagaagcagacccgcggcaucuucggcgccaucgccggcuucaucgagaacggcugggagggcaugauggacggcugguacggcuuccgccaccagaacuccgagggccgcggccaggccgccgaccucaaguccacccaggccgccaucgaccagaucaacggcaagcucaaccgccucaucggcaagaccaacgagaaguuccaccagaucgagaaggaguucuccgaggucgagggccgcauccaggaccucgagaaguacgucgaggacaccaagaucgaccucugguccuacaacgccgagcuccucgucgcccucgagaaccagcacaccaucgaccucaccgacuccgagaugaacaagcucuucgagaagaccaagaagcagcuccgcgagaacgccgaggacaugggcaacggcugcuucaagaucuaccacaagugcgacaacgccugcaucggcuccauccgcaacggcaccuacgaccacgacgucuaccgcgacgaggcccucaacaaccgcuuccagaucaagggcgucgagcucaaguccggcuacaaggacuggauccucuggaucuccuucgccaucuccugcuuccuccucugcgucgcccuccucggcuucaucaugugggccugccagaagggcaacauccgcugcaacaucugcaucuga

SEQ ID NO: 107771 - RNA, 1701 nt, Artificial Sequence; identical to SEQ ID NO: 105919
  derived and/or modified CDS sequence (opt2) from hemagglutinin__InfluenzaA__AHL99928

SEQ ID NO: 107772 - RNA, 1701 nt, Artificial Sequence
  derived and/or modified CDS sequence (opt2) from hemagglutinin__InfluenzaA__AHL99940
augaagaccaucaucgcccucuccuacauccucugccucgucuucgcccagaagcuccccggcaacgacaacuccaccgccacccucugccucggccaccacgccguccccaacggcaccaucgucaagaccaucaccaacgaccgcaucgaggucaccaacgccaccgagcucguccagaacuccuccaucggcgagaucugcgacuccccccaccagauccucgacggcgagaacugcacccucaucgacgcccuccucggcgacccccagugcgacggcuuccagaacaagaagugggaccucuucgucgagcgcuccaaggccuacuccaacugcuaccccuacgacguccccgacuacgccucccuccgcucccucgucgccuccuccggcacccucgaguucaacaacgaguccuucaacuggaccggcgucacccagaacggcaccuccuccgccugcauccgccgcuccaacuccuccuucuucucccgccucaacuggcucacccaccucaacuucaaguaccccgcccucaacgucaccaugcccaacaacgagcaguucgacaagcucuacaucuggggcguccaccaccccggcaccgacaaggaccagaucuuccucuacgcccaguccuccggccgcaucaccgucuccaccaagcgcucccagcaggccgucauccccaacaucggcucccgcccccgcauccgcaacauccccucccgcaucuccaucuacuggaccaucgucaagcccggcgacauccuccucaucaacuccaccggcaaccucaucgccccccgcggcuacuucaagauccgcuccggcaaguccuccaucaugcgcuccgacgcccccaucggcaagugcaaguccgagugcaucacccccaacggcuccauccccaacgacaagcccuuccagaacgucaaccgcaucaccuacggcgccugcccccgcuacgucaagcaguccacccucaagcucgccaccggcaugcgcaacguccccgagaagcagacccgcggcaucuucggcgccaucgccggcuucaucgagaacggcugggagggcauggucgacggcugguacggcuuccgccaccagaacuccgagggccgcggccaggccgccgaccucaaguccacccaggccgccaucgaccagaucaacggcaagcucaaccgccucaucggcaagaccaacgagaaguuccaccagaucgagaaggaguucuccggcgucgagggccgcauccaggaccucgagaaguacgucgaggacaccaagaucgaccucugguccuacaacgccgagcuccucgucgcccucgagaaccagcacaccaucgaccucaccgacuccgagaugaacaagcucuucgagaagaccaagaagcagcuccgcgagaacgccgaggacaugggcaacggcugcuucaagaucuaccacaagugcgacaacgccugcaucggcuccauccgcaacggcaccuacgaccacgacgucuaccgcgacgaggcccucaacaaccgcuuccagaucaagggcgucgagcucaaguccggcuacaaggacuggauccucuggaucuccuucgccaucuccugcuuccuccucugcgucgcccuccucggcuucaucaugugggccugccagaagggcaacauccgcugcaacaucugcaucuga

SEQ ID NO: 107773 - RNA, 1701 nt, Artificial Sequence; identical to SEQ ID NO: 105894
  derived and/or modified CDS sequence (opt2) from hemagglutinin__InfluenzaA__AHL99952

SEQ ID NO: 107774 - RNA, 1701 nt, Artificial Sequence; identical to SEQ ID NO: 105919
  derived and/or modified CDS sequence (opt2) from hemagglutinin__InfluenzaA__AHL99964

SEQ ID NO: 107775 - RNA, 1701 nt, Artificial Sequence; identical to SEQ ID NO: 105919
  derived and/or modified CDS sequence (opt2) from hemagglutinin__InfluenzaA__AHL99976

SEQ ID NO: 107776 - RNA, 1701 nt, Artificial Sequence; identical to SEQ ID NO: 105919
  derived and/or modified CDS sequence (opt2) from hemagglutinin__InfluenzaA__AHL99988

SEQ ID NO: 107777 - RNA, 1701 nt, Artificial Sequence; identical to SEQ ID NO: 105894
  derived and/or modified CDS sequence (opt2) from hemagglutinin__InfluenzaA__AHM00001

SEQ ID NO: 107778 - RNA, 1701 nt, Artificial Sequence; identical to SEQ ID NO: 105894
  derived and/or modified CDS sequence (opt2) from hemagglutinin__InfluenzaA__AHM00013

SEQ ID NO: 107779 - RNA, 1701 nt, Artificial Sequence; identical to SEQ ID NO: 105904
  derived and/or modified CDS sequence (opt2) from hemagglutinin__InfluenzaA__AHM00025

SEQ ID NO: 107780 - RNA, 1701 nt, Artificial Sequence; identical to SEQ ID NO: 105919
  derived and/or modified CDS sequence (opt2) from hemagglutinin__InfluenzaA__AHM00037

SEQ ID NO: 107781 - RNA, 1701 nt, Artificial Sequence; identical to SEQ ID NO: 105919
  derived and/or modified CDS sequence (opt2) from hemagglutinin__InfluenzaA__AHM00061

SEQ ID NO: 107782 - RNA, 1701 nt, Artificial Sequence; identical to SEQ ID NO: 105894
  derived and/or modified CDS sequence (opt2) from hemagglutinin__InfluenzaA__AHM00073

SEQ ID NO: 107783 - RNA, 1701 nt, Artificial Sequence; identical to SEQ ID NO: 105894
  derived and/or modified CDS sequence (opt2) from hemagglutinin__InfluenzaA__AHM00085

SEQ ID NO: 107784 - RNA, 1701 nt, Artificial Sequence
  derived and/or modified CDS sequence (opt2) from hemagglutinin__InfluenzaA__AHM00097
augaaggccauccucgucguccuccucuacaccuucgccaccgccaacgccgacacccucugcaucggcuaccacgccaacaacuccaccgacaccgucgacaccguccucgagaagaacgucaccgucacccacuccgucaaccuccucgaggacaagcacaacggcaagcucugcaagcuccgcggcgucgccccccuccaccucggcaagugcaacaucgccggcuggauccucggcaaccccgagugcgagucccucuccaccgccuccuccugguccuacaucgucgagaccuccuccuccgacaacggcaccugcuaccccggcgacuucaucgacuacgaggagcuccgcgagcagcucuccuccgucuccuccuucgagcgcuucgagaucuuccccaagaccuccuccuggcccaaccacgacuccaacaagggcgucaccgccgccugcccccacgccggcgccaagggcuucuacaagaaccucaucuggcucgucaagaagggcaacuccuaccccaagcucuccaacuccuacaucaacgacaagggcaaggagguccucguccucuggggcauccaccaccccuccaccaccgccgaccagcagucccucuaccagaacgccgacaccuacgucuucgucggcaccucccgcuacuccaagaaguucaagcccgagaucgccauccgccccaagguccgcgaccaggagggccgcaugaacuacuacuggacccucgucgagcccggcgacaagaucaccuucgaggccaccggcaaccucgucgucccccgcuacgccuucgccauggagcgcaacgccggcuccggcaucaucaucuccgacaccaccguccacgacugcaacaccaccugccagacccccaagggcgccaucaacaccucccuccccuuccagaacauccaccccaucaccaucggcaagugccccaaguacgucaaguccaccaagcuccgccucgccaccggccuccgcaacguccccuccauccagucccgcggccucuucggcgccaucgccggcuucaucgagggcggcuggaccggcauggucgacggcugguacggcuaccaccaccagaacgagcagggcuccggcuacgccgccgaccucaaguccacccagaacgccaucgacaagaucaccaacaaggucaacuccgucaucgagaagaugaacacccaguucaccgccgucggcaaggaguucaaccaccucgagaagcgcaucgagaaccucaacaagaaggucgacgacggcuuccucgacaucuggaccuacaacgccgagcuccucguccuccucgagaacgagcgcacccucgacuaccacgacuccaacgucaagaaccucuacgagaagguccgcaaccagcucaagaacaacgccaaggagaucggcaacggcugcuucgaguucuaccacaagugcgacaacaugugcauggaguccgucaagaacggcaccuacgacuaccccaaguacuccgaggaggccaagcucaaccgcgagaagaucgacggcgucaagcucgaguccacccgcaucuaccagauccucgccaucuacuccaccgucgccuccucccucguccucgucgucucccucggcgccaucuccuucuggaugugcuccaacggcucccuccagugccgcaucugcaucuga

SEQ ID NO: 107785 - RNA, 1701 nt, Artificial Sequence; identical to SEQ ID NO: 105919
  derived and/or modified CDS sequence (opt2) from hemagglutinin__InfluenzaA__AHM00108

SEQ ID NO: 107786 - RNA, 1701 nt, Artificial Sequence; identical to SEQ ID NO: 105919
  derived and/or modified CDS sequence (opt2) from hemagglutinin__InfluenzaA__AHM00120

SEQ ID NO: 107787 - RNA, 1701 nt, Artificial Sequence
  derived and/or modified CDS sequence (opt2) from hemagglutinin__InfluenzaA__AHM00132
augaagaccaucaucgcccucuccuacauccucugccucgucuucgcccaggagcuccccggcaacgacgacuccaccgccacccucugccucggccaccacgccguccccaacggcaccaucgucaagaccaucaccaacgaccagaucgaggucaccaacgccaccgagcucguccaguccuccuccaccggcgagaucugcaacuccccccaccagauccucgacggcgagaacugcacccucaucgacgcccuccucggcgacccccagugcgacggcuuccagaacaagaagugggaccucuucgucgagcgcuccaaggcccacuccaacugcuaccccuacgacguccccgacuacgccucccuccgcucccucgucgccuccuccggcacccucgaguucaacaacgaguccuucaacuggaccggcgucacccagaacggcaccuccuccgccugcauccgccgcuccaacaacuccuucuucucccgccucaacuggcucacccaccucaacuucaaguaccccgcccucaacgucaccaugcccaacaacgagcaguucgacaagcucuacaucuggggcguccaccaccccggcaccgacaaggaccagaucucccucuacgcccaggccuccggccgcaucaccgucuccaccaagcgcucccagcaggccgucauccccaacaucggcucccgcccccgcguccgcaacauccccucccgcgucuccaucuacuggaccaucgucaagcccggcgacauccuccucaucaacuccaccggcaaccucaucgccccccgcggcuacuucaagauccgcuccggcaaguccuccaucaugcgcuccgacgcccccaucggcaagugcaacuccgccugcaucacccccaacggcuccauccccaacgacaagcccuuccagaacgucaaccgcaucaccuacggcgccugcccccgcuacgucaagcagaacacccucaagcucgccaccggcaugcgcaacguccccgagaagcagacccgcggcaucuucggcgccaucgccggcuucaucgagaacggcugggagggcauggucgacggcugguacggcuuccgccaccagaacuccgagggccgcggccaggccgccgaccucaaguccacccaggccgccaucgaccagaucaacggcaagcucaaccgccucaucggcaagaccaacgagaaguuccaccagaucgagaaggaguucuccgaggucgagggccgcauccaggaccucgagaaguacgucgaggacaccaagaucgaccucugguccuacaacgccgagcuccucgucgcccucgagaaccagcacaccaucgaccucaccgacuccgagaugaacaagcucuucgagaagaccaagaagcagcuccgcgagaacgccgaggacaugggcaacggcugcuucaagaucuaccacaagugcgacaacgccugcaucggcuccauccgcaacggcaccuacgaccacgacgucuaccgcgacgaggcccucaacaaccgcuuccagaucaagggcgucgagcucaaguccggcuacaaggacuggauccucuggaucuccuucgccaucuccugcuuccuccucugcgucgcccuccucggcuucaucaugugggccugccagaagggcaacauccgcugcaacaucugcaucuga

SEQ ID NO: 107788 - RNA, 1701 nt, Artificial Sequence; identical to SEQ ID NO: 105894
  derived and/or modified CDS sequence (opt2) from hemagglutinin__InfluenzaA__AHM00144

SEQ ID NO: 107789 - RNA, 1701 nt, Artificial Sequence; identical to SEQ ID NO: 105919
  derived and/or modified CDS sequence (opt2) from hemagglutinin__InfluenzaA__AHM00156

SEQ ID NO: 107790 - RNA, 1701 nt, Artificial Sequence; identical to SEQ ID NO: 105894
  derived and/or modified CDS sequence (opt2) from hemagglutinin__InfluenzaA__AHM00168

SEQ ID NO: 107791 - RNA, 1701 nt, Artificial Sequence
  derived and/or modified CDS sequence (opt2) from hemagglutinin__InfluenzaA__AHM00180
augaagaccaucaucgcccucuccuacauccucugccucgucuucgcccagaagcuccccggcaacgacaacuccaccgccacccucugccucggccaccacgccguccccaacggcaccaucgucaagaccaucaccaacgaccgcaucgaggucaccaacgccaccgagcucguccagaacuccuccaucggcgagaucugcgacaacccccaccagauccucgacggcgagaacugcacccucaucgacgcccuccucggcgacccccagugcgacggcuuccagaacaagaagugggaccucuucgucgagcgcuccaaggccuacuccaacugcuaccccuacgacguccccgacuacgccucccuccgcucccucgucgccuccuccggcacccucgaguucaacaacgaguccuucaacuggaccggcgucacccagaacggcaccuccuccgccugcauccgccgcuccaacuccuccuucuucucccgccucaacuggcucacccaccucaacuucaaguaccccgcccucaacgucaccaugcccaacaacgagcaguucgacaagcucuacaucuggggcguccaccaccccggcaccgacaaggaccagaucuuccucuacgcccaguccuccggccgcaucaccgucuccaccaagcgcucccagcaggccgucauccccaacaucggcucccgcccccgcauccgcaacauccccucccgcaucuccaucuacuggaccaucgucaagcccggcgacauccuccucaucaacuccaccggcaaccucaucgccccccgcggcuacuucaagauccgcuccggcaaguccuccaucaugcgcuccgacgcccccaucggcaagugcaaguccgagugcaucacccccaacggcuccauccccaacgacaagcccuuccagaacgucaaccgcaucaccuacggcgccugcccccgcuacgucaagcaguccacccucaagcucgccaccggcaugcgcaacguccccgagaagcagacccgcggcaucuucggcgccaucgccggcuucaucgagaacggcugggagggcauggucgacggcugguacggcuuccgccaccagaacuccgagggccgcggccaggccgccgaccucaaguccacccaggccgccaucgaccagaucaacggcaagcucaaccgccucaucggcaagaccaacgagaaguuccaccagaucgagaaggaguucuccgaggucgagggccgcauccaggaccucgagaaguacgucgaggacaccaagaucgaccucugguccuacaacgccgagcuccucgucgcccucgagaaccagcacaccaucgaccucaccgacuccgagaugaacaagcucuucgagaagaccaagaagcagcuccgcgagaacgccgaggacaugggcaacggcugcuucaagaucuaccacaagugcgacaacgccugcaucggcuccauccgcaacggcaccuacgaccacaacgucuaccgcgacgaggcccucaacaaccgcuuccagaucaagggcgucgagcucaaguccggcuacaaggacuggauccucuggaucuccuucgccaucuccugcuuccuccucugcgucgcccuccucggcuucaucaugugggccugccagaagggcaacauccgcugcaacaucugcaucuga

SEQ ID NO: 107792 - RNA, 1701 nt, Artificial Sequence; identical to SEQ ID NO: 105871
  derived and/or modified CDS sequence (opt2) from hemagglutinin__InfluenzaA__AHM00192

SEQ ID NO: 107793 - RNA, 1701 nt, Artificial Sequence; identical to SEQ ID NO: 105919
  derived and/or modified CDS sequence (opt2) from hemagglutinin__InfluenzaA__AHM00204

SEQ ID NO: 107794 - RNA, 1701 nt, Artificial Sequence; identical to SEQ ID NO: 105919
  derived and/or modified CDS sequence (opt2) from hemagglutinin__InfluenzaA__AHM00216

SEQ ID NO: 107795 - RNA, 1701 nt, Artificial Sequence; identical to SEQ ID NO: 105894
  derived and/or modified CDS sequence (opt2) from hemagglutinin__InfluenzaA__AHM00228

SEQ ID NO: 107796 - RNA, 1701 nt, Artificial Sequence; identical to SEQ ID NO: 105894
  derived and/or modified CDS sequence (opt2) from hemagglutinin__InfluenzaA__AHM00240

SEQ ID NO: 107797 - RNA, 1701 nt, Artificial Sequence; identical to SEQ ID NO: 105894
  derived and/or modified CDS sequence (opt2) from hemagglutinin__InfluenzaA__AHM00252

SEQ ID NO: 107798 - RNA, 1701 nt, Artificial Sequence; identical to SEQ ID NO: 105894
  derived and/or modified CDS sequence (opt2) from hemagglutinin__InfluenzaA__AHM00264

SEQ ID NO: 107799 - RNA, 1701 nt, Artificial Sequence; identical to SEQ ID NO: 105871
  derived and/or modified CDS sequence (opt2) from hemagglutinin__InfluenzaA__AHM00276

SEQ ID NO: 107800 - RNA, 1701 nt, Artificial Sequence; identical to SEQ ID NO: 105894
  derived and/or modified CDS sequence (opt2) from hemagglutinin__InfluenzaA__AHM00288

SEQ ID NO: 107801 - RNA, 1701 nt, Artificial Sequence; identical to SEQ ID NO: 105894
  derived and/or modified CDS sequence (opt2) from hemagglutinin__InfluenzaA__AHM00300

SEQ ID NO: 107802 - RNA, 1701 nt, Artificial Sequence; identical to SEQ ID NO: 105919
  derived and/or modified CDS sequence (opt2) from hemagglutinin__InfluenzaA__AHM00312

SEQ ID NO: 107803 - RNA, 1701 nt, Artificial Sequence; identical to SEQ ID NO: 105871
  derived and/or modified CDS sequence (opt2) from hemagglutinin__InfluenzaA__AHM00324

SEQ ID NO: 107804 - RNA, 1701 nt, Artificial Sequence; identical to SEQ ID NO: 105871
  derived and/or modified CDS sequence (opt2) from hemagglutinin__InfluenzaA__AHM00336

SEQ ID NO: 107805 - RNA, 1701 nt, Artificial Sequence; identical to SEQ ID NO: 105919
  derived and/or modified CDS sequence (opt2) from hemagglutinin__InfluenzaA__AHM00348

SEQ ID NO: 107806 - RNA, 1701 nt, Artificial Sequence
  derived and/or modified CDS sequence (opt2) from hemagglutinin__InfluenzaA__AHM00360
augaagaccaucaucgcccucuccuacauccucugccucgucuucgcccagaagcuccccggcaacgacaacuccaccgccacccucugccucggccaccacgccguccccaacggcaccaucgucaagaccaucaccaacgaccagaucgaggucaccaacgccaccgagcucguccagaacuccuccaucggcgagaucugcgacuccccccaccagauccucgacggcgagaacugcacccucaucgacgcccuccucggcgacccccagugcgacggcuuccagaacaagaagugggaccucuucgucgagcgcuccaaggccuacuccaacugcuaccccuacgacguccccgacuacgccucccuccgcucccucgucgccuccuccggcacccucgaguucaacaacgaguccuucaacuggaccggcgucacccagaacggcaccuccuccgccugcauccgccgcuccaacuccuccuucuucucccgccucaacuggcucacccaccucaacuucaaguaccccgcccucaacgucaccaugcccaacaacgagcaguucgacaagcucuacaucuggggcguccaccaccccggcaccgacaaggaccagaucuuccucuacgcccaguccuccggccgcaucaccgucuccaccaagcgcucccagcaggccgucauccccaacaucggcucccgcccccgcauccgcaacauccccucccgcaucuccaucuacuggaccaucgucaagcccggcgacauccuccucaucaacuccaccggcaaccucaucgccccccgcggcuacuucaagauccgcuccggcaaguccuccaucaugcgcuccgacgcccccaucggcaagugcaaguccgagugcaucacccccaacggcuccauccccaacgacaagcccuuccagaacgucaaccgcaucaccuacggcgccugcccccgcuacgucaagcaguccacccucaagcucgccaccggcaugcgcaacguccccgagaagcagacccgcggcaucuucggcgccaucgccggcuucaucgagaacggcugggagggcauggucgacggcugguacggcuuccgccaccagaacuccgagggccgcggccaggccgccgaccucaaguccacccaggccgccaucgaccagaucaacggcaagcucaaccgccucaucggcaagaccaacgagaaguuccaccagaucgagaaggaguucuccgaggucgagggccgcauccaggaccucgagaaguacgucgaggacaccaagaucgaccucugguccuacaacgccgagcuccucgucgcccucgagaaccagcacaccaucgaccucaccgacuccgagaugaacaagcucuucgagaagaccaagaagcagcuccgcgagaacgccgaggacaugggcaacggcugcuucaagaucuaccacaagugcgacaacgccugcaucggcuccauccgcaacggcaccuacgaccacgacgucuaccgcgacgaggcccucaacaaccgcuuccagaucaagggcgucgagcucaaguccggcuacaaggacuggauccucuggaucuccuucgccaucuccugcuuccuccucugcgucgcccuccucggcuucaucaugugggccugccagaagggcaacauccgcugcaacaucugcaucuga

SEQ ID NO: 107807 - RNA, 1701 nt, Artificial Sequence; identical to SEQ ID NO: 105919
  derived and/or modified CDS sequence (opt2) from hemagglutinin__InfluenzaA__AHM00372

SEQ ID NO: 107808 - RNA, 1701 nt, Artificial Sequence; identical to SEQ ID NO: 105919
  derived and/or modified CDS sequence (opt2) from hemagglutinin__InfluenzaA__AHM00395

SEQ ID NO: 107809 - RNA, 1701 nt, Artificial Sequence; identical to SEQ ID NO: 105894
  derived and/or modified CDS sequence (opt2) from hemagglutinin__InfluenzaA__AHM00407

SEQ ID NO: 107810 - RNA, 1701 nt, Artificial Sequence; identical to SEQ ID NO: 105894
  derived and/or modified CDS sequence (opt2) from hemagglutinin__InfluenzaA__AHM00419

SEQ ID NO: 107811 - RNA, 1701 nt, Artificial Sequence; identical to SEQ ID NO: 105894
  derived and/or modified CDS sequence (opt2) from hemagglutinin__InfluenzaA__AHM00443

SEQ ID NO: 107812 - RNA, 1701 nt, Artificial Sequence; identical to SEQ ID NO: 105919
  derived and/or modified CDS sequence (opt2) from hemagglutinin__InfluenzaA__AHM00455

SEQ ID NO: 107813 - RNA, 1701 nt, Artificial Sequence; identical to SEQ ID NO: 105919
  derived and/or modified CDS sequence (opt2) from hemagglutinin__InfluenzaA__AHM00467

SEQ ID NO: 107814 - RNA, 1701 nt, Artificial Sequence; identical to SEQ ID NO: 105919
  derived and/or modified CDS sequence (opt2) from hemagglutinin__InfluenzaA__AHM00479

SEQ ID NO: 107815 - RNA, 1701 nt, Artificial Sequence; identical to SEQ ID NO: 105919
  derived and/or modified CDS sequence (opt2) from hemagglutinin__InfluenzaA__AHM00491

SEQ ID NO: 107816 - RNA, 1701 nt, Artificial Sequence; identical to SEQ ID NO: 105894
  derived and/or modified CDS sequence (opt2) from hemagglutinin__InfluenzaA__AHM00503

SEQ ID NO: 107817 - RNA, 1701 nt, Artificial Sequence; identical to SEQ ID NO: 105894
  derived and/or modified CDS sequence (opt2) from hemagglutinin__InfluenzaA__AHM00515

SEQ ID NO: 107818 - RNA, 1701 nt, Artificial Sequence
  derived and/or modified CDS sequence (opt2) from hemagglutinin__InfluenzaA__AHM00527
augaagaccaucaucgcccucuccuacauccucugccucgucuucgcccagaagcuccccggcaacgacaacuccaccgccacccucugccucggccaccacgccguccccaacggcaccaucgucaagaccaucaccaacgaccgcaucgaggucaccaacgccaccgagcucguccagaacucccccaucggcgagaucugcgacuccccccaccagauccucgacggcgagaacugcacccucaucgacgcccuccucggcgacccccagugcgacggcuuccagaacaagaagugggaccucuucgucgagcgcuccaaggccuacuccaacugcuaccccuacgacguccccgacuacgccucccuccgcucccucgucgccuccuccggcacccucgaguucaacaacgaguccuucaacuggaccggcgucacccagaacggcaccuccuccgccugcauccgccgcuccaacuccuccuucuucucccgccucaacuggcucacccaccucaacuucaaguaccccgcccucaacgucaccaugcccaacaacgagcaguucgacaagcucuacaucuggggcguccaccaccccggcaccgacaaggaccagaucuuccucuacgcccaguccuccggccgcaucaccgucuccaccaagcgcucccagcaggccgucauccccaacaucggcucccgcccccgcauccgcaacauccccucccgcaucuccaucuacuggaccaucgucaagcccggcgacauccuccucaucaacuccaccggcaaccucaucgccccccgcggcuacuucaagauccgcuccggcaaguccuccaucaugcgcuccgacgcccccaucggcaagugcaaguccgagugcaucacccccaacggcuccauccccaacgacaagcccuuccagaacgucaaccgcaucaccuacggcgccugcccccgcuacgucaagcaguccacccucaagcucgccaccggcaugcgcaacguccccgagaagcagacccgcggcaucuucggcgccaucgccggcuucaucgagaacggcugggagggcauggucgacggcugguacggcuuccgccaccagaacuccgagggccgcggccaggccgccgaccucaaguccacccaggccgccaucgaccagaucaacggcaagcucaaccgccucaucggcaagaccaacgagaaguuccaccagaucgagaaggaguucuccgaggucgagggccgcauccaggaccucgagaaguacgucgaggacaccaagaucgaccucugguccuacaacgccgagcuccucgucgcccucgagaaccagcacaccaucgaccucaccgacuccgagaugaacaagcucuucgagaagaccaagaagcagcuccgcgagaacgccgaggacaugggcaacggcugcuucaagaucuaccacaagugcgacaacgccugcaucggcuccauccgcaacggcaccuacgaccacaacgucuaccgcgacgaggcccucaacaaccgcuuccagaucaagggcgucgagcucaaguccggcuacaaggacuggauccucuggaucuccuucgccaucuccugcuuccuccucugcgucgcccuccucggcuucaucaugugggccugccagaagggcaacauccgcugcaacaucugcaucuga

SEQ ID NO: 107819 - RNA, 1701 nt, Artificial Sequence; identical to SEQ ID NO: 105871
  derived and/or modified CDS sequence (opt2) from hemagglutinin__InfluenzaA__AHM00539

SEQ ID NO: 107820 - RNA, 1701 nt, Artificial Sequence
  derived and/or modified CDS sequence (opt2) from hemagglutinin__InfluenzaA__AHM00543
augaagaccaucaucgcccucuccuacauccucugccucgucuucgcccaggagcuccccggcaacgacgacuccaccgccacccucugccucggccaccacgccguccccaacggcaccaucgucaagaccaucaccaacgaccagaucgaggucaccaacgccaccgagcucguccaguccuccuccaccggcgagaucugcaacuccccccaccagauccucgacggcgagaacugcacccucaucgacgcccuccucggcgacccccagugcgacggcuuccagaacaagaagugggaccucuucgucgagcgcuccaaggcccacuccaacugcuaccccuacgacguccccgacuacgccucccuccgcucccucgucgccuccuccggcaccauggaguucaacaacgaguccuucaacuggaccggcgucacccagaacggcaccuccuccgccugcauccgccgcuccaacaacuccuucuucucccgccucaacuggcucacccaccucaacuucaaguaccccgcccucaacgucaccaugcccaacaacgagcaguucgacaagcucuacaucuggggcguccaccaccccggcaccgacaaggaccagaucuuccucuacgcccaggccuccggccgcaucaccgucuccaccaagcgcucccagcaggccgucauccccaacaucggcucccgcccccgcguccgcaacauccccucccgcgucuccaucuacuggaccaucgucaagcccggcgacauccuccucaucaacuccaccggcaaccucaucgccccccgcggcuacuucaagauccgcuccggcaaguccuccaucaugcgcuccgacgcccccaucggcaagugcaacuccgccugcaucacccccaacggcuccauccccaacgacaagcccuuccagaacgucaaccgcaucaccuacggcgccugcccccgcuacgucaagcagaacacccucaagcucgccaccggcaugcgcaacguccccgagaagcagacccgcggcaucuucggcgccaucgccggcuucaucgagaacggcugggagggcauggucgacggcugguacggcuuccgccaccagaacuccgagggccgcggccaggccgccgaccucaaguccacccaggccgccaucgaccagaucaacggcaagcucaaccgccucaucggcaagaccaacgagaaguuccaccagaucgagaaggaguucuccgaggucgagggccgcauccaggaccucgagaaguacgucgaggacaccaagaucgaccucugguccuacaacgccgagcuccucgucgcccucgagaaccagcacaccaucgaccucaccgacuccgagaugaacaagcucuucgagaagaccaagaagcagcuccgcgagaacgccgaggacaugggcaacggcugcuucaagaucuaccacaagugcgacaacgccugcaucggcuccauccgcaacggcaccuacgaccacgacgucuaccgcgacgaggcccucaacaaccgcuuccagaucaagggcgucgagcucaaguccggcuacaaggacuggauccucuggaucuccuucgccaucuccugcuuccuccucugcgucgcccuccucggcuucaucaugugggccugccagaagggcaacauccgcugcaacaucugcaucuga

SEQ ID NO: 107821 - RNA, 1701 nt, Artificial Sequence; identical to SEQ ID NO: 105894
  derived and/or modified CDS sequence (opt2) from hemagglutinin__InfluenzaA__AHM00555

SEQ ID NO: 107822 - RNA, 1701 nt, Artificial Sequence
  derived and/or modified CDS sequence (opt2) from hemagglutinin__InfluenzaA__AHM00567
augaagaccaucaucgcccucuccuacauccucugccucgucuucgcccagaagcuccccggcaacgacaacuccaccgccacccucugccucggccaccacgccguccccaacggcaccaucgucaagaccaucaccaacgaccgcaucgaggucaccaacgccaccgagcucguccagaacuccuccaucggcgagaucugcgacuccccccaccagauccucgacggcgagaacugcacccucaucgacgcccuccucggcgacccccagugcgacggcuuccagaacaagaagugggaccucuucgucgagcgcuccaaggccuacuccaacugcuaccccuacgacguccccgacuacgccucccuccgcucccucgucgccuccuccggcacccucgaguucaacaacgaguccuucaacuggaccggcgucacccagaacggcaccuccuccgccugcauccgcaaguccaacuccuccuucuucucccgccucaacuggcucacccaccucaacuucaaguaccccgcccucaacgucaccaugcccaacaacgagcaguucgacaagcucuacaucuggggcguccaccaccccggcaccgacaaggaccagaucuuccucuacgcccaguccuccggccgcaucaccgucuccaccaagcgcucccagcaggccgucauccccaacaucggcucccgcccccgcauccgcaacauccccucccgcaucuccaucuacuggaccaucgucaagcccggcgacauccuccucaucaacuccaccggcaaccucaucgccccccgcggcuacuucaagauccgcuccggcaaguccuccaucaugcgcuccgacgcccccaucggcaagugcaaguccgagugcaucacccccaacggcuccauccccaacgacaagcccuuccagaacgucaaccgcaucaccuacggcgccugcccccgcuacgucaagcaguccacccucaagcucgccaccggcaugcgcaacguccccgagaagcagacccgcggcaucuucggcgccaucgccggcuucaucgagaacggcugggagggcauggucgacggcugguacggcuuccgccaccagaacuccgagggccgcggccaggccgccgaccucaaguccacccaggccgccaucgaccagaucaacggcaagcucaaccgccucaucggcaagaccaacgagaaguuccaccagaucgagaaggaguucuccgaggucgagggccgcauccaggaccucgagaaguacgucgaggacaccaagaucgaccucugguccuacaacgccgagcuccucgucgcccucgagaaccagcacaccaucgaccucaccgacuccgagaugaacaagcucuucgagaagaccaagaagcagcuccgcgagaacgccgaggacaugggcaacggcugcuucaagaucuaccacaagugcgacaacgccugcaucggcuccauccgcaacggcaccuacgaccacgacgucuaccgcgacgaggcccucaacaaccgcuuccagaucaagggcgucgagcucaaguccggcuacaaggacuggauccucuggaucuccuucgccaucuccugcuuccuccucugcgucgcccuccucggcuucaucaugugggccugccagaagggcaacauccgcugcaacaucugcaucuga

SEQ ID NO: 107823 - RNA, 1701 nt, Artificial Sequence; identical to SEQ ID NO: 105894
  derived and/or modified CDS sequence (opt2) from hemagglutinin__InfluenzaA__AHM00579

SEQ ID NO: 107824 - RNA, 1701 nt, Artificial Sequence; identical to SEQ ID NO: 105919
  derived and/or modified CDS sequence (opt2) from hemagglutinin__InfluenzaA__AHM00591

SEQ ID NO: 107825 - RNA, 1701 nt, Artificial Sequence; identical to SEQ ID NO: 105894
  derived and/or modified CDS sequence (opt2) from hemagglutinin__InfluenzaA__AHM00603

SEQ ID NO: 107826 - RNA, 1701 nt, Artificial Sequence; identical to SEQ ID NO: 105894
  derived and/or modified CDS sequence (opt2) from hemagglutinin__InfluenzaA__AHM00615

SEQ ID NO: 107827 - RNA, 1701 nt, Artificial Sequence
  derived and/or modified CDS sequence (opt2) from hemagglutinin__InfluenzaA__AHM00627
augaagaccaccaucgcccucuccuacauccucugccucgucuucgcccagaagcuccccggcaacgacaacuccaccgccacccucugccucggccaccacgccguccccaacggcaccaucgucaagaccaucaccaacgaccgcaucgaggucaccaacgccaccgagcucguccagaacuccuccaucggcgagaucugcgacuccccccaccagauccucgacggcgagaacugcacccucaucgacgcccuccucggcgacccccagugcgacggcuuccagaacaagaagugggaccucuucgucgagcgcuccaaggccuacuccaacugcuaccccuacgacguccccgacuacgccucccuccgcucccucgucgccuccuccggcacccucgaguucaacaacgaguccuucaacuggaccggcgucacccagaacggcaccuccuccgccugcauccgccgcuccaacuccuccuucuucucccgccucaacuggcucacccaccucaacuucaaguaccccgcccucaacgucaccaugcccaacaacgagcaguucgacaagcucuacaucuggggcguccaccaccccggcaccgacaaggaccagaucuuccucuacgcccaguccuccggccgcaucaccgucuccaccaagcgcucccagcaggccgucauccccaacaucggcucccgcccccgcauccgcaacauccccucccgcaucuccaucuacuggaccaucgucaagcccggcgacauccuccucaucaacuccaccggcaaccucaucgccccccgcggcuacuucaagauccgcuccggcaaguccuccaucaugcgcuccgacgcccccaucggcaagugcaaguccgagugcaucacccccaacggcuccauccccaacgacaagcccuuccagaacgucaaccgcaucaccuacggcgccugcccccgcuacgucaagcaguccacccucaagcucgccaccggcaugcgcaacguccccgagaagcagacccgcggcaucuucggcgccaucgccggcuucaucgagaacggcugggagggcauggucgacggcugguacggcuuccgccaccagaacuccgagggccgcggccaggccgccgaccucaaguccacccaggccgccaucgaccagaucaacggcaagcucaaccgccucaucggcaagaccaacgagaaguuccaccagaucgagaaggaguucuccgaggucgagggccgcauccaggaccucgagaaguacgucgaggacaccaagaucgaccucugguccuacaacgccgagcuccucgucgcccucgagaaccagcacaccaucgaccucaccgacuccgagaugaacaagcucuucgagaagaccaagaagcagcuccgcgagaacgccgaggacaugggcaacggcugcuucaagaucuaccacaagugcgacaacgccugcaucggcuccauccgcaacggcaccuacgaccacaacgucuaccgcgacgaggcccucaacaaccgcuuccagaucaagggcgucgagcucaaguccggcuacaaggacuggauccucuggaucuccuucgccaucuccugcuuccuccucugcgucgcccuccucggcuucaucaugugggccugccagaagggcaacauccgcugcaacaucugcaucuga

SEQ ID NO: 107828 - RNA, 1701 nt, Artificial Sequence; identical to SEQ ID NO: 105894
  derived and/or modified CDS sequence (opt2) from hemagglutinin__InfluenzaA__AHM00639

SEQ ID NO: 107829 - RNA, 1701 nt, Artificial Sequence; identical to SEQ ID NO: 105871
  derived and/or modified CDS sequence (opt2) from hemagglutinin__InfluenzaA__AHM00651

SEQ ID NO: 107830 - RNA, 1701 nt, Artificial Sequence; identical to SEQ ID NO: 106030
  derived and/or modified CDS sequence (opt2) from hemagglutinin__InfluenzaA__AHM00663

SEQ ID NO: 107831 - RNA, 1701 nt, Artificial Sequence; identical to SEQ ID NO: 105919
  derived and/or modified CDS sequence (opt2) from hemagglutinin__InfluenzaA__AHM00675

SEQ ID NO: 107832 - RNA, 1701 nt, Artificial Sequence; identical to SEQ ID NO: 106981
  derived and/or modified CDS sequence (opt2) from hemagglutinin__InfluenzaA__AHM00687

SEQ ID NO: 107833 - RNA, 1701 nt, Artificial Sequence
  derived and/or modified CDS sequence (opt2) from hemagglutinin__InfluenzaA__AHM00698
augaagaccaucaucgcccucuccuacauccucugccucgucuucgcccaggagcuccccggcaacgacgacuccaccgccacccucugccucggccaccacgccguccccaacggcaccaucgucaagaccaucaccaacgaccagaucgaggucaccaacgccaccgagcucguccaguccuccuccaccggcgagaucugcaacuccccccaccagauccucgacggcgagaacugcacccucaucgacgcccuccucggcgacccccagugcgacggcuuccagaacaagaagugggaccucuucgucgagcgcuccaaggcccacuccaacugcuaccccuacgacguccccgacuacgccucccuccgcucccucgucgccuccuccggcacccucgaguucaacaacgaguccuucaacuggaccggcgucacccagaacggcaccuccuccgccugcacccgccgcuccaacaacuccuucuucucccgccucaacuggcucacccaccucaacuucaaguaccccgcccucaacgucaccaugcccaacaacgagcaguucgacaagcucuacaucuggggcguccaccaccccggcaccgacaaggaccagaucuuccucuacgcccaggccuccggccgcaucaccgucuccaccaagcgcucccagcaggccgucauccccaacaucggcucccgcccccgcguccgcaacauccccucccgcgucuccaucuacuggaccaucgucaagcccggcgacauccuccucaucaacuccaccggcaaccucaucgccccccgcggcuacuucaagauccgcuccggcaaguccuccaucaugcgcuccgacgcccccaucggcaagugcaacuccgccugcaucacccccaacggcuccauccccaacgacaagcccuuccagaacgucaaccgcaucaccuacggcgccugcccccgcuacgucaagcagaacacccucaagcucgccaccggcaugcgcaacguccccgagaagcagacccgcggcaucuucggcgccaucgccggcuucaucgagaacggcugggagggcauggucgacggcugguacggcuuccgccaccagaacuccgagggccgcggccaggccgccgaccucaaguccacccaggccgccaucgaccagaucaacggcaagcucaaccgccucaucggcaagaccaacgagaaguuccaccagaucgagaaggaguucuccgaggucgagggccgcauccaggaccucgagaaguacgucgaggacaccaagaucgaccucugguccuacaacgccgagcuccucgucgcccucgagaaccagcacaccaucgaccucaccgacuccgagaugaacaagcucuucgagaagaccaagaagcagcuccgcgagaacgccgaggacaugggcaacggcugcuucaagaucuaccacaagugcgacaacgccugcaucggcuccauccgcaacggcaccuacgaccacgacgucuaccgcgacgaggcccucaacaaccgcuuccagaucaagggcgucgagcucaaguccggcuacaaggacuggauccucuggaucuccuucgccaucuccugcuuccuccucugcgucgcccuccucggcuucaucaugugggccugccagaagggcaacauccgcugcaacaucugcaucuga

SEQ ID NO: 107834 - RNA, 1701 nt, Artificial Sequence; identical to SEQ ID NO: 105894
  derived and/or modified CDS sequence (opt2) from hemagglutinin__InfluenzaA__AHM00710

SEQ ID NO: 107835 - RNA, 1701 nt, Artificial Sequence; identical to SEQ ID NO: 105894
  derived and/or modified CDS sequence (opt2) from hemagglutinin__InfluenzaA__AHM00722

SEQ ID NO: 107836 - RNA, 1701 nt, Artificial Sequence; identical to SEQ ID NO: 105894
  derived and/or modified CDS sequence (opt2) from hemagglutinin__InfluenzaA__AHM00734

SEQ ID NO: 107837 - RNA, 1701 nt, Artificial Sequence; identical to SEQ ID NO: 106029
  derived and/or modified CDS sequence (opt2) from hemagglutinin__InfluenzaA__AHM00746

SEQ ID NO: 107838 - RNA, 1701 nt, Artificial Sequence; identical to SEQ ID NO: 105894
  derived and/or modified CDS sequence (opt2) from hemagglutinin__InfluenzaA__AHM00758

SEQ ID NO: 107839 - RNA, 1701 nt, Artificial Sequence; identical to SEQ ID NO: 106062
  derived and/or modified CDS sequence (opt2) from hemagglutinin__InfluenzaA__AHM00770

SEQ ID NO: 107840 - RNA, 1701 nt, Artificial Sequence; identical to SEQ ID NO: 105871
  derived and/or modified CDS sequence (opt2) from hemagglutinin__InfluenzaA__AHM00782

SEQ ID NO: 107841 - RNA, 1701 nt, Artificial Sequence
  derived and/or modified CDS sequence (opt2) from hemagglutinin__InfluenzaA__AHM00794
augaagaccaucaucgcccucuccuacauccucugccucgucuucacccagaagcuccccggcaacgacaacuccaccgccacccucugccucggccaccacgccguccccaacggcaccaucgucaagaccaucaccaacgaccgcaucgaggucaccaacgccaccgagcucguccagaacuccuccaucggcgagaucugcgacuccccccaccagauccucgacggcgagaacugcacccucaucgacgcccuccucggcgacccccagugcgacggcuuccagaacaagaagugggaccucuucgucgagcgcuccaaggccuacuccaacugcuaccccuacgacguccccgacuacgccucccuccgcucccucgucgccuccuccggcacccucgaguucaacaacgaguccuucaacuggaccggcgucacccagaacggcaccuccuccgccugcauccgccgcuccaacuccuccuucuucucccgccucaacuggcucacccaccucaacuucaaguaccccgcccucaacgucaccaugcccaacaacgagcaguucgacaagcucuacaucuggggcguccaccaccccggcaccgacaaggaccagaucuuccucuacgcccaguccuccggccgcaucaccgucuccaccaagcgcucccagcaggccgucauccccaacaucggcucccgcccccgcauccgcaacauccccucccgcaucuccaucuacuggaccaucgucaagcccggcgacauccuccucaucaacuccaccggcaaccucaucgccccccgcggcuacuucaagauccgcuccggcaaguccuccaucaugcgcuccgacgcccccaucggcaagugcaaguccgagugcaucacccccaacggcuccauccccaacgacaagcccuuccagaacgucaaccgcaucaccuacggcgccugcccccgcuacgucaagcaguccacccucaagcucgccaccggcaugcgcaacguccccgagaagcagacccgcggcaucuucggcgccaucgccggcuucaucgagaacggcugggagggcauggucgacggcugguacggcuuccgccaccagaacuccgagggccgcggccaggccgccgaccucaaguccacccaggccgccaucgaccagaucaacggcaagcucaaccgccucaucggcaagaccaacgagaaguuccaccagaucgagaaggaguucuccgaggucgagggccgcauccaggaccucgagaaguacgucgaggacaccaagaucgaccucugguccuacaacgccgagcuccucgucgcccucgagaaccagcacaccaucgaccucaccgacuccgagaugaacaagcucuucgagaagaccaagaagcagcuccgcgagaacgccgaggacaugggcaacggcugcuucaagaucuaccacaagugcgacaacgccugcaucggcuccauccgcaacggcaccuacgaccacgacgucuaccgcgacgaggcccucaacaaccgcuuccagaucaagggcgucgagcucaaguccggcuacaaggacuggauccucuggaucuccuucgccaucuccugcuuccuccucugcgucgcccuccucggcuucaucaugugggccugccagaagggcaacauccgcugcaacaucugcaucuga

SEQ ID NO: 107842 - RNA, 1701 nt, Artificial Sequence; identical to SEQ ID NO: 106062
  derived and/or modified CDS sequence (opt2) from hemagglutinin__InfluenzaA__AHM00806

SEQ ID NO: 107843 - RNA, 1701 nt, Artificial Sequence
  derived and/or modified CDS sequence (opt2) from hemagglutinin__InfluenzaA__AHM00818
augaagaccaucaucgcccucuccuacauccucugccucgucuucgcccagaagcuccccggcaacgacaacuccaccgccacccucugccucggccaccacgccguccccaacggcaccaucgucaagaccaucaccaacgaccgcaucgaggucaccaacgccaccgagcucguccagaacuccuccaucggcgagaucugcgacuccccccaccagauccucgacggcgagaacugcacccucaucgacgcccuccucggcgacccccagugcgacggcuuccagaacaagaagugggaccucuucgucgagcgcuccaaggccuacuccaacugcuaccccuacgacguccccgacuacgccucccuccgcucccucgucgccuccuccggcacccucgaguucaacaacgagaacuucaacuggaccggcgucacccagaacggcaccuccuccgccugcauccgccgcuccaacuccuccuucuucucccgccucaacuggcucacccaccucaacuucaaguaccccgcccucaacgucaccaugcccaacaacgagcaguucgacaagcucuacaucuggggcguccaccaccccggcaccgacaaggaccagaucuuccucuacgcccaguccuccggccgcaucaccgucuccaccaagcgcucccagcaggccgucauccccaacaucggcucccgcccccgcauccgcaacauccccucccgcaucuccaucuacuggaccaucgucaagcccggcgacauccuccucaucaacuccaccggcaaccucaucgccccccgcggcuacuucaagauccgcuccggcaaguccuccaucaugcgcuccgacgcccccaucggcaagugcaaguccgagugcaucacccccaacggcuccauccccaacgacaagcccuuccagaacgucaaccgcaucaccuacggcgccugcccccgcuacgucaagcaguccacccucaagcucgccaccggcaugcgcaacguccccgagaagcagacccgcggcaucuucggcgccaucgccggcuucaucgagaacggcugggagggcauggucgacggcugguacggcuuccgccaccagaacuccgagggccgcggccaggccgccgaccucaaguccacccaggccgccaucgaccagaucaacggcaagcucaaccgccucaucggcaagaccaacgagaaguuccaccagaucgagaaggaguucuccgaggucgagggccgcauccaggaccucgagaaguacgucgaggacaccaagaucgaccucugguccuacaacgccgagcuccucgucgcccucgagaaccagcacaccaucgaccucaccgacuccgagaugaacaagcucuucgagaagaccaagaagcagcuccgcgagaacgccgaggacaugggcaacggcugcuucaagaucuaccacaagugcgacaacgccugcaucggcuccauccgcaacggcaccuacgaccacgacgucuaccgcgacgaggcccucaacaaccgcuuccagaucaagggcgucgagcucaaguccggcuacaaggacuggauccucuggaucuccuucgccaucuccugcuuccuccucugcgucgcccuccucggcuucaucaugugggccugccagaagggcaacauccgcugcaacaucugcaucuga

SEQ ID NO: 107844 - RNA, 1701 nt, Artificial Sequence; identical to SEQ ID NO: 105919
  derived and/or modified CDS sequence (opt2) from hemagglutinin__InfluenzaA__AHM00830

SEQ ID NO: 107845 - RNA, 1701 nt, Artificial Sequence; identical to SEQ ID NO: 105919
  derived and/or modified CDS sequence (opt2) from hemagglutinin__InfluenzaA__AHM00842

SEQ ID NO: 107846 - RNA, 1701 nt, Artificial Sequence; identical to SEQ ID NO: 107822
  derived and/or modified CDS sequence (opt2) from hemagglutinin__InfluenzaA__AHM00854

SEQ ID NO: 107847 - RNA, 1701 nt, Artificial Sequence; identical to SEQ ID NO: 107822
  derived and/or modified CDS sequence (opt2) from hemagglutinin__InfluenzaA__AHM00866

SEQ ID NO: 107848 - RNA, 1701 nt, Artificial Sequence; identical to SEQ ID NO: 105894
  derived and/or modified CDS sequence (opt2) from hemagglutinin__InfluenzaA__AHM00878

SEQ ID NO: 107849 - RNA, 1701 nt, Artificial Sequence; identical to SEQ ID NO: 105871
  derived and/or modified CDS sequence (opt2) from hemagglutinin__InfluenzaA__AHM00890

SEQ ID NO: 107850 - RNA, 1701 nt, Artificial Sequence; identical to SEQ ID NO: 105904
  derived and/or modified CDS sequence (opt2) from hemagglutinin__InfluenzaA__AHM00902

SEQ ID NO: 107851 - RNA, 1701 nt, Artificial Sequence; identical to SEQ ID NO: 105894
  derived and/or modified CDS sequence (opt2) from hemagglutinin__InfluenzaA__AHM00914

SEQ ID NO: 107852 - RNA, 1701 nt, Artificial Sequence; identical to SEQ ID NO: 105894
  derived and/or modified CDS sequence (opt2) from hemagglutinin__InfluenzaA__AHM00926

SEQ ID NO: 107853 - RNA, 1701 nt, Artificial Sequence; identical to SEQ ID NO: 105871
  derived and/or modified CDS sequence (opt2) from hemagglutinin__InfluenzaA__AHM00938

SEQ ID NO: 107854 - RNA, 1701 nt, Artificial Sequence
  derived and/or modified CDS sequence (opt2) from hemagglutinin__InfluenzaA__AHM00950
augaagaccaucaucgcccucuccuacauccucugccucgucuucgcccagaagcuccccggcaacgacaacuccaccgccacccucugccucggccaccacgccguccccaacggcaccaucgucaagaccaucaccaacgaccgcaucgaggucaccaacgccaccgagcucguccagaacuccuccaucggcgagaucugcgacuccccccaccagauccucgacggcgagaacugcacccucaucgacgcccuccucggcgacccccagugcgacggcuuccagaacaagaagugggaccucuucgucgagcgcuccaaggccuacuccaacugcuaccccuacgacguccccgacuacgucucccuccgcucccucgucgccuccuccggcacccucgaguucaacaacgaguccuucaacuggaccggcgucacccagaacggcaccuccuccgccugcauccgccgcuccaacuccuccuucuucucccgccucaacuggcucacccaccucaacuucaaguaccccgcccucaacgucaccaugcccaacaacgagcaguucgacaagcucuacaucuggggcguccaccaccccggcaccgacaaggaccagaucuuccucuacgcccaguccuccggccgcaucaccgucuccaccaagcgcucccagcaggccgucauccccaacaucggcucccgcccccgcauccgcaacauccccucccgcaucuccaucuacuggaccaucgucaagcccggcgacauccuccucaucaacuccaccggcaaccucaucgccccccgcggcuacuucaagauccgcuccggcaaguccuccaucaugcgcuccgacgcccccaucggcaagugcaaguccgagugcaucacccccaacggcuccauccccaacgacaagcccuuccagaacgucaaccgcaucaccuacggcgccugcccccgcuacgucaagcaguccacccucaagcucgccaccggcaugcgcaacguccccgagaagcagacccgcggcaucuucggcgccaucgccggcuucaucgagaacggcugggagggcauggucgacggcugguacggcuuccgccaccagaacuccgagggccgcggccaggccgccgaccucaaguccacccaggccgccaucgaccagaucaacggcaagcucaaccgccucaucggcaagaccaacgagaaguuccaccagaucgagaaggaguucuccgaggucgagggccgcauccaggaccucgagaaguacgucgaggacaccaagaucgaccucugguccuacaacgccgagcuccucgucgcccucgagaaccagcacaccaucgaccucaccgacuccgagaugaacaagcucuucgagaagaccaagaagcagcuccgcgagaacgccgaggacaugggcaacggcugcuucaagaucuaccacaagugcgacaacgccugcaucggcuccauccgcaacggcaccuacgaccacaacgucuaccgcgacgaggcccucaacaaccgcuuccagaucaagggcgucgagcucaaguccggcuacaaggacuggauccucuggaucuccuucgccauguccugcuuccuccucugcgucgcccuccucggcuucaucaugugggccugccagaagggcaacauccgcugcaacaucugcaucuga

SEQ ID NO: 107855 - RNA, 1701 nt, Artificial Sequence; identical to SEQ ID NO: 105871
  derived and/or modified CDS sequence (opt2) from hemagglutinin__InfluenzaA__AHM00962

SEQ ID NO: 107856 - RNA, 1701 nt, Artificial Sequence
  derived and/or modified CDS sequence (opt2) from hemagglutinin__InfluenzaA__AHM00974
augaagaccaucaucgcccucuccuacauccucugccucgucuucgcccaggagcuccccggcaacgacgacuccaccgccacccucugccucggccaccacgccguccccaacggcaccaucgucaagaccaucaccaacgaccagaucgaggucaccaacgccaccgagcucguccaguccuccuccaccggcgagaucugcaacuccccccaccagauccucgacggcgagaacugcacccucaucgacgcccuccucggcgacccccagugcgacggcuuccagaacaagaagugggaccucuucgucgagcgcuccaaggcccacuccaacugcuaccccuacgacguccccgacuacgccucccuccgcucccucgucgccuccuccggcacccucgaguucaacaacgaguccuucaacuggaccggcgucacccagaacggcaccuccuccgccugcauccgccgcuccaacaacuccuucuucucccgccucaacuggcucacccaccucaacuucaaguaccccgcccucaacgucaccaugcccaacaacgagcaguucgacaagcucuacaucuggggcguccaccaccccggcaccgacaaggaccagaucuuccucuacgcccaggccuccggcggcaucaccgucuccaccaagcgcucccagcaggccgucauccccaacaucggcucccgcccccgcguccgcaacauccccucccgcgucuccaucuacuggaccaucgucaagcccggcgacauccuccucaucaacuccaccggcaaccucaucgccccccgcggcuacuucaagauccgcuccggcaaguccuccaucaugcgcuccgacgcccccaucggcaagugcaacuccgccugcaucacccccaacggcuccauccccaacgacaagcccuuccagaacgucaaccgcaucaccuacggcgccugcccccgcuacgucaagcagaacacccucaagcucgccaccggcaugcgcaacguccccgagaagcagacccgcggcaucuucggcgccaucgccggcuucaucgagaacggcugggagggcauggucgacggcugguacggcuuccgccaccagaacuccgagggccgcggccaggccgccgaccucaaguccacccaggccgccaucgaccagaucaacggcaagcucaaccgccucaucggcaagaccaacgagaaguuccaccagaucgagaaggaguucuccgaggucgagggccgcauccaggaccucgagaaguacgucgaggacaccaagaucgaccucugguccuacaacgccgagcuccucgucgcccucgagaaccagcacaccaucgaccucaccgacuccgagaugaacaagcucuucgagaagaccaagaagcagcuccgcgagaacgccgaggacaugggcaacggcugcuucaagaucuaccacaagugcgacaacgccugcaucggcuccauccgcaacggcaccuacgaccacgacgucuaccgcgacgaggcccucaacaaccgcuuccagaucaagggcgucgagcucaaguccggcuacaaggacuggauccucuggaucuccuucgccaucuccugcuuccuccucugcgucgcccuccucggcuucaucaugugggccugccagaagggcaacauccgcugcaacaucugcaucuga

SEQ ID NO: 107857 - RNA, 1683 nt, Artificial Sequence
  derived and/or modified CDS sequence (opt2) from hemagglutinin__InfluenzaA__AHM24224
augaacacccagauccucgucuucgcccucaucgccaucauccccaccaacgccgacaagaucugccucggccaccacgccgucuccaacggcaccaaggucaacacccucaccgagcgcggcgucgaggucgucaacgccaccgagaccgucgagcgcaccaacaucccccgcaucugcuccaagggcaagcgcaccgucgaccucggccagugcggccuccucggcaccaucaccggccccccccagugcgaccaguuccucgaguucuccgccgaccucaucaucgagcgccgcgagggcuccgacgucugcuaccccggcaaguucgucaaggaggaggcccuccgccagauccuccgcgaguccggcggcaucgacaaggaggccaugggcuucaccuacuccggcauccgcaccaacggcgccaccuccgccugccgccgcuccggcuccuccuucuacgccgagaugaaguggcuccucuccaacaccgacaacgccgccuucccccagaugaccaaguccuacaagaacacccgcaagucccccgcccucaucgucuggggcauccaccacuccgucuccaccgccgagcagaccaagcucuacggcuccggcaacaagcucgucaccgucggcuccuccaacuaccagcaguccuucguccccucccccggcgcccgcccccaggucaacggccucuccggccgcaucgacuuccacuggcucaugcucaaccccaacgacaccgucaccuucuccuucaacggcgccuucaucgcccccgaccgcgccuccuuccuccgcggcaaguccaugggcauccaguccggcguccaggucgacgccaacugcgagggcgacugcuaccacuccggcggcaccaucaucuccaaccuccccuuccagaacaucgacucccgcgccgucggcaagugcccccgcuacgucaagcagcgcucccuccuccucgccaccggcaugaagaacguccccgagauccccaagggccgcggccucuucggcgccaucgccggcuucaucgagaacggcugggagggccucaucgacggcugguacggcuuccgccaccagaacgcccagggcgagggcaccgccgccgacuacaaguccacccaguccgccaucgaccagaucaccggcaagcucaaccgccucaucgagaagaccaaccagcaguucgagcucaucgacaacgaguucaacgaggucgagaagcagaucggcaacgucaucaacuggacccgcgacuccaucaccgaggucugguccuacaacgccgagcuccucgucgccauggagaaccagcacaccaucgaccucgccgacuccgagauggacaagcucuacgagcgcgucaagcgccagcuccgcgagaacgccgaggaggacggcaccggcugcuucgagaucuuccacaagugcgacgacgacugcauggccuccauccgcaacaacaccuacgaccacuccaaguaccgcgaggaggccaugcagaaccgcauccagaucgaccccgucaagcucuccuccggcuacaaggacgucauccucugguucuccuucggcgccuccugcuucauccuccucgccaucgucaugggccucgucuucaucugcgucaagaacggcaacaugcgcugcaccaucugcaucuga

SEQ ID NO: 107858 - RNA, 1683 nt, Artificial Sequence; identical to SEQ ID NO: 106024
  derived and/or modified CDS sequence (opt2) from hemagglutinin__InfluenzaA__AHM24236

SEQ ID NO: 107859 - RNA, 1683 nt, Artificial Sequence; identical to SEQ ID NO: 106024
  derived and/or modified CDS sequence (opt2) from hemagglutinin__InfluenzaA__AHM24248

SEQ ID NO: 107860 - RNA, 1701 nt, Artificial Sequence
  derived and/or modified CDS sequence (opt2) from hemagglutinin__InfluenzaA__AHM98309
augaaggccauccucgucguccuccucuacaccuucgccaccgccaacgccgacacccucugcaucggcuaccacgccaacaacuccaccgacaccgucgacaccguccucgagaagaacgucaccgucacccacuccgucaaccuccucgaggacaagcacaacggcaagcucugcaagcuccgcggcgucgccccccuccaccucggcaagugcaacaucgccggcuggauccucggcaaccccgagugcgagucccucuccaccgccuccuccugguccuacaucgucgagaccuccuccuccgacaacggcaccugcuaccccggcgacuucaucaacuacgaggagcuccgcgagcagcucuccuccgucuccuccuucgagcgcuucgaggucuuccccaagaccuccuccuggcccaaccacgacuccaacaagggcgucaccgccgccugcccccacgccggcgccaaguccuucuacaagaaccucaucuggcucgucaagaagggcaacuccuaccccaagcucuccaaguccuacaucaacgacaagggcaaggagguccucguccucuggggcauccaccaccccuccaccaccgccgaccagcagucccucuaccagaacgccgacgccuacgucuucgucggcaccucccgcuacuccaagaaguucaagcccgagaucgccauccgccccaagguccgcgaccaggagggccgcaugaacuacuacuggacccucgucgagcccggcgacaagaucaccuucgaggccaccggcaaccucgucgucccccgcuacgccuucgccauggagcgcaacgccggcuccggcaucaucaucuccgacacccccguccacgacugcaacaccaccugccagacccccaagggcgccaucaacaccucccuccccuuccagaacauccaccccaucaccaucggcaagugccccaaguacgucaaguccaccaagcuccgccucgccaccggccuccgcaacguccccuccauccagucccgcggccucuucggcgccaucgccggcuucaucgagggcggcuggaccggcauggucgacggcugguacggcuaccaccaccagaacgagcagggcuccggcuacgccgccgaccucaaguccacccagaacgccaucgacaagaucaccaacaaggucaacuccgucaucgagaagaugaacacccaguucaccgccgucggcaaggaguucaaccaccucgagaagcgcaucgagaaccucaacaagaaggucgacgacggcuuccucgacaucuggaccuacaacgccgagcuccucguccuccucgagaacgagcgcacccucgacuaccacgacuccaacgucaagaaccucuacgagaagguccgcaaccagcucaagaacaacgccaaggagaucggcaacggcugcuucgaguucuaccacaagugcgacaacaccugcauggaguccgucaagaacggcaccuacgacuaccccaaguacuccgaggaggccaagcucaaccgcgaggagaucgacggcgucaagcucgaguccacccgcaucuaccagauccucgccaucuacuccaccgucgccuccucccucguccucgucgucucccucggcgccaucuccuucuggaugugcuccaacggcucccuccagugccgcaucugcaucuga

SEQ ID NO: 107861 - RNA, 1710 nt, Artificial Sequence
  derived and/or modified CDS sequence (opt2) from hemagglutinin__InfluenzaA__AHM98339
augaaggccauccucgucguccuccucuacaccuucgccaccgccaacgccgacacccucugcaucggcuaccacgccaacaacuccaccgacaccgucgacaccguccucgagaagaacgucaccgucacccacuccgucaaccuccucgaggacaagcacaacggcaagcucugcaagcuccgcggcgucgccccccuccaccucggcaagugcaacaucgccggcuggauccucggcaaccccgagugcgagucccucuccaccgccuccuccugguccuacaucgucgagaccuccuccuccgacaacggcaccugcuaccccggcgacuucaucgacuacgaggagcuccgcgagcagcucuccuccgucuccuccuucgagcgcuucgagaucuuccccaagaccuccuccuggcccaaccacgacuccaacaagggcgucaccgccgccugcccccacgccggcgccaaguccuucuacaagaaccucaucuggcucgucaagaagggcaacuccuaccccaagcucuccaaguccuacaucaacgacaagggcaaggagguccucguccucuggggcauccaccaccccuccaccaccgccgaccagcagucccucuaccagaacgccgacgccuacgucuucgucggcaccucccgcuacuccaagaaguucaagcccgagaucgccauccgccccaagguccgcgaccaggagggccgcaugaacuacuacuggacccucgucgagcccggcgacaagaucaccuucgaggccaccggcaaccucgucgucccccgcuacgccuucgccauggagcgcaacgccggcuccggcaucaucaucuccgacacccccguccacgacugcaacaccaccugccagacccccaagggcgccaucaacaccucccucaccucccuccccuuccagaacauccaccccaucaccaucggcaagugccccaaguacgucaaguccaccaagcuccgccucgccaccggccuccgcaacguccccuccauccagucccgcggccucuucggcgccaucgccggcuucaucgagggcggcuggaccggcauggucgacggcugguacggcuaccaccaccagaacgagcagggcuccggcuacgccgccgaccucaaguccacccagaacgccaucgacaagaucaccaacaaggucaacuccgucaucgagaagaugaacacccaguucaccgccgucggcaaggaguucaaccaccucgagaagcgcaucgagaaccucaacaagaaggucgacgacggcuuccucgacaucuggaccuacaacgccgagcuccucguccuccucgagaacgagcgcacccucgacuaccacgacuccaacgucaagaaccucuacgagaagguccgcaaccagcucaagaacaacgccaaggagaucggcaacggcugcuucgaguucuaccacaagugcgacaacaccugcauggaguccgucaagaacggcaccuacgacuaccccaaguacuccgaggaggccaagcucaaccgcgaggagaucgacggcgucaagcucgaguccacccgcaucuaccagauccucgccaucuacuccaccgucgccuccucccucguccucgucgucucccucggcgccaucuccuucuggaugugcuccaacggcucccuccagugccgcaucugcaucuga

SEQ ID NO: 107862 - RNA, 1701 nt, Artificial Sequence
  derived and/or modified CDS sequence (opt2) from hemagglutinin__InfluenzaA__AHM98350
augaaggccauccucgucgucaugcucuacaccuucgccaccgccaacgccgacacccucugcaucggcuaccacgccaacaacuccaccgacaccgucgacaccguccucgagaagaacgucaccgucacccacuccgucaaccuccucgaggacaagcacaacggcaagcucugcaagcuccgcggcgucgccccccuccaccucggcaagugcaacaucgccggcuggauccucggcaaccccgagugcgagucccucuccaccgccuccuccugguccuacaucgucgagaccuccuccuccgacaacggcaccugcuaccccggcgacuucaucgacuacgaggagcuccgcgagcagcucuccuccgucuccuccuucgagcgcuucgagaucuuccccaagaccuccuccuggcccaaccacgacgccaacaagggcgucaccgccgccugcccccacgccggcgccaagggcuucuacaagaaccucaucuggcucgucaagaagggcaacuccuaccccaagcucuccaaguccuacaucaacgacaagggcaaggagguccucguccucuggggcauccaccaccccuccaccaccgccgaccagcagucccucuaccagaacgccgacaccuacgucuucgucggcaccucccgcuacuccaagaaguucaagcccgagaucgccauccgccccaagguccgcgaccaggagggccgcaugaacuacuacuggacccucgucgagcccggcgacaagaucaccuucgaggccaccggcaaccucgucgucccccgcuacgccuucgccauggagcgcaacgccggcuccggcaucaucaucuccgacacccccguccacgacugcaacaccaccugccagacccccaagggcgccaucaacaccucccuccccuuccagaacauccaccccaucaccaucggcaagugccccaaguacgucaaguccaccaagcuccgccucgccaccggccuccgcaacguccccuccauccagucccgcggccucuucggcgccaucgccggcuucaucgagggcggcuggaccggcauggucgacggcugguacggcuaccaccaccagaacgagcagggcuccggcuacgccgccgaccucaaguccacccagaacgccaucgacaagaucaccaacaaggucaacuccgucaucgagaagaugaacacccaguucaccgccgucggcaaggaguucaaccaccucgagaagcgcaucgagaaccucaacaagaaggucgacgacggcuuccucgacaucuggaccuacaacgccgagcuccucguccuccucgagaacgagcgcacccucgacuaccacgacuccaacgucaagaaccucuacgagaagguccgcaaccagcucaagaacaacgccaaggagaucggcaacggcugcuucgaguucuaccacaagugcgacaacaccugcauggaguccgucaagaacggcaccuacgacuaccccaaguacuccgaggaggccaagcucaaccgcgaggagaucgacggcgucaagcucgaguccacccgcaucuaccagauccucgccaucuacuccaccgucgccuccucccucguccucgucgucucccucggcgccaucuccuucuggaugugcuccaacggcucccuccagugccgcaucugcaucuga

SEQ ID NO: 107863 - RNA, 1701 nt, Artificial Sequence; identical to SEQ ID NO: 102490
  derived and/or modified CDS sequence (opt2) from hemagglutinin__InfluenzaA__AHM98361

SEQ ID NO: 107864 - RNA, 1701 nt, Artificial Sequence; identical to SEQ ID NO: 102903
  derived and/or modified CDS sequence (opt2) from hemagglutinin__InfluenzaA__AHM98372

SEQ ID NO: 107865 - RNA, 1701 nt, Artificial Sequence; identical to SEQ ID NO: 102903
  derived and/or modified CDS sequence (opt2) from hemagglutinin__InfluenzaA__AHM98383

SEQ ID NO: 107866 - RNA, 1701 nt, Artificial Sequence; identical to SEQ ID NO: 102860
  derived and/or modified CDS sequence (opt2) from hemagglutinin__InfluenzaA__AHM98394

SEQ ID NO: 107867 - RNA, 1701 nt, Artificial Sequence
  derived and/or modified CDS sequence (opt2) from hemagglutinin__InfluenzaA__AHM98405
augaaggccauccucgucguccuccucuacaccuucgccaccgccaacgccgacacccucugcaucggcuaccacgccaacaacuccaccgacaccgucgacaccguccucgagaagaacgucaccgucacccacuccgucaaccuccucgaggacaagcacaacggcaagcucugcaagcuccgcggcgucgccccccuccaccucggcaagugcaacaucgccggcuggauccucggcaaccccgagugcgagucccucuccaccgccuccuccugguccuacaucgucgagaccuccuccuccgacaacggcaccugcuaccccggcgacuucaucgacuacgaggagcuccgcgagcagcucuccuccgucuccuccuucaagcgcuucgagaucuuccccaagaccuccuccuggcccaaccacgacuccaacaagggcgucaccgccgccugcccccacgccggcgccaagggcuucuacaagaaccucaucuggcucgucaagaagggcaacuccuaccccaagcucuccaaguccuacaucaacgacaagggcaaggagguccucguccucuggggcauccaccaccccuccaccaccgccgaccagcagucccucuaccagaacgccgacaccuacgucuucgucggcaccucccgcuacuccaagaaguucaagcccgagaucgccauccgccccaagguccgcgaccaggagggccgcaugaacuacuacuggacccucgucgagcccggcgacaagaucaccuucgaggccaccggcaaccucgucgucccccgcuacgccuucgccauggagcgcaacgccggcuccggcaucaucaucuccgacacccccguccacgacugcaacaccaccugccagacccccaagggcgccaucaacaccucccuccccuuccagaacauccaccccaucaccaucggcaagugccccaaguacgucaaguccaccaagcuccgccucgccaccggccuccgcaacguccccuccauccagucccgcggccucuucggcgccaucgccggcuucaucgagggcggcuggaccggcauggucgacggcugguacggcuaccaccaccagaacgagcagggcuccggcuacgccgccgaccucaaguccacccagaacgccaucgacaagaucaccaacaaggucaacuccgucaucgagaagaugaacacccaguucaccgccgucggcaaggaguucaaccaccucgagaagcgcaucgagaaccucaacaagaaggucgacgacggcuuccucgacaucuggaccuacaacgccgagcuccucguccuccucgagaacgagcgcacccucgacuaccacgacuccaacgucaagaaccucuacgagaagguccgcaaccagcucaagaacaacgccaaggagaucggcaacggcugcuucgaguucuaccacaagugcgacaacaccugcauggaguccgucaagaacggcaccuacgacuaccccaaguacuccgaggaggccaagcucaaccgcgaggagaucgacggcgucaagcucgaguccacccgcaucuaccagauccucgccaucuacuccaccgucgccuccucccucguccucgucgucucccucggcgccaucuccuucuggaugugcuccaacggcucccuccagugccgcaucugcaucuga

SEQ ID NO: 107868 - RNA, 1701 nt, Artificial Sequence; identical to SEQ ID NO: 107867
  derived and/or modified CDS sequence (opt2) from hemagglutinin__InfluenzaA__AHM98416

SEQ ID NO: 107869 - RNA, 1701 nt, Artificial Sequence; identical to SEQ ID NO: 102860
  derived and/or modified CDS sequence (opt2) from hemagglutinin__InfluenzaA__AHM98427

SEQ ID NO: 107870 - RNA, 1701 nt, Artificial Sequence; identical to SEQ ID NO: 103078
  derived and/or modified CDS sequence (opt2) from hemagglutinin__InfluenzaA__AHM98438

SEQ ID NO: 107871 - RNA, 1701 nt, Artificial Sequence; identical to SEQ ID NO: 104222
  derived and/or modified CDS sequence (opt2) from hemagglutinin__InfluenzaA__AHM98449

SEQ ID NO: 107872 - RNA, 1701 nt, Artificial Sequence
  derived and/or modified CDS sequence (opt2) from hemagglutinin__InfluenzaA__AHM98460
augaaggccauccucgucguccuccucugcaccuucgccaccgccaacgccgacacccucugcaucggcuaccacgccaacaacuccaccgacaccgucgacaccguccucgagaagaacgucaccgucacccacuccgucaaccuccucgaggacaagcacaacggcaagcucugcaagcuccgcggcgucgccccccuccaccucggcaagugcaacaucgccggcuggauccucggcaaccccgagugcgagucccucuccaccgccuccuccugguccuacaucgucgagaccuccuccuccgacaacggcaccugcuaccccggcgacuucaucgacuacgaggagcuccgcgagcagcucuccuccgucuccuccuucgagcgcuucgagaucuuccccaagaccuccuccuggcccaaccacgacuccaacaagggcgucaccgccgccugcccccacgccggcgccaagggcuucuacaagaaccucaucuggcucgucaagaagggcaacuccuaccccaagcucuccaaguccuacaucaacgacaagggcaaggagguccucguccucuggggcauccaccaccccuccaccaccgccgaccagcagucccucuaccagaacgccgacaccuacgucuucgucggcaccucccgcuacuccaagaaguucaagcccgagaucgccauccgccccaagguccgcgaccaggagggccgcaugaacuacuacuggacccucgucgagcccggcgacaagaucaccuucgaggccaccggcaaccucgucgucccccgcuacgccuucgccauggagcgcaacgccggcuccggcaucaucaucuccgacaccaccguccacgacugcaacaccaccugccagacccccaagggcgccaucaacaccucccuccccuuccagaacauccaccccaucaccaucggcaagugccccaaguacgucaaguccaccaagcuccgccucgccaccggccuccgcaacguccccuccauccagucccgcggccucuucggcgccaucgccggcuucaucgagggcggcuggaccggcauggucgacggcugguacggcuaccaccaccagaacgagcagggcuccggcuacgccgccgaccucaaguccacccagaacgccaucgacaagaucaccaacaaggucaacuccgucaucgagaagaugaacacccaguucaccgccgucggcaaggaguucaaccaccucgagaagcgcaucgagaaccucaacaagaaggucgacgacggcuuccucgacaucuggaccuacaacgccgagcuccucguccuccucgagaacgagcgcacccucgacuaccacgacuccaacgucaagaaccucuacgagaagguccgcaaccagcucaagaacaacgccaaggagaucggcaacggcugcuucgaguucuaccacaagugcgacaacaccugcauggaguccgucaagaacggcaccuacgacuaccccaaguacuccgaggaggccaagcucaaccgcgagaagaucgacggcgucaagcucgaguccacccgcaucuaccagauccucgccaucuacuccaccgucgccuccucccucguccucgucgucucccucggcgccaucuccuucuggaugugcuccaacggcucccuccagugccgcaucugcaucuga

SEQ ID NO: 107873 - RNA, 1701 nt, Artificial Sequence; identical to SEQ ID NO: 102903
  derived and/or modified CDS sequence (opt2) from hemagglutinin__InfluenzaA__AHM98471

SEQ ID NO: 107874 - RNA, 1701 nt, Artificial Sequence
  derived and/or modified CDS sequence (opt2) from hemagglutinin__InfluenzaA__AHM98482
augaaggccauccucgucguccuccucuacaccuucgccaccgccaacgccgacacccucugcaucggcuaccacgccaacaacuccaccgacaccgucgacaccguccucgagaagaacgucaccgucacccacuccgucaaccuccucgaggacaagcacaacggcaagcucugcaagcuccgcggcgucgccccccuccaccucggcaagugcaacaucgccggcuggauccucggcaaccccgagugcgagucccucuccaccgccuccuccugguccuacaucgucgagaccuccuccuccgacaacggcaccugcuaccccggcgacuucaucgacuacgaggagcuccgcgagcagcucuccuccgucuccuccuucgagcgcuucgagaucuuccccaagaccuccuccuggcccaaccacgacuccaacaagggcgucaccgccgccugcccccacgccggcgccaagggcuucuacaagaaccucaucuggcucgucaagaagggcaacuccuaccccaagcucuccaaguccuacaucaacgacaagggcaaggagguccucguccucuggggcauccaccaccccuccaccaccgccgaccagcagucccucuaccagaacgccgacaccuacgucuucgucggcaccucccgcuacuccaagaaguucaagcccgagaucgccauccgccccaagguccgcgaccaggagggccgcaugaacuacuacuggacccucgucgagcccggcgacaagaucaccuucgaggccaccggcaaccucgucgucccccgcuacgccuucgccauggagcgcaacgccggcuccggcaucaucaucuccgacacccccguccacgacugcaacaccaccugccagacccccaagggcgccaucaacaccucccuccccuuccagaacauccaccccaucaccaucggcaagugccccaaguacgucaaguccaccaagcuccgccucgccaccggccuccgcaacguccccuccauccagucccgcggccucuucggcgccaucgccggcuucaucgagggcggcuggaccggcauggucgacggcugguacggcuaccaccaccagaacgagcagggcuccggcuacgccgccgaccucaaguccacccagaacgccaucgacaagaucaccaacaaggucaacuccgucaucgacaagaugaacacccaguucaccgccgucggcaaggaguucaaccaccucgagaagcgcaucgagaaccucaacaagaaggucgacgacggcuuccucgacaucuggaccuacaacgccgagcuccucguccuccucgagaacgagcgcacccucgacuaccacgacuccaacgucaagaaccucuacgagaagguccgcaaccagcucaagaacaacgccaaggagaucggcaacggcugcuucgaguucuaccacaagugcgacaacaccugcauggaguccgucaagaacggcaccuacgacuaccccaaguacuccgaggaggccaagcucaaccgcgaggagaucgacggcgucaagcucgaguccacccgcaucuaccagauccucgccaucuacuccaccgucgccuccucccucguccucgucgucucccucggcgccaucuccuucuggaugugcuccaacggcucccuccagugccgcaucugcaucuga

SEQ ID NO: 107875 - RNA, 1701 nt, Artificial Sequence
  derived and/or modified CDS sequence (opt2) from hemagglutinin__InfluenzaA__AHM98493
augaaggccauccucgucguccuccucuacaccuucgccaccgccaacgccgacacccucugcaucggcuaccacgccaacaacuccaccgacaccgucgacaccguccucgagaagaacgucaccgucacccacuccgucaaccuccucgaggacaagcacaacggcaagcucugcaagcuccgcggcgucgccccccuccaccucggcaagugcaacaucgccggcuggauccucggcaaccccgagugcgagucccucuccaccgccuccuccugguccuacaucgucgagaccuccuccuccgacaacggcaccugcuaccccggcgacuucaucaacuacgaggagcuccgcgagcagcucuccuccgucuccuccuucgagcgcuucgagaucuuccccaagaccuccuccuggcccaaccacgacuccaacaagggcgucaccgccgccugcccccacgccggcgccaaguccuucuacaagaaccucaucuggcucgucaagaagggcaacuccuaccccaagcucuccaaguccuacaucaacgacaagggcaaggagguccucguccucuggggcauccaccaccccuccaccuccgccgaccagcagucccucuaccagaacgccgacgccuacgucuucgucggcaccuccaaguacuccaagaaguucaagcccgagaucgccguccgccccaagguccgcgaccaggagggccgcaugaacuacuacuggacccucgucgagcccggcgacaagaucaccuucgaggccaccggcaaccuccucgucccccgcuacgccuucgccauggagcgcaacgccggcuccggcaucaucaucuccgacacccccguccacgacugcaacaccaccugccagacccccaagggcgccaucaacaccucccuccccuuccagaacauccaccccaucaccaucggcaaguaccccaaguacgucaaguccaccaagcuccgccucgccaccggccuccgcaacguccccuccauccagucccgcggccucuucggcgccaucgccggcuucaucgagggcggcuggaccggcauggucgacggcugguacggcuaccaccaccagaacgagcagggcuccggcuacgccgccgaccucaaguccacccagaacgccaucgacaagaucaccaacaaggucaacuccgucaucgagaagaugaacacccaguucaccgccgucggcaaggaguucaaccaccucgagaagcgcaucgagaaccucaacaagaaggucgacgacggcuuccucgacaucuggaccuacaacgccgagcuccucguccuccucgagaacgagcgcacccucgacuaccacgacuccaacgucaagaaccucuacgagaagguccgcucccagcucaagaacaacgccaaggagaucggcaacggcugcuucgaguucuaccacaagugcgacaacaccugcauggaguccgucaagaacggcaccuacgacuaccccaaguacuccgaggaggccaagcucaaccgcgaggagaucgacggcgucaagcucgaguccacccgcaucuaccagauccucgccaucuacuccaccgucgccuccucccucguccucgucgucucccucggcgccaucuccuucuggaugugcuccaacggcucccuccagugccgcaucugcaucuga

SEQ ID NO: 107876 - RNA, 1701 nt, Artificial Sequence
  derived and/or modified CDS sequence (opt2) from hemagglutinin__InfluenzaA__AHM98504
augaaggccauccucgucguccuccucuacaccuucgccaccgccaacgccgacacccucugcaucggcuaccacgccaacaacuccaccgacaccgucgacaccguccucgagaagaacgucaccgucacccacuccgucaaccuccucgaggacaagcacaacggcaagcucugcaagcuccgcggcgucgccccccuccaccucggcaagugcaacaucgccggcuggauccucggcaaccccgagugcgagucccucuccaccgccuccuccugguccuacaucgucgagaccuccuccuccgacaacggcaccugcuaccccggcgacuucaucaacuacgaggagcuccgcgagcagcucuccuccgucuccuccuucgagcgcuucgagaucuuccccaagaccuccuccuggcccaaccacgacuccaacaagggcgucaccgccgccugcccccacgccggcgccaaguccuucuacaagaaccucaucuggcucgucaagaagggcaacuccuaccccaagcucuccaaguccuacaucaacgacaagggcaaggagguccucguccucuggggcauccaccaccccuccaccaccgccgaccagcagucccucuaccagaacgccgacgccuacgucuucgucggcaccucccgcuacuccaagaaguucaagcccgagaucgccauccgccccaagguccgcgaccaggagggccgcaugaacuacuacuggacccucgucgagcccggcgacaagaucaccuucgaggccaccggcaaccucgucgucccccgcuacgccuucgccauggagcgcaacgccggcuccggcaucaucaucuccgacacccccguccacgacugcaacaccaccugccagacccccaagggcgccaucaacaccucccuccccuuccagaacauccaccccaucaccaucggcaagugccccaaguacgucaaguccaccaagcuccgccucgccaccggccuccgcaacguccccuccauccagucccgcggccucuucggcgccaucgccggcuucaucgagggcggcuggaccggcauggucgacggcugguacggcuaccaccaccagaacgagcagggcuccggcuacgccgccgaccucaaguccacccagaacgccaucgacaagaucaccaacaaggucaacuccgucaucgagaagaugaacacccaguucaccgccgucggcaaggaguucaaccaccucgagaagcgcaucgagaaccucaacaagaaggucgacgacggcuuccucgacaucuggaccuacaacgccgagcuccucguccuccucgagaacgagcgcacccucgacuaccacgacuccaacgucaagaaccucuacgagaagguccgcaaccagcucaagaacaacgccaaggagaucggcaacggcugcuucgaguucuaccacaagugcgacaacaccugcauggaguccgucaagaacggcaccuacgacuaccccaaguacuccaaggaggccaagcucaaccgcgaggagaucgacggcgucaagcucgaguccacccgcaucuaccagauccucgccaucuacuccaccgucgccuccucccucguccucgucgucucccucggcgccaucuccuucuggaugugcuccaacggcucccuccagugccgcaucugcaucuga

SEQ ID NO: 107877 - RNA, 1701 nt, Artificial Sequence; identical to SEQ ID NO: 102490
  derived and/or modified CDS sequence (opt2) from hemagglutinin__InfluenzaA__AHM98515

SEQ ID NO: 107878 - RNA, 1701 nt, Artificial Sequence
  derived and/or modified CDS sequence (opt2) from hemagglutinin__InfluenzaA__AHM98526
augaaggccauccucgucguccuccuccacaccuucgccaccgccaacgccgacacccucugcaucggcuaccacgccaacaacuccaccgacaccgucgacaccguccucgagaagaacgucaccgucacccacuccgucaaccuccucgaggacaagcacaacggcaagcucugcaagcuccgcggcgucgccccccuccaccucggcaagugcaacaucgccggcuggauccucggcaaccccgagugcgagucccucuccaccgccuccuccugguccuacaucgucgagaccuccuccuccgacaacggcaccugcuaccccggcgacuucaucgacuacgaggagcuccgcgagcagcucuccuccgucuccuccuucgagcgcuucgagaucuuccccaagaccuccuccuggcccaaccacgacuccaacaagggcgucaccgccgccugcccccacgccggcgccaagggcuucuacaagaaccucaucuggcucgucaagaagggcaacuccuaccccaagcucuccaaguccuacaucaacgacaagggcaaggagguccucguccucuggggcauccaccaccccuccaccaccgccgaccagcagucccucuaccagaacgccgacaccuacgucuucgucggcaccucccgcuacuccaagaaguucaagcccgagaucgccauccgccccaagguccgcgaccaggagggccgcaugaacuacuacuggacccucgucgagcccggcgacaagaucaccuucgaggccaccggcaaccucgucgucccccgcuacgccuucgccauggagcgcaacgccggcuccggcaucaucaucuccgacacccccguccacgacugcaacaccaccugccagacccccaagggcgccaucaacaccucccuccccuuccagaacauccaccccaucaccaucggcaagugccccaaguacgucaaguccaccaagcuccgccucgccaccggccuccgcaacguccccuccauccagucccgcggccucuucggcgccaucgccggcuucaucgagggcggcuggaccggcauggucgacggcugguacggcuaccaccaccagaacgagcagggcuccggcuacgccgccgaccuccgcuccacccagaacgccaucgacaagaucaccaacaaggucaacuccgucaucgagaagaugaacacccaguucaccgccgucggcaaggaguucaaccaccucgagaagcgcaucgagaaccucaacaagaaggucgacgacggcuuccucgacaucuggaccuacaacgccgagcuccucauccuccucgagaacgagcgcacccucgacuaccacgacuccaacgucaagaaccucuacgagaagguccgcaaccagcucaagaacaacgccaaggagaucggcaacggcugcuucgaguucuaccacaagugcgacaacaccugcauggaguccgucaagaacggcaccuacgacuaccccaaguacuccgaggaggccaagcucaaccgcgaggagaucgacggcgucaagcucgaguccacccgcaucuaccagauccucgccaucuacuccaccgucgccuccucccucguccucgucgucucccucggcgccaucuccuucuggaugugcuccaacggcucccuccagugccgcaucugcaucuga

SEQ ID NO: 107879 - RNA, 1701 nt, Artificial Sequence; identical to SEQ ID NO: 102490
  derived and/or modified CDS sequence (opt2) from hemagglutinin__InfluenzaA__AHM98537

SEQ ID NO: 107880 - RNA, 1701 nt, Artificial Sequence
  derived and/or modified CDS sequence (opt2) from hemagglutinin__InfluenzaA__AHM98548
augaaggccauccucgucguccuccucuacaccuucgccaccgccaacgccgacacccucugcaucggcuaccacgccaacaacuccaccgacaccgucgacaccguccucgagaagaacgucaccgucacccacuccgucaaccuccucgaggacaagcacaacggcaagcucugcaagcuccgcggcgucgccccccuccaccucggcaagugcaacaucgccggcuggauccucggcaaccccgagugcgagucccucuccaccgccuccuccugguccuacaucgucgagaccuccuccuccgacaacggcaccugcuaccccggcgacuucaucaacuacgaggagcuccgcgagcagcucuccuccgucuccuccuucgagcgcuucgagaucuuccccaagaccuccuccuggcccaaccacgacuccaacaagggcgucaccgccgccugcccccacgccggcgccaaguccuucuacaagaaccucaucuggcucgucaagaagggcaacuccuaccccaagcucuccaaguccuacaucaacgacaagggcaaggagguccucguccucuggggcauccaccaccccuccaccaccgccgaccagcagucccucuaccagaacgccgacgccuacgucuucgucggcaccucccgcuacuccaagaaguucaagcccgagaucgccauccgccccaagguccgcgaccaggagggccgcaugaacuacuacuggacccucgucgagcccggcgacaagaucaccuucgaggccaccggcaaccucgucgucccccgcuacgccuucgccauggagcgcaacgccggcuccggcaucaucaucuccgacacccccguccacgacugcaacaccaccugccagacccccaagggcgccaucaacaccucccuccccuuccagaacauccaccccgucaccaucggcaagugccccaaguacgucaaguccaccaagcuccgccucgccaccggccuccgcaacguccccuccauccagucccgcggccucuucggcgccaucgccggcuucaucgagggcggcuggaccggcauggucgacggcugguacggcuaccaccaccagaacgagcagggcuccggcuacgccgccgaccucaaguccacccagaacgccaucgacaagaucaccaacaaggucaacuccgucaucgagaagaugaacacccaguucaccgccgucggcaaggaguucaaccaccucgagaagcgcaucgagaaccucaacaagaaggucgacgacggcuuccucgacaucuggaccuacaacgccgagcuccucguccuccucgagaacgagcgcacccucgacuaccacgacuccaacgucaagaaccucuacgagaagguccgcaaccagcucaagaacaacgccaaggagaucggcaacggcugcuucgaguucuaccacaagugcgacaacaccugcauggaguccgucaagaacggcaccuacgacuaccccaaguacuccgaggaggccaagcucaaccgcgaggagaucgacggcgucaagcucgaguccacccgcaucuaccagauccucgccaucuacuccaccgucgccuccucccucguccucgucgucucccucggcgccaucuccuucuggaugugcuccaacggcucccuccagugccgcaucugcaucuga

SEQ ID NO: 107881 - RNA, 1701 nt, Artificial Sequence
  derived and/or modified CDS sequence (opt2) from hemagglutinin__InfluenzaA__AHM98559
augaaggccauccucgucguccuccucuacaccuucgccaccgccaaggccgacacccucugcaucggcuaccacgccaacaacuccaccgacaccgucgacaccguccucgagaagaacgucaccgucacccacuccgucaaccuccucgaggacaagcacaacggcaagcucugcaagcuccgcggcgucgccccccuccaccucggcaagugcaacaucgccggcuggauccucggcaaccccgagugcgagucccucuccaccgccuccuccugguccuacaucgucgagaccuccuccuccgacaacggcaccugcuaccccggcgacuucaucaacuacgaggagcuccgcgagcagcucuccuccgucuccuccuucgagcgcuucgagaucuuccccaagaccuccuccuggcccaaccacgacuccaacaagggcgucaccgccgccugcccccacgccggcgccaaguccuucuacaagaaccucaucuggcucgucaagaagggcaacuccuaccccaagcucuccaaguccuacaucaacgacaagggcaaggagguccucguccucuggggcauccaccaccccuccaccaccgccgaccagcagucccucuaccagaacgccgacgccuacgucuucgucggcaccucccgcuacuccaagaaguucaagcccgagaucgccauccgccccaagguccgcgaccaggagggccgcaugaacuacuacuggacccucgucgagcccggcgacaagaucaccuucgaggccaccggcaaccucgucgucccccgcuacgccuucgccauggagcgcaacgccggcuccggcaucaucaucuccgacacccccguccacgacugcaacaccaccugccagacccccaagggcgccaucaacaccucccuccccuuccagaacauccaccccaucaccaucggcaagugccccaaguacgucaaguccaccaagcuccgccucgccaccggccuccgcaacguccccuccauccagucccgcggccucuucggcgccaucgccggcuucaucgagggcggcuggaccggcauggucgacggcugguacggcuaccaccaccagaacgagcagggcuccggcuacgccgccgaccucaaguccacccagaacgccaucgacaagaucaccaacaaggucaacuccgucaucgagaagaugaacacccaguucaccgccgucggcaaggaguucaaccaccucgagaagcgcaucgagaaccucaacaagaaggucgacgacggcuuccucgacaucuggaccuacaacgccgagcuccucguccuccucgagaacgagcgcacccucgacuaccacgacuccaacgucaagaaccucuacgagaagguccgcaaccagcucaagaacaacgccaaggagaucggcaacggcugcuucgaguucuaccacaagugcgacaacaccugcauggaguccgucaagaacggcaccuacgacuaccccaaguacuccgaggaggccaagcucaaccgcgaggagaucgacggcgucaagcucgaguccacccgcaucuaccagauccucgccaucuacuccaccgucgccuccucccucguccucgucgucucccucggcgccaucuccuucuggaugugcuccaacggcucccuccagugccgcaucugcaucuga

SEQ ID NO: 107882 - RNA, 1701 nt, Artificial Sequence; identical to SEQ ID NO: 102860
  derived and/or modified CDS sequence (opt2) from hemagglutinin__InfluenzaA__AHM98570

SEQ ID NO: 107883 - RNA, 1701 nt, Artificial Sequence
  derived and/or modified CDS sequence (opt2) from hemagglutinin__InfluenzaA__AHM98581
augaaggccauccucgucguccuccucuacaccuucgccaccgccaacgccgacacccucugcaucggcuaccacgccaacaacuccaccgacaccgucgacaccguccucgagaagaacgucaccgucacccacuccgucaaccuccucgaggacaagcacaacggcaagcucugcaagcuccgcggcgucgccccccuccaccucggcaagugcaacaucgccggcuggauccucggcaaccccgagugcgagucccucuccaccgcccgcuccugguccuacaucgucgagaccuccuccuccgacaacggcaccugcuaccccggcgacuucaucgacuacgaggagcuccgcgagcagcucuccuccgucuccuccuucaagcgcuucgagaucuuccccaagaccuccuccuggcccaaccacgacuccaacaagggcgucaccgccgccugcccccacgccggcgccaagggcuucuacaagaaccucaucuggcucgucaagaagggcaacuccuaccccaagcucuccaaguccuacaucaacgacaagggcaaggagguccucguccucuggggcauccaccaccccuccaccaccgccgaccagcagucccucuaccagaacgccgacaccuacgucuucgucggcaccucccgcuacuccaagaaguucaagcccgagaucgccauccgccccaagguccgcgaccaggagggccgcaugaacuacuacuggacccucgucgagcccggcgacaagaucaccuucgaggccaccggcaaccucgucgucccccgcuacgccuucgccauggagcgcaacgccggcuccggcaucaucaucuccgacacccccguccacgacugcaacaccaccugccagacccccaagggcgccaucaacaccucccuccccuuccagaacauccaccccaucaccaucggcaagugccccaaguacgucaaguccaccaagcuccgccucgccaccggccuccgcaacguccccuccauccagucccgcggccucuucggcgccaucgccggcuucaucgagggcggcuggaccggcauggucgacggcugguacggcuaccaccaccagaacgagcagggcuccggcuacgccgccgaccucaaguccacccagaacgccaucgacaagaucaccaacaaggucaacuccgucaucgagaagaugaacacccaguucaccgccgucggcaaggaguucaaccaccucgagaagcgcaucgagaaccucaacaagaaggucgacgacggcuuccucgacaucuggaccuacaacgccgagcuccucguccuccucgagaacgagcgcacccucgacuaccacgacuccaacgucaagaaccucuacgagaagguccgcaaccagcucaagaacaacgccaaggagaucggcaacggcugcuucgaguucuaccacaagugcgacaacaccugcauggaguccgucaagaacggcaccuacgacuaccccaaguacuccgaggaggccaagcucaaccgcgaggagaucgacggcgucaagcucgaguccacccgcaucuaccagauccucgccaucuacuccaccgucgccuccucccucguccucgucgucucccucggcgccaucuccuucuggaugugcuccaacggcucccuccagugccgcaucugcaucuga

SEQ ID NO: 107884 - RNA, 1701 nt, Artificial Sequence; identical to SEQ ID NO: 102860
  derived and/or modified CDS sequence (opt2) from hemagglutinin__InfluenzaA__AHM98592

SEQ ID NO: 107885 - RNA, 1701 nt, Artificial Sequence; identical to SEQ ID NO: 102903
  derived and/or modified CDS sequence (opt2) from hemagglutinin__InfluenzaA__AHM98603

SEQ ID NO: 107886 - RNA, 1701 nt, Artificial Sequence; identical to SEQ ID NO: 102490
  derived and/or modified CDS sequence (opt2) from hemagglutinin__InfluenzaA__AHM98614

SEQ ID NO: 107887 - RNA, 1701 nt, Artificial Sequence; identical to SEQ ID NO: 107867
  derived and/or modified CDS sequence (opt2) from hemagglutinin__InfluenzaA__AHM98625

SEQ ID NO: 107888 - RNA, 1701 nt, Artificial Sequence; identical to SEQ ID NO: 107867
  derived and/or modified CDS sequence (opt2) from hemagglutinin__InfluenzaA__AHM98636

SEQ ID NO: 107889 - RNA, 1701 nt, Artificial Sequence
  derived and/or modified CDS sequence (opt2) from hemagglutinin__InfluenzaA__AHM98647
augaaggccauccucgucguccuccucuacaccuucgccaccgccaaggccgacacccucugcaucggcuaccacgccaacaacuccaccgacaccgucgacaccguccucgagaagaacgucaccgucacccacuccgucaaccuccucgaggacaagcacaacggcaagcucugcaagcuccgcggcgucgccccccuccaccucggcaagugcaacaucgccggcuggauccucggcaaccccgagugcgagucccucuccaccgccuccuccugguccuacaucgucgagaccuccuccuccgacaacggcaccugcuaccccggcgacuucaucaacuacgaggagcuccgcgagcagcucuccuccgucuccuccuucgagcgcuucgagaucuuccccaagaccuccuccuggcccaaccacgacuccaacaagggcgucaccgccgccugcccccacgccggcgccaaguccuucuacaagaaccucaucuggcucgucaagaagggcaacuccuaccccaagcucucccaguccuacaucaacgacaagggcaaggagguccucguccucuggggcauccaccaccccuccaccaccgccgaccagcagucccucuaccagaacgccgacgccuacgucuucgucggcaccucccgcuacuccaagaaguucaagcccgagaucgccauccgccccaagguccgcgaccaggagggccgcaugaacuacuacuggacccucgucgagcccggcgacaagaucaccuucgaggccaccggcaaccucgucgucccccgcuacgccuucgccauggagcgcaacgccggcuccggcaucaucaucuccgacacccccguccacgacugcaacaccaccugccagacccccaagggcgccaucaacaccucccuccccuuccagaacauccaccccaucaccaucggcaagugccccaaguacgucaaguccaccaagcuccgccucgccaccggccuccgcaacguccccuccauccagucccgcggccucuucggcgccaucgccggcuucaucgagggcggcuggaccggcauggucgacggcugguacggcuaccaccaccagaacgagcagggcuccggcuacgccgccgaccucaaguccacccagaacgccaucgacaagaucaccaacaaggucaacuccgucaucgagaagaugaacacccaguucaccgccgucggcaaggaguucaaccaccucgagaagcgcaucgagaaccucaacaagaaggucgacgacggcuuccucgacaucuggaccuacaacgccgagcuccucguccuccucgagaacgagcgcacccucgacuaccacgacuccaacgucaagaaccucuacgagaagguccgcaaccagcucaagaacaacgccaaggagaucggcaacggcugcuucgaguucuaccacaagugcgacaacaccugcauggaguccgucaagaacggcaccuacgacuaccccaaguacuccgaggaggccaagcucaaccgcgaggagaucgacggcgucaagcucgaguccacccgcaucuaccagauccucgccaucuacuccaccgucgccuccucccucguccucgucgucucccucggcgccaucuccuucuggaugugcuccaacggcucccuccagugccgcaucugcaucuga

SEQ ID NO: 107890 - RNA, 1701 nt, Artificial Sequence; identical to SEQ ID NO: 102903
  derived and/or modified CDS sequence (opt2) from hemagglutinin__InfluenzaA__AHM98658

SEQ ID NO: 107891 - RNA, 1701 nt, Artificial Sequence; identical to SEQ ID NO: 102860
  derived and/or modified CDS sequence (opt2) from hemagglutinin__InfluenzaA__AHM98669

SEQ ID NO: 107892 - RNA, 1701 nt, Artificial Sequence; identical to SEQ ID NO: 104222
  derived and/or modified CDS sequence (opt2) from hemagglutinin__InfluenzaA__AHM98701

SEQ ID NO: 107893 - RNA, 1701 nt, Artificial Sequence; identical to SEQ ID NO: 104222
  derived and/or modified CDS sequence (opt2) from hemagglutinin__InfluenzaA__AHM98712

SEQ ID NO: 107894 - RNA, 1701 nt, Artificial Sequence
  derived and/or modified CDS sequence (opt2) from hemagglutinin__InfluenzaA__AHM98723
augaaggccauccucgucguccuccucuacaccuucgccaccgccaacgccgacacccucugcaucggcuaccacgccaacaacuccaccgacaccgucgacaccguccucgagaagaacgucaccgucacccacuccgucaaccuccucgaggacaagcacaacggcaagcucugcaagcuccgcggcgucgccccccuccaccucggcaacugcaacaucgccggcuggauccucggcaaccccgagugcgagucccucuccaccgccuccuccugguccuacaucgucgagaccuccuccuccgacaacggcaccugcuaccccggcgacuucaucaacuacgaggagcuccgcgagcagcucuccuccgucuccuccuucgagcgcuucgagauccuccccaagaccuccuccuggcccaaccacgacuccaacaagggcgucaccgccgccugcccccaggccggcgccaaguccuucuacaagaaccucaucuggcucgucaagaagggcaacuccuaccccaagcucuccaaguccuacaucaacgacaagggcaaggagguccucguccucuggggcauccaccaccccuccaccuccgccgaccagcagucccucuaccagaacgccgacgccuacgucuucgucggcaccuccaaguacuccaagaaguucaagcccgagaucgccguccgccccaagguccgcgaccaggagggccgcaugaacuacuacuggacccucaucgagcccggcgacaagaucaccuucgaggccaccggcaaccuccucgucccccgcuacgccuucgccauggagcgcaacgccggcuccggcaucaucaucuccgacacccccguccacgacugcaacaccaccugccagacccccaagggcgccaucaacaccucccuccccuuccagaacauccaccccaucaccaucggcaagugccccaaguacgucaaguccaccaagcuccgccucgccaccggccuccgcaacguccccuccauccagucccgcggccucuucggcgccaucgccggcuucaucgagggcggcuggaccggcauggucgacggcugguacggcuaccaccaccagaacgcccagggcuccggcuacgccgccgaccucaaguccacccagaacgccaucgacaagaucaccaacaaggucaacuccgucaucgagaagaugaacacccaguucaccgccgucggcaaggaguucaaccaccucgagaagcgcaucgagaaccucaacaagaaggucgacgacggcuuccucgacaucuggaccuacaacgccgagcuccucguccuccucgagaacgagcgcacccucgacuaccacgacuccaacgucaagaaccucuacgagaagguccgcucccagcucaagaacaacgccaaggagaucggcaacggcugcuucgaguucuaccacaagugcgacaacaccugcauggaguccgucaagaacggcaccuacgacuacccccgcuacuccgaggaggccaagcucaaccgcgaggagaucgacggcgucaagcucgaguccacccgcaucuaccagauccucgccaucuacuccaccgucgccuccucccucguccucaucgucucccucggcgccaucuccuucuggaugugcuccaacggcucccuccagugccgcaucugcaucuga

SEQ ID NO: 107895 - RNA, 1701 nt, Artificial Sequence
  derived and/or modified CDS sequence (opt2) from hemagglutinin__InfluenzaA__AHM98734
augaaggccauccucgucguccuccucuacaccuucgccaccgccaacgccgacacccucugcaucggcuaccacgccaacaacuccaccgacaccgucgacaccguccucgagaagaacgucaccgucacccacuccgucaaccuccucgaggacaagcacaacggcaagcucugcaagcuccgcggcgucgccccccuccaccucggcaagugcaacaucgccggcuggauccucggcaaccccgagugcgagacccucuccaccgccuccuccugguccuacaucgucgagaccuccaacuccgacaacggcaccugcuaccccggcgacuucaucgacuacgaggagcuccgcgagcagcucuccuccgucuccuccuucgagcgcuucgagaucuuccccaagaccuccuccuggcccaaccacgacuccaacaagggcgucaccgccgccugcccccacgccggcuccaagggcuucuacaagaaccucaucuggcucgucaagaagggcaacuccuaccccaagcucuccaaguccuacaucaacgacaagggcaaggagguccucguccucuggggcauccaccaccccuccaccaccgccgaccagcagucccucuaccagaacgccgacaccuacgucuucgucggcaccucccgcuacuccaagaaguucaagcccgagaucgccauccgccccaagguccgcgaccaggagggccgcaugaacuacuacuggacccucgucgagcccggcgacaagaucaccuucgaggccaccggcaaccucgucgucccccgcuacgccuucgccauggagcgcgacgccggcuccggcaucaucaucuccgacacccccguccacgacugcaacaccaccugccagacccccaagggcgccaucaacaccucccuccccuuccagaacauccaccccaucaccaucggcaagugccccaaguacgucaaguccaccaagcuccgccucgccaccggccuccgcaacguccccuccauccagucccgcggccucuucggcgccaucgccggcuucaucgagggcggcuggaccggcauggucgacggcugguacggcuaccaccaccagaacgagcagggcuccggcuacgccgccgaccucaaguccacccagaacgccaucgacaagaucaccaacaaggucaacuccgucaucgagaagaugaacacccaguucaccgccgucggcaaggaguucaaccaccucgagaagcgcaucgagaaccucaacaagaaggucgacgacggcuuccucgacaucuggaccuacaacgccgagcuccucguccuccucgagaacgagcgcacccucgacuaccacgacuccaacgucaagaaccucuacgagaagguccgcaaccagcucaagaacaacgccaaggagaucggcaacggcugcuucgaguucuaccacaagugcgacaacaccugcauggaguccgucaagaacggcaccuacgacuaccccaaguacuccgaggaggccaagcucaaccgcgaggagaucgacggcgucaagcucgaguccacccgcaucuaccagauccucgccaucuacuccaccgccgccuccucccucguccucgucgucucccucggcgccaucuccuucuggaugugcuccaacggcucccuccagugccgcaucugcaucuga

SEQ ID NO: 107896 - RNA, 1701 nt, Artificial Sequence; identical to SEQ ID NO: 104222
  derived and/or modified CDS sequence (opt2) from hemagglutinin__InfluenzaA__AHM98745

SEQ ID NO: 107897 - RNA, 1701 nt, Artificial Sequence
  derived and/or modified CDS sequence (opt2) from hemagglutinin__InfluenzaA__AHM98756
augaaggccauccucgucguccuccucuacaccuucgccaccgccaacgccgacacccucugcaucggcuaccacgccaacaacuccaccgacaccgucgacaccguccucgagaagaacgucaccgucacccacuccgucaaccuccucgaggacaagcacaacggcaagcucugcaagcuccgcggcgucgccccccuccaccucggcaagugcaacaucgccggcuggauccucggcaaccccgagugcgagacccucuccaccgccuccuccugguccuacaucgucgagaccuccuccuccgacaacggcaccugcuaccccggcgacuucaucgacuacgaggagcuccgcgagcagcucuccuccgucuccuccuucgagcgcuucgagaucuuccccaagaccuccuccuggcccaaccacgacuccaacaagggcgucaccgccgccugcccccacgccggcgccaagggcuucuacaagaaccucaucuggcucgucaagaagggcaacuccuaccccaagcucuccaaguccuacaucaacgacaagggcaaggagguccucguccucuggggcauccaccaccccuccaccaccgccgaccagcagucccucuaccagaacgccgacaccuacgucuucgucggcaccucccgcuacuccaagaaguucaagcccgagaucgccauccgccccaagguccgcgaccaggagggccgcaugaacuacuacuggacccucgucgagcccggcgacaagaucaccuucgaggccaccggcaaccucgucgucccccgcuacgccuucgccauggagcgcgacgccggcuccggcaucaucaucuccgacacccccguccacgacugcaacaccaccugccagacccccaagggcgccaucaacaccucccuccccuuccagaacauccaccccaucaccaucggcaagugccccaaguacgucaaguccaccaagcuccgccucgccaccggccuccgcaacguccccuccauccagucccgcggccucuucggcgccaucgccggcuucaucgagggcggcuggaccggcauggucgacggcugguacggcuaccaccaccagaacgagcagggcuccggcuacgccgccgaccucaaguccacccagaacgccaucgacaagaucaccaacaaggucaacuccgucaucgucaagaugaacacccaguucaccgccgucggcaaggaguucaaccaccucgagaagcgcaucgagaaccucaacaagaaggucgacgacggcuuccucgacaucuggaccuacaacgccgagcuccucguccuccucgagaacgagcgcacccucgacuaccacgacuccaacgucaagaaccucuacgagaagguccgcaaccagcucaagaacaacgccaaggagaucggcaacggcugcuucgaguucuaccacaagugcgacaacaccugcauggaguccgucaagaacggcaccuacgacuaccccaaguacuccgaggaggccaagcucaaccgcgaggagaucgacggcgucaagcucgaguccacccgcaucuaccagauccucgccaucuacuccaccgccgccuccucccucguccucgucgucucccucggcgccaucuccuucuggaugugcuccaacggcucccuccagugccgcaucugcaucuga

SEQ ID NO: 107898 - RNA, 1701 nt, Artificial Sequence; identical to SEQ ID NO: 104222
  derived and/or modified CDS sequence (opt2) from hemagglutinin__InfluenzaA__AHM98767

SEQ ID NO: 107899 - RNA, 1701 nt, Artificial Sequence
  derived and/or modified CDS sequence (opt2) from hemagglutinin__InfluenzaA__AHM98778
augaaggccauccucgucguccuccucuacaccuucgccaccgccaacgccgacacccucugcaucggcuaccacgccaacaacuccaccgacaccgucgacaccguccucgagaagaacgucaccgucacccacuccgucaaccuccucgaggacaagcacaaccgcaagcucugcaagcuccgcggcgucgccccccuccaccucggcaagugcaacaucgccggcuggauccucggcaaccccgagugcgagucccucuccaccgccuccuccugguccuacaucgucgagaccuccuccuccgacaacggcaccugcuaccccggcgacuucaucaacuacgaggagcuccgcgagcagcucuccuccgucuccuccuucgagcgcuucgagaucuuccccaagaccuccuccuggcccaaccacgacuccaacaagggcgucaccgccgccugcccccgcgccggcgccaaguccuucuacaagaaccucaucuggcucgucaagaagggcaacuccuaccccaagcucuccaaguccuacaucaacgacaagggcaaggagguccucguccucuggggcauccaccaccccuccaccaccgccgaccagcagucccucuaccagaacgccgacgccuacgucuucgucggcaccucccgcuacuccaagaaguucaagcccgagaucgccauccgccccaagguccgcgaccaggagggccgcaugaacuacuacuggacccucgucgagcccggcgacaagaucaccuucgaggccaccggcaaccuccucgucccccgcuacgccuucgccauggagcgcaacgccggcuccggcaucaucaucuccgacacccccguccacgacugcaacaccaccugccagacccccaagggcgccaucaacaccucccuccccuuccagaacauccaccccaucaccaucggcaagugccccaaguacgucaaguccaccaagcuccgccucgccaccggccuccgcaacguccccuccauccagucccgcggccucuucggcgccaucgccggcuucaucgagggcggcuggaccggcauggucgacggcugguacggcuaccaccaccagaacgagcagggcuccggcuacgccgccgaccucaaguccacccagaacgccaucgacaagaucaccaacaaggucaacuccgucaucgagaagaugaacacccaguucaccgccgucggcaaggaguucaaccaccucgagaagcgcaucgagaaccucaacaagaaggucgacgacggcuuccucgacaucuggaccuacaacgccgagcuccucguccuccucgagaacgagcgcacccucgacuaccacgacuccaacgucaagaaccucuacgagaagguccgcaaccagcucaagaacaacgccaaggagaucggcaacggcugcuucgaguucuaccacaagugcgacaacaccugcauggaguccgucaagaacggcaccuacgacuaccccaaguacuccgaggaggccaagcucaaccgcgaggagaucgacggcgucaagcucgaguccacccgcaucuaccagauccucgccaucuacuccaccgucgccuccucccucguccucgucgucucccucggcgccaucuccuucuggaugugcuccaacggcucccuccagugccgcaucugcaucuga

SEQ ID NO: 107900 - RNA, 1701 nt, Artificial Sequence; identical to SEQ ID NO: 103086
  derived and/or modified CDS sequence (opt2) from hemagglutinin__InfluenzaA__AHM98798

SEQ ID NO: 107901 - RNA, 1701 nt, Artificial Sequence; identical to SEQ ID NO: 102860
  derived and/or modified CDS sequence (opt2) from hemagglutinin__InfluenzaA__AHM98809

SEQ ID NO: 107902 - RNA, 1701 nt, Artificial Sequence; identical to SEQ ID NO: 102860
  derived and/or modified CDS sequence (opt2) from hemagglutinin__InfluenzaA__AHM98820

SEQ ID NO: 107903 - RNA, 1701 nt, Artificial Sequence; identical to SEQ ID NO: 102860
  derived and/or modified CDS sequence (opt2) from hemagglutinin__InfluenzaA__AHM98831

SEQ ID NO: 107904 - RNA, 1701 nt, Artificial Sequence
  derived and/or modified CDS sequence (opt2) from hemagglutinin__InfluenzaA__AHM98836
augaaggccauccucgucgucaugcucuacaccuucgccaccgccaacgccgacacccucugcaucggcuaccacgccaacaacuccaccgacaccgucgacaccguccucgagaagaacgucaccgucacccacuccgucaaccuccucgaggacaagcacaacggcaagcucugcaagcuccgcggcgucgccccccuccaccucggcaagugcaacaucgccggcuggauccucggcaaccccgagugcgagucccucuccaccgccuccuccugguccuacaucgucgagaccuccuccuccgacaacggcaccugcuaccccggcgacuucaucgacuacgaggagcuccgcgagcagcucuccuccgucuccuccuucgagcgcuucgagaucuuccccaagaccuccuccuggcccaaccacgacuccaacaagggcgucaccgccgccugcccccacgccggcgccaagggcuucuacaagaaccucaucuggcucgucaagaagggcaacuccuaccccaagcucuccaaguccuacaucaacgacaagggcaaggagguccucguccucuggggcauccaccaccccuccaccaccgccgaccagcagucccucuaccagaacgccgacaccuacgucuucgucggcaccucccgcuacuccaagaaguucaagcccgagaucgccauccgccccaagguccgcgaccaggagggccgcaugaacuacuacuggauccucgucgagcccggcgacaagaucaccuucgaggccaccggcaaccucgucgucccccgcuacgccuucgccauggagcgcaacgccggcuccggcaucaucaucuccgacacccccguccacgacugcaacaccaccugccagacccccaagggcgccaucaacaccucccuccccuuccagaacauccaccccaucaccaucggcaagugccccaaguacgucaaguccaccaagcuccgccucgccaccggccuccgcaacguccccuccauccagucccgcggccucuucggcgccaucgccggcuucaucgagggcggcuggaccggcauggucgacggcugguacggcuaccaccaccagaacgagcagggcuccggcuacgccgccgaccucaaguccacccagaacgccaucgacaagaucaccaacaaggucaacuccgucaucgagaagaugaacacccaguucaccgccgucggcaaggaguucaaccaccucgagaagcgcaucgagaaccucaacaagaaggucgacgacggcuuccucgacaucuggaccuacaacgccgagcuccucguccuccucgagaacgagcgcacccucgacuaccacgacuccaacgucaagaaccucuacgagaagguccgcaaccagcucaagaacaacgccaaggagaucggcaacggcugcuucgaguucuaccacaagugcgacaacaccugcauggaguccgucaagaacggcaccuacgacuaccccaaguacuccgaggaggccaagcucaaccgcgaggagaucgacggcgucaagcucgaguccacccgcaucuaccagauccucgccaucuacuccaccgucgccuccucccucguccucgucgucucccucggcgccaucuccuucuggaugugcuccaacggcucccuccagugccgcaucugcaucuga

SEQ ID NO: 107905 - RNA, 1701 nt, Artificial Sequence
  derived and/or modified CDS sequence (opt2) from hemagglutinin__InfluenzaA__AHM98847
augaaggccauccucgucgucaugcucuacaccuucgccaccgccaacgccgacacccucugcaucggcuaccacgccaacaacuccaccgacaccgucgacaccguccucgagaagaacgucaccgucacccacuccgucaaccuccucgaggacaagcacgacggcaagcucugcaagcuccgcggcgucgccccccuccaccucggcaagugcaacaucgccggcuggauccucggcaaccccgagugcgagucccucuccaccgccuccuccugguccuacaucgucgagaccuccuccuccgacaacggcaccugcuaccccggcgacuucaucgacuacgaggagcuccgcgagcagcucuccuccgucuccuccuucgagcgcuucgagaucuuccccaagaccuccuccuggcccaaccacgacuccaacaagggcgucaccgccgccugcccccacgccggcgccaagggcuucuacaagaaccucaucuggcucgucaagaagggcaacuccuaccccaagcucuccaaguccuacaucaacgacaagggcaaggagguccucguccucuggggcauccaccaccccuccaccaccgccgaccagcagucccucuaccagaacgccgacaccuacgucuucgucggcaccucccgcuacuccaagaaguucaagcccgagaucgccauccgccccaagguccgcgaccaggagggccgcaugaacuacuacuggacccucgucgagcccggcgacaagaucaccuucgaggccaccggcaaccucgucgucccccgcuacgccuucgccauggagcgcaacgccggcuccggcaucaucaucuccgacacccccguccacgacugcaacaccaccugccagacccccaagggcgccaucaacaccucccuccccuuccagaacauccaccccaucaccaucggcaagugccccaaguacgucaaguccaccaagcuccgccucgccaccggccuccgcaacguccccuccauccagucccgcggccucuucggcgccaucgccggcuucaucgagggcggcuggaccggcauggucgacggcugguacggcuaccaccaccagaacgagcagggcuccggcuacgccgccgaccucaaguccacccagaacgccaucgacaagaucaccaacaaggucaacuccgucaucgagaagaugaacacccaguucaccgccgucggcaaggaguucaaccaccucgagaagcgcaucgagaaccucaacaagaaggucgacgacggcuuccucgacaucuggaccuacaacgccgagcuccucguccuccucgagaacgagcgcacccucgacuaccacgacuccaacgucaagaaccucuacgagaagguccgcaaccagcucaagaacaacgccaaggagaucggcaacggcugcuucgaguucuaccacaagugcgacaacaccugcauggaguccgucaagaacggcaccuacgacuaccccaaguacuccgaggaggccaagcucaaccgcgaggagaucgacggcgucaagcucgaguccacccgcaucuaccagauccucgccaucuacuccaccgucgccuccucccucguccucgucgucucccucggcgccaucuccuucuggaugugcuccaacggcucccuccagugccgcaucugcaucuga

SEQ ID NO: 107906 - RNA, 1701 nt, Artificial Sequence; identical to SEQ ID NO: 102860
  derived and/or modified CDS sequence (opt2) from hemagglutinin__InfluenzaA__AHM98858

SEQ ID NO: 107907 - RNA, 1701 nt, Artificial Sequence; identical to SEQ ID NO: 102903
  derived and/or modified CDS sequence (opt2) from hemagglutinin__InfluenzaA__AHM98877

SEQ ID NO: 107908 - RNA, 1701 nt, Artificial Sequence
  derived and/or modified CDS sequence (opt2) from hemagglutinin__InfluenzaA__AHM98898
augaaggccauccucgucguccuccucuacaccuucgccaccgccaacgccgacacccucugcaucggcuaccacgccaacaacuccaccgacaccgucgacaccguccucgagaagaacgucaccgucacccacuccgucaaccuccucgaggacaaccacaacggcaagcucugcaagcuccgcggcgucgccccccuccaccucggcaagugcaacaucgccggcuggauccucggcaaccccgagugcgagucccucuccaccgccuccuccugguccuacaucgucgagaccuccuccuccgacaacggcaccugcuaccccggcgacuucaucaacuacgaggagcuccgcgagcagcucuccuccgucuccuccuucgagcgcuucgagaucuuccccaagaccuccuccuggcccaaccacgacuccaacaagggcgucaccgccgccugcccccacgccggcgccaaguccuucuacaagaaccucaucuggcucgucaagaagggcaacuccuaccccaagcucuccaaguccuacaucaacgacaagggcaaggagguccucguccucuggggcauccaccaccccuccaccaccgccgaccagcagucccucuaccagaacgccgacgccuacgucuucgucggcaccucccgcuacuccaagaaguucaagcccgagaucgccauccgccccaagguccgcgaccaggagggccgcaugaacuacuacuggacccucgucgagcccggcgacaagaucaccuucgaggccaccggcaaccucgucgucccccgcuacgccuucgccauggagcgcaacgccggcuccggcaucaucaucuccgacacccccguccacgacugcaacaccaccugccagacccccaagggcgccaucaacaccucccuccccuuccagaacauccaccccaucaccaucggcaagugccccaaguacgucaaguccaccaagcuccgccucgccaccggccuccgcaacguccccuccauccagucccgcggccucuucggcgccaucgccggcuucaucgagggcggcuggaccggcauggucgacggcugguacggcuaccaccaccagaacgagcagggcuccggcuacgccgccgaccucaaguccacccagaacgccaucgacaagaucaccaacaaggucaacuccgucaucgagaagaugaacacccaguucaccgccgucggcaaggaguucaaccaccucgagaagcgcaucgagaaccucaacaagaaggucgacgacggcuuccucgacaucuggaccuacaacgccgagcuccucguccuccucgagaacgagcgcacccucgacuaccacgacuccaacgucaagaaccucuacgagaagguccgcaaccagcucaagaacaacgccaaggagaucggcaacggcugcuucgaguucuaccacaagugcgacaacaccugcauggaguccgucaagaacggcaccuacgacuaccccaaguacuccgaggaggccaagcucaaccgcgaggagaucgacggcgucaagcucgaguccacccgcaucuaccagauccucgccaucuacuccaccgucgccuccucccucguccucgucgucucccucggcgccaucuccuucuggaugugcuccaacggcucccuccagugccgcaucugcaucuga

SEQ ID NO: 107909 - RNA, 1701 nt, Artificial Sequence; identical to SEQ ID NO: 106486
  derived and/or modified CDS sequence (opt2) from hemagglutinin__InfluenzaA__AHM98909

SEQ ID NO: 107910 - RNA, 1701 nt, Artificial Sequence
  derived and/or modified CDS sequence (opt2) from hemagglutinin__InfluenzaA__AHM98932
augaaggccauccucgucguccuccucuacaccuucgccaccgccaacgccgacacccucugcaucggcuaccacgccaacaacuccaccgacaccgucgacaccguccucgagaagaacgucaccgucacccacuccgucaaccuccucgaggacaagcacaacggcaagcucugcaagcucggcggcgucgccccccuccaccucggcaagugcaacaucgccggcuggauccucggcaaccccgagugcgagucccucuccaccgccuccuccugguccuacaucgucgagaccuccuccuccgacaacggcaccugcuaccccggcgacuucaucgacuacgaggagcuccgcgagcagcucuccuccgucuccuccuucgagcgcuucgagaucuuccccaagaccuccuccuggcccaaccacgacuccaacaagggcgucaccgccgccugcccccacgccggcgccaaguccuucuacaagaaccucaucuggcucgucaagaagggcgacuccuaccccaagcucuccaaguccuacaucaacgacaagggcaaggagguccucguccucuggggcauccaccaccccuccaccuccgccgaccagcagucccucuaccagaacgccgacgccuacgucuucgucggcuccucccgcuacuccaagaaguucaagcccgagaucgccauccgccccaagguccgcgaccgcgagggccgcaugaacuacuacuggacccucgucgagcccggcgacaagaucaccuucgaggccaccggcaaccucgucgucccccgcuacgccuucgccauggagcgcaacgccggcuccggcaucaucaucuccgacacccccguccacgacugcaacaccaccugccagacccccaagggcgccaucaacaccucccuccccuuccagaacauccaccccaucaccaucggcaagugccccaaguacgucaaguccaccaagcuccgccucgccaccggccuccgcaacguccccuccauccagucccgcggccucuucggcgccaucgccggcuucaucgagggcggcuggaccggcauggucgacggcugguacggcuaccaccaccagaacgagcagggcuccggcuacgccgccgaccucaaguccacccagaacgccaucgacgagaucaccaacaaggucaacuccgucaucgagaagaugaacacccaguucaccgccgucggcaaggaguucaaccaccucgagaagcgcaucgagaaccucaacaagaaggucgacgacggcuuccucgacaucuggaccuacaacgccgagcuccucguccuccucgagaacgagcgcacccucgacuaccacgacuccaacgucaagaaccucuacgagaagguccgcucccagcucaagaacaacgccaaggagaucggcaacggcugcuucgaguucuaccacaagugcgacaacaccugcauggaguccgucaagaacggcaccuacgacuaccccaaguacuccgaggaggccaagcucaaccgcgaggagaucgacggcgucaagcucgaguccacccgcaucuaccagauccucgccaucuacuccaccgucgccuccucccucguccucgucgucucccucggcgccaucuccuucuggaugugcuccaacggcucccuccagugccgcaucugcaucuga

SEQ ID NO: 107911 - RNA, 1701 nt, Artificial Sequence; identical to SEQ ID NO: 107910
  derived and/or modified CDS sequence (opt2) from hemagglutinin__InfluenzaA__AHM98940

SEQ ID NO: 107912 - RNA, 1701 nt, Artificial Sequence; identical to SEQ ID NO: 107910
  derived and/or modified CDS sequence (opt2) from hemagglutinin__InfluenzaA__AHM98951

SEQ ID NO: 107913 - RNA, 1701 nt, Artificial Sequence
  derived and/or modified CDS sequence (opt2) from hemagglutinin__InfluenzaA__AHM98975
augaaggccauccucgucguccuccucuacaccuucgccaccgccaacgccgacacccucugcaucggcuaccacgccaacaacuccaccgacaccgucgacaccguccucgagaagaacgucaccgucacccacuccgucaaccuccucgaggacaagcacaacggcaagcucugcaagcuccgcggcgucgccccccuccaccucggcaagugcaacaucgccggcuggauccucggcaaccccgagugcgagucccucuccaccgccuccuccugguccuacaucgucgagaccuccuccuccgacaacggcaccugcuaccccggcgacuucaucgacuacgaggagcuccgcgagcagcucuccuccgucuccuccuucgagcgcuucgagaucuuccccaagaccuccuccuggcccaaccacgaguccaacaagggcgucaccgccgccugcccccacgccggcgccaaguccuucuacaagaaccucaucuggcucgucaagaagggcaacuccuaccccaagcucuccaaguccuacaucaacgacaagggcaaggagguccucguccucuggggcauccaccaccccuccaccuccgccgaccagcagucccucuaccagaacgccgacgccuacgucuucgucggcuccucccgcuacuccaagaaguucaagcccgagaucgccauccgccccaagguccgcgaccaggagggccgcaugaacuacuacuggacccucgucgagcccggcgacaagaucaccuucgaggccaccggcaaccucgucgucccccgcuacgccuucgccauggagcgcaacgccggcuccggcaucaucaucuccgacacccccguccacgacugcaacaccaccugccagacccccaagggcgccaucaacaccucccuccccuuccagaacauccaccccaucaccaucggcaagugccccaaguacgucaaguccaccaagcuccgccucgccaccggccuccgcaacguccccuccauccagucccgcggccucuucggcgccaucgccggcuucaucgagggcggcuggaccggcauggucgacggcugguacggcuaccaccaccagaacgagcagggcuccggcuacgccgccgaccucaaguccacccagaacgccaucgacgagaucaccaacaaggucaacuccgucaucgagaagaugaacacccaguucaccgccgucggcaaggaguucaaccaccucgagaagcgcaucgagaaccucaacaagaaggucgacgacggcuuccucgacaucuggaccuacaacgccgagcuccucguccuccucgagaacgagcgcacccucgacuaccacgacuccaacgucaagaaccucuacgagaagguccgcucccagcucaagaacaacgccaaggagaucggcaacggcugcuucgaguucuaccacaagugcgacaacaccugcauggaguccgucaagaacggcaccuacgacuaccccaaguacuccgaggaggccaagcucaaccgcgaggagaucgacggcgucaagcucgaguccacccgcaucuaccagauccucgccaucuacuccaccgucgccuccucccucguccucgucgucucccucggcgccaucuccuucuggaugugcuccaacggcucccuccagugccgcaucugcaucuga

SEQ ID NO: 107914 - RNA, 1701 nt, Artificial Sequence
  derived and/or modified CDS sequence (opt2) from hemagglutinin__InfluenzaA__AHM98997
augaaggccauccucgucguccuccucuacaccuucgccaccgccaacgccgacacccucugcaucggcuaccacgccaacaacuccaccgacaccgucgacaccguccucgagaagaacgucaccgucacccacuccgucaaccuccucgaggacaagcacaacggcaagcucugcaagcuccgcggcgucgccccccuccaccucggcaagugcaacaucgccggcuggauccucggcaaccccgagugcgagucccucuccaccgccuccuccugguccuacaucgucgagaccuccuccuccgacaacggcaccugcuaccccggcgacuucaucgacuacgaggagcuccgcgagcagcucuccuccgucuccuccuucgagcgcuucgagaucuuccccaagaccuccuccuggcccaaccacgacuccaacaagggcgucaccgccgccugcccccacgccggcgccaaguccuucuacaagaaccucaucuggcucgucaagaagggcgacuccuaccccaagcucuccaaguccuacaucaacgacaagggcaaggagguccucguccucuggggcauccaccaccccuccaccuccgccgaccagcagucccucuaccagaacgccgacgccuacgucuucgucggcuccucccgcuacuccaagaaguucaagcccgagaucgccauccgccccaagguccgcggccaggagggccgcaugaacuacuacuggacccucgucgagcccggcgacaagaucaccuucgaggccaccggcaaccucgucgucccccgcuacgccuucgccauggagcgcaacgccggcuccggcaucaucaucuccgacacccccguccacgacugcaacaccaccugccagacccccaagggcgccaucaacaccucccuccccuuccagaacauccaccccaucaccaucggcaagugccccaaguacgucaaguccaccaagcuccgccucgccaccggccuccgcaacguccccuccauccagucccgcggccucuucggcgccaucgccggcuucaucgagggcggcuggaccggcauggucgacggcugguacggcuaccaccaccagaacgagcagggcuccggcuacgccgccgaccucaaguccacccagaacgccaucgacgagaucaccaacaaggucaacuccgucaucgagaagaugaacacccaguucaccgccgucggcaaggaguucaaccaccucgagaagcgcaucgagaaccucaacaagaaggucgacgacggcuuccucgacaucuggaccuacaacgccgagcuccucguccuccucgagaacgagcgcacccucgacuaccacgacuccaacgucaagaaccucuacgagaagguccgcucccagcucaagaacaacgccaaggagaucggcaacggcugcuucgaguucuaccacaagugcgacaacaccugcauggaguccgucaagaacggcaccuacgacuaccccaaguacuccgaggaggccaagcucaaccgcgaggagaucgacggcgucaagcucgaguccacccgcaucuaccagauccucgccaucuacuccaccgucgccuccucccucguccucgucgucucccucggcgccaucuccuucuggaugugcuccaacggcucccuccagugccgcaucugcaucuga

SEQ ID NO: 107915 - RNA, 1701 nt, Artificial Sequence
  derived and/or modified CDS sequence (opt2) from hemagglutinin__InfluenzaA__AHM99019
augaaggccauccucgucguccuccucuacaccuucgccaccgccaacgccgacacccucugcaucggcuaccacgccaacaacuccaccgacaccgucgacaccguccucgagaagaacgucaccgucacccacuccgucaaccuccucgaggacaagcacaacggcaagcucugcaagcucaagggcgucgccccccuccaccucggcaagugcaacaucgccggcuggauccucggcaaccccgagugcgagucccucuccaccgccuccuccugguccuacaucgucgagaccuccuccuccgacaacggcaccugcuaccccggcgacuucaucgacuacgaggagcuccgcgagcagcucuccuccgucuccuccuucgagcgcuucgagaucuuccccaagaccuccuccuggcccaaccacgacuccaacaagggcgucaccgccgccugcccccacgccggcgccaaguccuucuacaagaaccucaucuggcucgucaagaagggcgacuccuaccccaagcucuccaaguccuacaucaacgacaagggcaaggagguccucguccucuggggcauccaccaccccuccaccuccgccgaccagcagucccucuaccagaacgccgacgccuacgucuucgucggcuccucccgcuacuccaagaaguucaagcccgagaucgccauccgccccaagguccgcggccaggagggccgcaugaacuacuacuggacccucgucgagcccggcgacaagaucaccuucgaggccaccggcaaccucgucgucccccgcuacgccuucgccauggagcgcaacgccggcuccggcaucaucaucuccgacacccccguccacgacugcaacaccaccugccagacccccaagggcgccaucaacaccucccuccccuuccagaacauccaccccaucaccaucggcaagugccccaaguacgucaaguccaccaagcuccgccucgccaccggccuccgcaacguccccuccauccagucccgcggccucuucggcgccaucgccggcuucaucgagggcggcuggaccggcauggucgacggcugguacggcuaccaccaccagaacgagcagggcuccggcuacgccgccgaccucaaguccacccagaacgccaucgacgagaucaccaacaaggucaacuccgucaucgagaagaugaacacccaguucaccgccgucggcaaggaguucaaccaccucgagaagcgcaucgagaaccucaacaagaaggucgacgacggcuuccucgacaucuggaccuacaacgccgagcuccucguccuccucgagaacgagcgcacccucgacuaccacgacuccaacgucaagaaccucuacgagaagguccgcucccagcucaagaacaacgccaaggagaucggcaacggcugcuucgaguucuaccacaagugcgacaacaccugcauggaguccgucaagaacggcaccuacgacuaccccaaguacuccgaggaggccaagcucaaccgcgaggagaucgacggcgucaagcucgaguccacccgcaucuaccagauccucgccaucuacuccaccgucgccuccucccucguccucgucgucucccucggcgccaucuccuucuggaugugcuccaacggcucccuccagugccgcaucugcaucuga

SEQ ID NO: 107916 - RNA, 1701 nt, Artificial Sequence; identical to SEQ ID NO: 107915
  derived and/or modified CDS sequence (opt2) from hemagglutinin__InfluenzaA__AHM99031

SEQ ID NO: 107917 - RNA, 1701 nt, Artificial Sequence; identical to SEQ ID NO: 107915
  derived and/or modified CDS sequence (opt2) from hemagglutinin__InfluenzaA__AHM99043

SEQ ID NO: 107918 - RNA, 1701 nt, Artificial Sequence; identical to SEQ ID NO: 107915
  derived and/or modified CDS sequence (opt2) from hemagglutinin__InfluenzaA__AHM99054

SEQ ID NO: 107919 - RNA, 1701 nt, Artificial Sequence; identical to SEQ ID NO: 107915
  derived and/or modified CDS sequence (opt2) from hemagglutinin__InfluenzaA__AHM99065

SEQ ID NO: 107920 - RNA, 1701 nt, Artificial Sequence
  derived and/or modified CDS sequence (opt2) from hemagglutinin__InfluenzaA__AHM99075
augaaggccauccucgucguccuccucuacaccuucgccaccgccaacgccgacacccucugcaucggcuaccacgccaacaacuccaccgacaccgucgacaccguccucgagaagaacgucaccgucacccacuccgucaaccuccucgaggacaagcacaacggcaagcucugcaagcuccgcggcgucgccccccuccaccucggcaagugcaacaucgccggcuggauccucggcaaccccgagugcgagucccucuccaccgccuccuccugguccuacaucgucgagaccuccuccuccgacaacggcaccugcuaccccggcgacuucaucgacuacgaggagcuccgcgagcagcucuccuccgucuccuccuucgagcgcuucgagaucuuccccaagaccuccuccuggcccaaccacgacuccaacaagggcgucaccgccgccugcccccacgccggcgccaaguccuucuacaagaaccucaucuggcucgucaagaagggcgacuccuaccccaagcucuccaaguccuacaucaacgacaagggcaaggagguccucguccucuggggcauccaccaccccuccaccuccgccgaccagcagucccucuaccagaacgccgacgccuacgucuucgucggcuccucccgcuacuccaagaaguucaagcccgagaucgccauccgccccaagguccgcgaccaggagggccgcaugaacuacuacuggacccucgucgagcccggcgacaagaucaccuucgaggccaccggcaaccucgucgucccccgcuacgccuucgccauggagcgcaacgccggcuccggcaucaucaucuccgacacccccguccacgacugcaacaccaccugccagacccccaagggcgccaucaacaccucccuccccuuccagaacauccaccccaucaccaucggcaagugccccaaguacgucaaguccaccaagcuccgccucgccaccggccuccgcaacguccccuccauccagucccgcggccucuucggcgccaucgccggcuucaucgagggcggcuggaccggcauggucgacggcugguacggcuaccaccaccagaacgagcagggcuccggcuacgccgccgaccucaaguccacccagaacgccaucgacgagaucaccaacaaggucaacuccgucaucgagaagaugaacacccaguucaccgccgucggcaaggaguucaaccaccucgagaagcgcaucgagaaccucaacaagaaggucgacgacggcuuccucgacaucuggaccuacaacgccgagcuccucguccuccucgagaacgagcgcacccucgacuaccacgacuccaacgucaagaaccucuacgagaagguccgcucccagcucaagaacaacgccaaggagaucggcaacggcugcuucgaguucuaccacaagugcgacaacaccugcauggaguccgucaagaacggcaccuacgacuaccccaaguacuccgaggaggccaagcucaaccgcgaggagaucgacggcgucaagcucgaguccacccgcaucuaccagauccucgccaucuacuccaccgucgccuccucccucguccucgucgucucccucggcgccaucuccuucuggaugugcuccaacggcucccuccagugccgcaucugcaucuga

SEQ ID NO: 107921 - RNA, 1701 nt, Artificial Sequence
  derived and/or modified CDS sequence (opt2) from hemagglutinin__InfluenzaA__AHN00717
augaaggccauccuccucguccuccucugcaccuucgccgccaccaacgccgacacccucugcaucggcuaccacgccaacaacuccaccgacaccgucgacaccguccucgagaagaacgucaccgucacccacuccgucaaccuccucgaggaccgccacaacggcaagcucugcaagcucggcggcaucgccccccuccaccucggcaagugcaacaucgccggcuggcuccucggcaaccccgagugcgagcuccucuucaccgucuccuccugguccuacaucgucgagaccuccaacuccgacaacggcaccugcuaccccggcgacuucaucaacuacgaggagcuccgcgagcagcucuccuccgucuccuccuucgagcgcuucgagaucuuccccaagaccuccuccuggcccaaccacgagaccaaccgcggcgucaccgccgccugccccuacgccggcgccaacuccuucuaccgcaaccucaucuggcucgucaagaagggcaacuccuaccccaagcucuccaaguccuacgucaacaacaagggcaaggagguccucguccucuggggcauccaccacccccccaccuccaccgaccagcagucccucuaccagaacgccgacgccuacgucuucgucggcuccuccaaguacaaccgcaaguucaagcccgagaucgccgcccgccccaagguccgcggccaggccggccgcaugaacuacuacuggacccucaucgagcccggcgacaccaucaccuucgaggccaccggcaaccucgucgucccccgcuacgccuucgccaugaaccgcggccccggcuccggcaucaucaucuccgacgcccccguccacgacugcaacaccaccugccagacccccaagggcgccaucaacaccucccuccccuuccagaacauccaccccgucaccaucggcgagugccccaaguacgucaaguccaccaagcuccgcauggccaccggccuccgcaacauccccuccauccagucccgcggccucuucggcgccaucgccggcuucaucgagggcggcuggaccggcaugaucgacggcugguacggcuaccaccaccagaacgagcagggcuccggcuacgccgccgaccagaaguccacccagaacgccaucgacggcaucaccaacaaggucaacuccgucaucaagaagaugaacacccaguucaccgccgucggcaaggaguucaaccaccucgagaagcgcaucgagaaccucaacaagaaggucgacgacggcuuccucgacgucuggaccuacaacgccgagcuccucguccuccucgagaacgagcgcacccucgacuuccacgacuccaacgucaagaaccucuacgagaagguccgcucccagcuccgcaacaacgccaaggagaucggcaacggcugcuucgaguucuaccacaagugcgacgacaccugcauggaguccgucaagaacggcaccuacgacuaccccaaguacuccgaggaguccaagcucaaccgcgaggagaucgacggcgucaagcucgaguccacccgcaucuaccagauccucgccaucuacuccaccgccgccuccucccucguccuccucgucucccucggcgccaucuccuucuggaugugcuccaacggcucccuccagugccgcaucugcaucuga

SEQ ID NO: 107922 - RNA, 1701 nt, Artificial Sequence
  derived and/or modified CDS sequence (opt2) from hemagglutinin__InfluenzaA__AHN00764
augaaggccauccuccucguccuccucugcaccuucgccgccaccaacgccgacacccucugcaucggcuaccacgccaacaacuccaccgacaccgucgacaccguccucgagaagaacgucaccgucacccacuccgucaaccuccucgaggacaagcacaacggcaagcucugcaagcucggcggcaucgccccccuccaccucggcaagugcaacaucgccggcuggcuccucggcaaccccgagugcgagcuccucuucaccgucuccuccugguccuacaucgucgagaccuccaacuccgacaacggcaccugcuaccccggcgacuucaucaacuacgaggagcuccgcgagcagcucuccuccgucuccuccuucgagcgcuucgagaucuuccccaagaccuccuccuggcccaaccacgagaccaaccgcggcgucaccgccgccugccccuacgccggcgccaacuccuucuaccgcaaccucaucuggcucgucaagaagggcaacuccuaccccaagcucuccaaguccuacgucaacaacaagggcaaggagguccucguccucuggggcauccaccacccccccaccuccaccgaccagcagucccucuaccagaacgccgacgccuacgucuucgucggcuccuccaaguacaaccgcaaguucaagcccgagaucgccgcccgccccaagguccgcggccaggccggccgcaugaacuacuacuggacccucaucgagcccggcgacaccaucaccuucgaggccaccggcaaccucgucgucccccgcuacgccuucgccaugaaccgcggccccggcuccggcaucaucaucuccgacgcccccguccacgacugcaacaccaccugccagacccccaagggcgccaucaacaccucccuccccuuccagaacauccaccccgucaccaucggcgagugccccaaguacgucaaguccaccaagcuccgcauggccaccggccuccgcaacauccccuccauccagucccgcggccucuucggcgccaucgccggcuucaucgagggcggcuggaccggcaugaucgacggcugguacggcuaccaccaccagaacgagcagggcuccggcuacgccgccgaccagaaguccacccagaacgccaucgacggcaucaccaacaaggucaacuccgucaucaagaagaugaacacccaguucaccgccgucggcaaggaguucaaccaccucgagaagcgcaucgagaaccucaacaagaaggucgacgacggcuuccucgacgucuggaccuacaacgccgagcuccucguccuccucgagaacgagcgcacccucgacuuccacgacuccaacgucaagaaccucuacgagaagguccgcucccagcuccgcaacaacgccaaggagaucggcaacggcugcuucgaguucuaccacaagugcgacgacaccugcauggaguccgucaagaacggcaccuacgacuaccccaaguacuccgaggaguccaagcucaaccgcgaggagaucgacggcgucaagcucgaguccacccgcaucuaccagauccucgccaucuacuccaccgccgccuccucccucguccuccucgucucccucggcgccaucuccuucuggaugugcuccaacggcucccuccagugccgcaucugcaucuga

SEQ ID NO: 107923 - RNA, 1683 nt, Artificial Sequence
  derived and/or modified CDS sequence (opt2) from hemagglutinin__InfluenzaA__AHN96323
augaacacccagauccucgucuucgcccucaucgccaucauccccaccaacgccgacaagaucugccucggccaccacgccgucuccaacggcaccaaggucaacacccucaccgagcgcggcgucgaggucgucaacgccaccgagaccgucgagcgcaccaacaucccccgcaucugcuccaagggcaagcgcaccgucgaccucggccagugcggccuccucggcaccaucaccggccccccccagugcgaccaguuccucgaguucuccgccgaccucaucaucgagcgccgcgagggcuccgacgucugcuaccccggcaaguucgucaacgaggaggcccuccgccagauccuccgcgaguccggcggcaucgacaaggaggccaugggcuucaccuacuccggcauccgcaccaacggcgccaccuccgccugccgccgcuccggcuccuccuucuacgccgagaugaaguggcuccucuccaacaccgacaacgccgccuucccccagaugaccaaguccuacaagaacacccgcaagucccccgcccucaucgucuggggcauccaccacuccgucuccaccgccgagcagaccaagcucuacggcuccggcaacaagcucgucaccgucggcuccuccaacuaccagcaguccuucguccccucccccggcgcccgcccccaggucaacggccucuccggccgcaucgacuuccacuggcucaugcucaaccccaacgacaccgucaccuucuccuucaacggcgccuucaucgcccccgaccgcgccuccuuccuccgcggcaaguccaugggcauccaguccggcguccaggucgacgccaacugcgagggcgacugcuaccacuccggcggcaccaucaucuccaaccuccccuuccagaacaucgacucccgcgccgucggcaagugcccccgcuacgucaagcagcgcucccuccuccucgccaccggcaugaagaacguccccgagauccccaagggccgcggccucuucggcgccaucgccggcuucaucgagaacggcugggagggccucaucgacggcugguacggcuuccgccaccagaacgcccagggcgagggcaccgccgccgacuacaaguccacccaguccgccaucgaccagaucaccggcaagcucaaccgccucaucgagaagaccaaccagcaguucgagcucaucgacaacgaguucaacgaggucgagaagcagaucggcaacgucaucaacuggacccgcgacuccaucaccgaggucugguccuacaacgccgagcuccucgucgccauggagaaccagcacaccaucgaccucgccgacuccgagauggacaagcucuacgagcgcgucaagcgccagcuccgcgagaacgccgaggaggacggcaccggcugcuucgagaucuuccacaagugcgacgacgacugcauggccuccauccgcaacaacaccuacgaccacuccaaguaccgcgaggaggccaugcagaaccgcauccagaucgaccccgucaagcucuccuccggcuacaaggacgucauccucugguucuccuucggcgccuccugcuucauccuccucgccaucgucaugggccucgucuucaucugcgucaagaacggcaacaugcgcugcaccaucggcaucuga

SEQ ID NO: 107924 - RNA, 1701 nt, Artificial Sequence; identical to SEQ ID NO: 103018
  derived and/or modified CDS sequence (opt2) from hemagglutinin__InfluenzaA__AHN96442

SEQ ID NO: 107925 - RNA, 1701 nt, Artificial Sequence
  derived and/or modified CDS sequence (opt2) from hemagglutinin__InfluenzaA__AHN96443
augaagaccaucaucgcccucuccuacauccucugccucgucuucgcccagaagcuccccggcaacgacaacuccaccgccacccucugccucggccaccacgccguccccaacggcaccaucgucaagaccaucaccaacgaccagaucgaggucaccaacgccaccgagcucguccaguccuccuccaccggcgagaucugcaacuccccccaccagauccucgacggcgagaacugcacccucaucgacgcccuccucggcgacccccagugcgacggcuuccagaacaagaagugggaccucuucgucgagcgcuccaaggcccacuccaacugcuaccccuacgacguccccgacuacaccucccuccgcucccucgucgccuccuccggcacccucgaguucaacaacgaguccuucaacuggaccggcgucacccagaacggcaccuccuccgccugcauccgccgcuccaacaacuccuucuucucccgccucaacuggcucacccaccucaacuucaaguaccccgcccucaacgucaccaugcccaacaacgagcaguucgacaagcucuacaucuggggcguccaccaccccggcaccgacaaggaccagaucuuccucuacgcccaggccuccggccgcaucaccgucuccaccaagcgcucccagcaggccgucauccccaacaucggcucccgcccccgcguccgcaacauccccucccgcgucuccaucuacuggaccaucgucaagcccggcgacauccuccucaucaacuccaccggcaaccucaucgccccccgcggcuacuucaagauccgcuccggcaaguccuccaucaugcgcuccgacgcccccaucggcaagugcaacuccgccugcaucacccccaacggcuccauccccaacgacaagcccuuccagaacgucaaccgcaucaccuacggcgccugcccccgcuacgucaagcagaacacccucaagcucgccaccggcaugcgcaacguccccgagaagcagacccgcggcaucuucggcgccaucgccggcuucaucgagaacggcugggagggcauggucgacggcugguacggcuuccgccaccagaacuccgagggccgcggccaggccgccgaccucaaguccacccaggccgccaucgaccagaucaacggcaagcucaaccgccucaucggcaagaccaacgagaaguuccaccagaucgagaaggaguucuccgaggucgagggccgcauccaggaccucgagaaguacgucgaggacaccaagaucgaccucugguccuacaacgccgagcuccucgucgcccucgagaaccagcacaccaucgaccucaccgacuccgagaugaacaagcucuucgagaagaccaagaagcagcuccgcgagaacgccgaggacaugggcaacggcugcuucaagaucuaccacaagugcgacaacgccugcaucggcuccauccgcaacggcaccuacgaccacgacgucuaccgcgacgaggcccucaacaaccgcuuccagaucaagggcgucgagcucaaguccggcuacaaggacuggauccucuggaucuccuucgccaucuccugcuuccuccucugcgucgcccuccucggcuucaucaugugggccugccagaagggcaacauccgcugcaacaucugcaucuga

SEQ ID NO: 107926 - RNA, 1701 nt, Artificial Sequence
  derived and/or modified CDS sequence (opt2) from hemagglutinin__InfluenzaA__AHN96444
augaagaccaucaucgcccucuccuacauccucugccucgucuucgcccagaagcuccccggcaacgacaacuccaccgccacccucugccucggccaccacgccguccccaacggcaccaucgucaagaccaucaccaacgaccgcaucgaggucaccaacgccaccgagcucguccagaacuccuccaucggcgagaucugcgacuccccccaccagauccucgacggcgagaacugcacccucaucgacgcccuccucggcgacccccagugcgacggcuuccagaacaagaagugggaccucuucgucgagcgcuccaaggccuacuccaacugcuaccccuacgacguccccgacuacgccucccuccgcucccucgucgccuccuccggcacccucgaguucaacaacgaguccuucaacuggaccggcgucacccagaacggcaccuccuccgccugcauccgccgcuccaacaacuccuucuucucccgccucaacuggcucacccaccucaacuucaaguaccccgcccucaacgucaccaugcccaacaaccagcaguucgacaagcucuacaucuggggcguccaccaccccggcaccgacaaggaccagaucuuccucuacgcccaguccuccggccgcaucaccgucuccaccaagcgcucccagcaggccgucauccccaacaucggcucccgcccccgcauccgcaacauccccucccgcaucuccaucuacuggaccaucgucaagcccggcgacauccuccucaucaacuccaccggcaaccucaucgccccccgcggcuacuucaagauccgcuccggcaaguccuccaucaugcgcuccgacgcccccaucggcaagugcaaguccgagugcaucacccccaacggcuccauccccaacgacaagcccuuccagaacgucaaccgcaucaccuacggcgccugcccccgcuacgucaagcaguccacccucaagcucgccaccggcaugcgcaacguccccgagaagcagacccgcggcaucuucggcgccaucgccggcuucaucgagaacggcugggagggcauggucgacggcugguacggcuuccgccaccagaacuccgagggccgcggccaggccgccgaccucaaguccacccaggccgccaucgaccagaucaacggcaagcucaaccgccucaucggcaagaccaacgagaaguuccaccagaucgagaaggaguucuccgaggucgagggccgcauccaggaccucgagaaguacgucgaggacaccaagaucgaccucugguccuacaacgccgagcuccucgucgcccucgagaaccagcacaccaucgaccucaccgacuccgagaugaacaagcucuucgagaagaccaagaagcagcuccgcgagaacgccgaggacaugggcaacggcugcuucaagaucuaccacaagugcgacaacgccugcaucggcuccauccgcaacggcaccuacgaccacgacgucuaccgcgacgaggcccucaacaaccgcuuccagaucaagggcaucgagcucaaguccggcuacaaggacuggauccucuggaucuccuucgccaucuccugcuuccuccucugcgucgcccuccucggcuucaucaugugggccugccagaagggcaacauccgcugcaacaucugcaucuga

SEQ ID NO: 107927 - RNA, 1701 nt, Artificial Sequence
  derived and/or modified CDS sequence (opt2) from hemagglutinin__InfluenzaA__AHN96445
augaagaccaucaucgcccucuccuacauccucugccucgucuucgcccagaagcuccccggcaacgacaacuccaccgccacccucugccucggccaccacgccguccccaacggcaccaucgucaagaccaucaccaacgaccgcaucgaggucaccaacgccaccgagcucguccagaacuccuccaucggcgagaucugcgacuccccccaccagauccucgacggcgagaacugcacccucaucgacgcccuccucggcgacccccagugcgacggcuuccagaacaagaagugggaccucuucgucgagcgcuccaaggccuacuccaacugcuaccccuacgacguccccgacuacgccucccuccgcucccucgucgccuccuccggcacccucgaguucaacaacgaguccuucaacuggaccggcgucacccagaacggcaccuccuccgccugcauccgccgcuccaacaacuccuucuucucccgccucaacuggcucacccaccucaacuucaaguaccccgcccucaacgucaccaugcccaacaaccagcaguucgacaagcucuacaucuggggcguccaccaccccggcaccgacaaggaccagaucuuccucuacgcccaguccuccggccgcaucaccgucuccaccaagcgcucccagcaggccgucauccccaacaucggcucccgcccccgcauccgcaacauccccucccgcaucuccaucuacuggaccaucgucaagcccggcgacauccuccucaucaacuccaccggcaaccucaucgccccccgcggcuacuucaagauccucuccggcaaguccuccaucaugcgcuccgacgcccccaucggcaagugcaaguccgagugcaucacccccaacggcuccauccccaacgacaagcccuuccagaacgucaaccgcaucaccuacggcgccugcccccgcuacgucaagcaguccacccucaagcucgccaccggcaugcgcaacguccccgagaagcagacccgcggcaucuucggcgccaucgccggcuucaucgagaacggcugggagggcauggucgacggcugguacggcuuccgccaccagaacuccgagggccgcggccaggccgccgaccucaaguccacccaggccgccaucgaccagaucaacggcaagcucaaccgccucaucggcaagaccaacgagaaguuccaccagaucgagaaggaguucuccgaggucgagggccgcauccaggaccucgagaaguacgucgaggacaccaagaucgaccucugguccuacaacgccgagcuccucgucgcccucgagaaccagcacaccaucgaccucaccgacuccgagaugaacaagcucuucgagaagaccaagaagcagcuccgcgagaacgccgaggacaugggcaacggcugcuucaagaucuaccacaagugcgacaacgccugcaucggcuccauccgcaacggcaccuacgaccacgacgucuaccgcgacgaggcccucaacaaccgcuuccagaucaagggcgucgagcucaaguccggcuacaaggacuggauccucuggaucuccuucgccaucuccugcuuccuccucugcgucgcccuccucggcuucaucaugugggccugccagaagggcaacauccgcugcaacaucugcaucuga

SEQ ID NO: 107928 - RNA, 1701 nt, Artificial Sequence
  derived and/or modified CDS sequence (opt2) from hemagglutinin__InfluenzaA__AHN96447
augaagaccaucaucgcccucuccuacauccucugccucgucuucgcccagaagcuccccggcaacgacaacuccaccgccacccucugccucggccaccacgccguccccaacggcaccaucgucaagaccaucaccaacgaccgcaucgaggucaccaacgccaccgagcucguccagaacuccuccaucggcgagaucugcgacuccccccaccagauccucgacggcgagaacugcacccucaucgacgcccuccucggcgacccccagugcgacggcuuccagaacaagaagugggaccucuucgucgagcgcuccaaggccuacuccaacugcuaccccuacgacguccccgacuacgccucccuccgcucccucgucgccuccuccggcacccucgaguucaacaacgaguccuucaacugggccggcgucacccagaacggcaccuccuccgccugcauccgcggcuccaacuccuccuucuucucccgccucaacuggcucacccaccucaacuucaaguaccccgcccucaacgucaccaugcccaacaacgagcaguucgacaagcucuacaucuggggcguccaccaccccggcaccgacaaggaccagaucuuccucuacgcccaguccuccggccgcaucaccgucuccaccaagcgcucccagcaggccgucauccccaacaucggcucccgcccccgcauccgcaacauccccucccgcaucuccaucuacuggaccaucgucaagcccggcgacauccuccucaucaacuccaccggcaaccucaucgccccccgcggcuacuucaagauccgcuccggcaaguccuccaucaugcgcuccgacgcccccaucggcaagugcaaguccgagugcaucacccccaacggcuccauccccaacgacaagcccuuccagaacgucaaccgcaucaccuacggcgccugcccccgcuacgucaagcaguccacccucaagcucgccaccggcaugcgcaacguccccgagaagcagacccgcggcaucuucggcgccaucgccggcuucaucgagaacggcugggagggcauggucgacggcugguacggcuuccgccaccagaacuccgagggccgcggccaggccgccgaccucaaguccacccaggccgccaucgaccagaucaacggcaagcucaaccgccucaucggcaagaccaacgagaaguuccaccagaucgagaaggaguucuccgaggucgagggccgcauccaggaccucgagaaguacgucgaggacaccaagaucgaccucugguccuacaacgccgagcuccucgucgcccucgagaaccagcacaccaucgaccucaccgacuccgagaugaacaagcucuucgagaagaccaagaagcagcuccgcgagaacgccgaggacaugggcaacggcugcuucaagaucuaccacaagugcgacaacgccugcaucggcuccauccgcaacggcaccuacgaccacgacgucuaccgcgacgaggcccucaacaaccgcuuccagaucaagggcgucgagcucaaguccggcuacaaggacuggauccucuggaucuccuucgccaucuccugcuuccuccucugcgucguccuccucggcuucaucaugugggccugccagaagggcaacauccgcugcaacaucugcaucuga

SEQ ID NO: 107929 - RNA, 1701 nt, Artificial Sequence
  derived and/or modified CDS sequence (opt2) from hemagglutinin__InfluenzaA__AHV83765
augaaggccauccucgucguccuccucuacaccuucgccaccgccaacgccgacacccucugcaucggcuaccacgccaacaacuccaccgacaccgucgacaccguccucgagaagaacgucaccgucacccacuccgucaaccuccucgaggacaagcacaacggcaagcucugcaagcuccgcggcgucgccccccuccaccucggcaagugcaacaucgccggcuggauccucggcaaccccgagugcgagucccucuccaccgccuccuccugguccuacaucgucgagaccuccuccuccgacaacggcaccugcuaccccggcgacuucaucaacuacgaggagcuccgcgagcagcucuccuccgucuccuccuucgagcgcuucgagaucuuccccaagaccuccuccuggcccaaccacgacuccaacaagggcgucaccgccgccugcccccacgccggcgccaaguccuucuacaagaaccucaucuggcucgucaagaagggcaacuccuaccccaagcucucccaguccuacaucaacgacaagggcaaggagguccucguccucuggggcauccaccaccccuccaccaccgccgaccagcagucccucuaccagaacgccgacgccuacgucuucgucggcaccucccgcuacuccaagaaguucaagcccgagaucgccauccgccccaagguccgcgaccaggagggccgcaugaacuacuacuggacccucgucgagcccggcgacaagaucaccuucgaggccaccggcaaccucgucgucccccgcuacgccuucaccauggagcgcaacgccggcuccggcaucaucaucuccgacacccccguccacgacugcaacaccaccugccagacccccgagggcgccaucaacaccucccuccccuuccagaacauccaccccaucaccaucggcaagugccccaaguacgucaaguccaccaagcuccgccucgccaccggccuccgcaacguccccuccauccagucccgcggccucuucggcgccaucgccggcuucaucgagggcggcuggaccggcauggucgacggcugguacggcuaccaccaccagaacgagcagggcuccggcuacgccgccgaccucaaguccacccagaacgccaucgacaagaucaccaacaaggucaacuccgucaucgagaagaugaacacccaguucaccgccgucggcaaggaguucaaccaccucgagaagcgcaucgagaaccucaacaagaaggucgacgacggcuuccucgacaucuggaccuacaacgccgagcuccucguccuccucgagaacgagcgcacccucgacuaccacgacuccaacgucaagaaccucuacgagaagguccgcaaccagcucaagaccaacgccaaggagaucggcaacggcugcuucgaguucuaccacaagugcgacaacaccugcauggaguccgucaagaacggcaccuacgacuaccccaaguacuccgaggaggccaagcucaaccgcgagaagaucgacggcgucaagcucgaguccacccgcaucuaccagauccucgccaucuacuccaccgucgccuccucccucguccucgucgucucccucggcgccaucuccuucuggaugugcuccaacggcucccuccagugccgcaucugcaucuga

SEQ ID NO: 107930 - RNA, 1701 nt, Artificial Sequence; identical to SEQ ID NO: 107057
  derived and/or modified CDS sequence (opt2) from hemagglutinin__InfluenzaA__AHV83766

SEQ ID NO: 107931 - RNA, 1701 nt, Artificial Sequence; identical to SEQ ID NO: 106076
  derived and/or modified CDS sequence (opt2) from hemagglutinin__InfluenzaA__AHV83767

SEQ ID NO: 107932 - RNA, 1701 nt, Artificial Sequence
  derived and/or modified CDS sequence (opt2) from hemagglutinin__InfluenzaA__AHV83768
augaaggccauccucgucguccuccucuacaccuucaccaccgccaacgccgacacccucugcaucggcuaccacgccaacaacuccaccgacaccgucgacaccguccucgagaagaacgucaccgucacccacuccgucaaccuccucgaggacaagcacaacggcaagcucugcaagcuccgcggcgucgccccccuccaccucggcaagugcaacaucgccggcuggauccucggcaaccccgagugcgagucccucuccaccgccuccuccugguccuacaucgucgagaccuccuccuccgacaacggcaccugcuaccccggcgacuucaucaacuacgaggagcuccgcgagcagcucuccuccgucuccuccuucgagcgcuucgagaucuuccccaagaccuccuccuggcccaaccacgacuccaacaagggcgucaccgccgccugcccccacgccggcgccaaguccuucuacaagaaccucaucuggcucgucaagaagggcaacuccuaccccaagcucucccaguccuacaucaacgacaagggcaaggagguccucguccucuggggcauccaccaccccuccaccaccgccgaccagcagucccucuaccagaacgccgacgccuacgucuucgucggcaccucccgcuacuccaagaaguucaagcccgagaucgccauccgccccaagguccgcgaccaggagggccgcaugaacuacuacuggacccuccucgagcccggcgacaagaucaccuucgaggccaccggcaaccucgucgucccccgcuacgccuucaccauggagcgcaacgccggcuccggcaucaucaucuccgacacccccguccacgacugcaacaccaccugccagacccccgagggcgccaucaacaccucccuccccuuccagaacauccaccccaucaccaucggcaagugccccaaguacgucaaguccaccaagcuccgccucgccaccggccuccgcaacguccccuccauccagucccgcggccucuucggcgccaucgccggcuucaucgagggcggcuggaccggcauggucgacggcugguacggcuaccaccaccagaacgagcagggcuccggcuacgccgccgaccucaaguccacccagaacgccaucgacaagaucaccaacaaggucaacuccgucaucgagaagaugaacacccaguucaccgccgucggcaaggaguucaaccaccucgagaagcgcaucgagaaccucaacaagaaggucgacgacggcuuccucgacaucuggaccuacaacgccgagcuccucguccuccucgagaacgagcgcacccucgacuaccacgacuccaacgucaagaaccucuacgagaagguccgcaaccagcucaagaacaacgccaaggagaucggcaacggcugcuucgaguucuaccacaagugcgacaacaccugcauggacuccgucaagaacggcaccuacgacuaccccaaguacuccgaggaggccaagcucaaccgcgagaagaucgacggcgucaagcucgaguccacccgcaucuaccagauccucgccaucuacuccaccgucgccuccucccucguccucgucgucucccucggcgccaucuccuucuggaugugcuccaacggcucccuccagugccgcaucugcaucuga

SEQ ID NO: 107933 - RNA, 1701 nt, Artificial Sequence; identical to SEQ ID NO: 107034
  derived and/or modified CDS sequence (opt2) from hemagglutinin__InfluenzaA__AHV83770

SEQ ID NO: 107934 - RNA, 1701 nt, Artificial Sequence
  derived and/or modified CDS sequence (opt2) from hemagglutinin__InfluenzaA__AHV83771
augaaggccauccucgucguccuccucuacaccuucgccaccgccaacgccgacacccucugcaucggcuaccacgccaacaacuccaccgacaccgucgacaccguccucgagaagaacgucaccgucacccacuccgucaaccuccucgaggacaagcacaacggcaagcucugcaagcuccgcggcgucgccccccuccaccucggcaagugcaacaucgccggcuggauccucggcaaccccgagugcgagucccucuccaccgccuccuccugguccuacaucgucgagaccuccuccuccgacaacggcaccugcuaccccggcgacuucaucaacuacgaggagcuccgcgagcagcucuccuccgucuccuccuucgagcgcuucgagaucuuccccaagaccuccuccuggcccaaccacgacuccaacaagggcgucaccgccgccugcccccacgccggcgccaaguccuucuacaagaaccucaucuggcucgucaagaagggcaacuccuaccccaagcucucccaguccuacaucaacgacaagggcaaggagguccucguccucuggggcauccaccaccccuccaccaccaccgaccagcagucccucuaccagaacgccgacgccuacgucuucgucggcaccucccgcuacuccaagaaguucaagcccgagaucgccauccgccccaagguccgcgaccaggagggccgcaugaacuacuacuggacccucgucgagcccggcgacaagaucaccuucgaggccaccggcaaccucgucgucccccgcuacgccuucaccauggagcgcaacgccggcuccggcaucaucaucuccgacacccccguccacgacugcaacaccaccugccagacccccgagggcgccaucaacaccucccuccccuuccagaacauccaccccaucaccaucggcaagugccccaaguacgucaaguccaccaagcuccgccucgccaccggccuccgcaacguccccuccauccagucccgcggccucuucggcgccaucgccggcuucaucgagggcggcuggaccggcauggucgacggcugguacggcuaccaccaccagaacgagcagggcuccggcuacgccgccgaccagaaguccacccagaacgccaucgacaagaucaccaacaaggucaacuccgucaucgagaagaugaacacccaguucaccgccgucggcaaggaguucaaccaccucgagaagcgcaucgagaaccucaacaagaaggucgacgacggcuuccucgacaucuggaccuacaacgccgagcuccucguccuccucgagaacgagcgcacccucgacuaccacgacuccaacgucaagaaccucuacgagaagguccgcaaccagcucaagaacaacgccaaggagaucggcaacggcugcuucgaguucuaccacaagugcgacaacaccugcauggaguccgucaagaacggcaccuacgacuaccccaaguacuccgaggaggccaagcucaaccgcgagaagaucgacggcgucaagcucgaguccacccgcaucuaccagauccucgccaucuacuccaccgucgccuccucccucguccucgucgucucccucggcgccaucuccuucuggaugugcuccaacggcucccuccagugccgcaucugcaucuga

SEQ ID NO: 107935 - RNA, 1701 nt, Artificial Sequence; identical to SEQ ID NO: 106076
  derived and/or modified CDS sequence (opt2) from hemagglutinin__InfluenzaA__AHV83772

SEQ ID NO: 107936 - RNA, 1701 nt, Artificial Sequence; identical to SEQ ID NO: 106076
  derived and/or modified CDS sequence (opt2) from hemagglutinin__InfluenzaA__AHV83773

SEQ ID NO: 107937 - RNA, 1701 nt, Artificial Sequence; identical to SEQ ID NO: 106076
  derived and/or modified CDS sequence (opt2) from hemagglutinin__InfluenzaA__AHV83774

SEQ ID NO: 107938 - RNA, 1701 nt, Artificial Sequence
  derived and/or modified CDS sequence (opt2) from hemagglutinin__InfluenzaA__AHV83775
augaaggccauccucgucguccuccucuacaccuucgccaccgccaacgccgacacccucugcaucggcuaccacgccaacaacuccaccgacaccgucgacaccguccucgagaagaacgucaccgucacccacuccgucaaccuccucgaggacaagcacaacggcaagcucugcaagcuccgcggcgucgccccccuccaccucggcaagugcaacaucgccggcuggauccucggcaaccccgagugcgagucccucuccaccgccuccuccugguccuacaucgucgagaccuccuccuccgacaacggcaccugcuaccccggcgacuucaucaacuacgaggagcuccgcgagcagcucuccuccgucuccuccuucgagcgcuucgagaucuuccccaagaccuccuccuggcccaaccacgacuccaacaagggcgucaccgccgccugcccccacgccggcgccaaguccuucuacaagaaccucaucuggcucgucaagaagggcaacuccuaccccaagcucucccaguccuacaucaacgacaagggcaaggagguccucguccucuggggcauccaccaccccuccaccaccgccgaccagcagucccucuaccagaacgccgacgccuacgucuucgucggcaccucccgcuacuccaagaaguucaagcccgagaucgccauccgccccaagguccgcgaccaggagggccgcaugaacuacuacuggacccucgucgagcccggcgacaagaucaccuucgaggccaccggcaaccucgucgucccccgcuacgccuucaccauggagcgcaacgccggcuccggcaucaucaucuccgacacccccguccacgacugcaacaccaccugccagacccccgagggcgccaucaacaccucccuccccuuccagaacauccaccccaucaccaucggcaagugccccaaguacgucaaguccaccaagcuccgccucgccaccggccuccgcaacauccccuccauccagucccgcggccucuucggcgccaucgccggcuucaucgagggcggcuggaccggcauggucgacggcugguacggcuaccaccaccagaacgagcagggcuccggcuacgccgccgaccucaaguccacccagaacgccaucgacaagaucaccaacaaggucaacuccgucaucgagaagaugaacacccaguucaccgccgucggcaaggaguucaaccaccucgagaagcgcaucgagaaccucaacaagaaggucgacgacggcuuccucgacaucuggaccuacaacgccgagcuccucguccuccucgagaacgagcgcacccucgacuaccacgacuccaacgucaagaaccucuacgagaagguccgcaaccagcucaagaacaacgccaaggagaucggcaacggcugcuucgaguucuaccacaagugcgacaacaccugcauggaguccgucaagaacggcaccuacgacuaccccaaguacuccgaggaggccaagcucaaccgcgagaagaucgacggcgucaagcucgaguccacccgcaucuaccagauccucgccaucuacuccaccgucgccuccucccucguccucgucgucucccucggcgccaucuccuucuggaugugcuccaacggcucccuccagugccgcaucugcaucuga

SEQ ID NO: 107939 - RNA, 1701 nt, Artificial Sequence; identical to SEQ ID NO: 106076
  derived and/or modified CDS sequence (opt2) from hemagglutinin__InfluenzaA__AHV83776

SEQ ID NO: 107940 - RNA, 1701 nt, Artificial Sequence
  derived and/or modified CDS sequence (opt2) from hemagglutinin__InfluenzaA__AHV83777
augaaggccauccucgucguccuccucuacaccuucgccaccgccaacgccgacacccucugcaucggcuaccacgccaacaacuccaccgacaccgucgacaccguccucgagaagaacgucaccgucacccacuccgucaaccuccucgaggacaagcacaacggcaagcucugcaagcuccgcggcgucgccccccuccaccucggcaagugcaacaucgccggcuggauccucggcaaccccgagugcgagucccucuccaccgccuccuccugguccuacaucgucgagaccuccuccuccgacaacggcaccugcuaccccggcgacuucaucaacuacgaggagcuccgcgagcagcucuccuccgucuccuccuucgagcgcuucgagaucuuccccaagaccuccuccuggcccaaccacgacuccaacaagggcgucaccgccgccugcccccacgccggcgccaaguccuucuacaagaaccucaucuggcucgucaagaagggcaacuccuaccccaagcucucccaguccuacaucaacgacaagggcaaggagguccucguccucuggggcauccaccaccccuccaccaccgccgaccagcagucccucuaccagaacgccgacgccuacgucuucgucggcaccucccgcuacuccaagaaguucaagcccgagaucgccauccgccccaagguccgcgaccaggagggccgcaugaacuacuacuggacccucgucgagcccggcgacaagaucaccuucgaggccaccggcaaccucgucgucccccgcuacgccuucaccauggagcgcaacgccggcuccggcaucaucaucuccgacacccccguccacgacugcaacaccaccugccagacccccgagggcgccaucaacaccucccuccccuuccagaacauccaccccaucaccaucggcaagugccccaaguacgucaaguccaccaagcuccgccucgccaccggccuccgcaacauccccuccauccagucccgcggccucuucggcgccaucgccggcuucaucgagggcggcuggaccggcauggucgacggcugguacggcuaccaccaccagaacgagcagggcuccggcuacgccgccgaccucaaguccacccagaacgccaucgacaagaucaccaacaaggucaacuccgucaucgagaagaugaacacccaguucaccgccgucggcaaggaguucaaccaccucgagaagcgcaucgagaaccucaacaagaaggucgacgacggcuuccucgacaucuggaccuacaacgccgagcuccucguccuccucgagaacgagcgcacccucgacuaccacgacuccaacgucaagaaccucuacgagaagguccgcaaccagcucaagaacaacgccaaggagaucggcaacggcugcuucgaguucuaccacaagugcgacaacaccugcauggaguccgucaagaacggcaccuacgacuaccccaaguacuccgaggaggccaagcucaaccgcgagaagaucgacggcgucaagcucgaguccacccgcaucuaccagauccucgccaucuacuccaccgucgccuccucccucguccucgucgucucccucggcgccaucugcuucuggaugugcuccaacggcucccuccagugccgcaucugcaucuga

SEQ ID NO: 107941 - RNA, 1701 nt, Artificial Sequence
  derived and/or modified CDS sequence (opt2) from hemagglutinin__InfluenzaA__AHV83778
augaaggccauccucgucguccuccucuacaccuucaccaccgccaacgccgacacccucugcaucggcuaccacgccaacaacuccaccgacaccgucgacaccguccucgagaagaacgucaccgucacccacuccgucaaccuccucgaggacaagcacaacggcaagcucugcaagcuccgcggcgucgccccccuccaccucggcaagugcaacaucgccggcuggauccucggcaaccccgagugcgagucccucuccaccgccuccuccugguccuacaucgucgagaccuccuccuccgacaacggcaccugcuaccccggcgacuucaucaacuacgaggagcuccgcgagcagcucuccuccgucuccuccuucgagcgcuucgagaucuuccccaagaccuccuccuggcccaaccacgacuccaacaagggcgucaccgccgccugcccccacgccggcgccaaguccuucuacaagaaccucaucuggcucgucaagaagggcaacuccuaccccaagcucucccaguccuacaucaacgacaagggcaaggagguccucguccucuggggcauccaccaccccuccaccaccgccgaccagcagucccucuaccagaacgccgacgccuacgucuucgucggcaccucccgcuacuccaagaaguucaagcccgagaucgccauccgccccaagguccgcgaccaggagggccgcaugaacuacuacuggacccucgucgagcccggcgacaagaucaccuucgaggccaccggcaaccucgucgucccccgcuacgccuucaccauggagcgcaacgccggcuccggcaucaucaucuccgacacccccgucuacgacugcaacaccaccugccagacccccgagggcgccaucaacaccucccuccccuuccagaacauccaccccaucaccaucggcaagugccccaaguacgucaaguccaccaagcuccgccucgccaccggccuccgcaacguccccuccauccagucccgcggccucuucggcgccaucgccggcuucaucgagggcggcuggaccggcauggucgacggcugguacggcuaccaccaccagaacgagcagggcuccggcuacgccgccgaccucaaguccacccagaacgccaucgacaagaucaccaacaaggucaacuccgucaucgagaagaugaacacccaguucaccgccgucggcaaggaguucaaccaccucgagaagcgcaucgagaaccucaacaagaaggucgacgacggcuuccucgacaucuggaccuacaacgccgagcuccucguccuccucgagaacgagcgcacccucgacuaccacgacuccaacgucaagaaccucuacgagaagguccgcaaccagcucaagaacaacgccaaggagaucggcaacggcugcuucgaguucuaccacaagugcgacaacaccugcauggaguccgucaagaacggcaccuacgacuaccccaaguacuccgaggaggccaagcucaaccgcgagaagaucgacggcgucaagcucgaguccacccgcaucuaccagauccucgccaucuacuccaccgucgccuccucccucguccucgucgucucccucggcgccaucuccuucuggaugugcuccaacggcucccuccagugccgcaucugcaucuga

SEQ ID NO: 107942 - RNA, 1701 nt, Artificial Sequence
  derived and/or modified CDS sequence (opt2) from hemagglutinin__InfluenzaA__AHV83779
augaaggccauccucgucguccuccucuacaccuucgccaccaccaacgccgacacccucugcaucggcuaccacgccaacaacuccaccgacaccgucgacaccguccucgagaagaacgucaccgucacccacuccgucaaccuccucgaggacaagcacaacggcaagcucugcaagcuccgcggcgucgccccccuccaccucggcaagugcaacaucgccggcuggauccucggcaaccccgagugcgagucccucuccaccgccuccuccugguccuacaucgucgagaccuccuccuccgacaacggcaccugcuaccccggcgacuucaucaacuacgaggagcuccgcgagcagcucuccuccgucuccuccuucgagcgcuucgagaucuuccccaagaccuccuccuggcccaaccacgacuccaacaagggcgucaccgccgccugcccccacgccggcgccaaguccuucuacaagaaccucaucuggcucgucaagaagggcaacuccuaccccaagcucucccaguccuacaucaacgacaagggcaaggagguccucguccucuggggcauccaccaccccuccaccaccgccgaccagcagucccucuaccagaacgccgacgccuacgucuucgucggcaccucccgcuacuccaagaaguucaagcccgagaucgccauccgccccaagguccgcgaccaggagggccgcaugaacuacuacuggacccucgucgagcccggcgacaagaucaccuucgaggccaccggcaaccucgucgucccccgcuacgccuucaccauggagcgcaacgccggcuccggcaucaucaucuccgacacccccguccacgacugcaacaccaccugccagacccccgagggcgccaucaacaccucccuccccuuccagaacauccaccccaucaccaucggcaagugccccaaguacgucaaguccaccaagcuccgccucgccaccggccuccgcaacguccccuccauccagucccgcggccucuucggcgccaucgccggcuucaucgagggcggcuggaccggcauggucgacggcugguacggcuaccaccaccagaacgagcagggcuccggcuacgccgccgaccucaaguccacccagaacgccaucgacaagaucaccaacaaggucaacuccgucaucgagaagaugaacacccaguucaccgccgucggcaaggaguucaaccaccucgagaagcgcaucgagaaccucaacaagaaggucgacgacggcuuccucgacaucuggaccuacaacgccgagcuccucguccuccucgagaacgagcgcacccucgacuaccacgacuccaacgucaagaaccucuacgagaagguccgcaaccagcucaagaacaacgccaaggagaccggcaacggcugcuucgaguucuaccacaagugcgacaacaccugcauggaguccgucaagaacggcaccuacgacuaccccaaguacuccgaggaggccaagcucaaccgcgagaagaucgacggcgucaagcucgaguccacccgcaucuaccagauccucgccaucuacuccaccgucgccuccucccucguccucgucgucucccucggcgccaucuccuucuggaugugcuccaacggcucccuccagugccgcaucugcaucuga

SEQ ID NO: 107943 - RNA, 1701 nt, Artificial Sequence
  derived and/or modified CDS sequence (opt2) from hemagglutinin__InfluenzaA__AHV83780
augaaggccauccucgucguccuccucuacaccuucgccaccgccaacgccgacacccucugcaucggcuaccacgccaacaacuccaccgacaccgucgacaccguccucgagaagaacgucaccgucacccacuccgucaaccuccucgaggacaagcacaacggcaagcucugcaagcuccgcggcgucgccccccuccaccucggcaagugcaacaucgccggcuggauccucggcaaccccgagugcgagucccucuccaccgccuccuccugguccuacaucgucgagaccuccuccuccgacaacggcaccugcuaccccggcgacuucaucaacuacgaggagcuccgcgagcagcucuccuccgucuccuccuucgagcgcuucgagaucuuccccaagaccuccuccuggcccaaccacgacuccaacaagggcgucaccgccgccugcccccacgccggcgccaaguccuucuacaagaaccucaucuggcucgucaagaagggcaacuccuaccccaagcuccgccaguccuacaucaacgacaagggcaaggagguccucguccucuggggcauccaccaccccuccaccaccaccgaccagcagucccucuaccagaacgccgacgccuacgucuucgucggcaccucccgcuacuccaagaaguucaagcccgagaucgccauccgccccaagguccgcgaccaggagggccgcaugaacuacuacuggacccucgucgagcccggcgacaagaucaccuucgaggccaccggcaaccucgucgucccccgcuacgccuucaccauggagcgcaacgccggcuccggcaucaucaucuccgacacccccguccacgacugcaacaccaccugccagacccccgagggcgccaucaacaccucccuccccuuccagaacauccaccccaucaccaucggcaagugccccaaguacgucaaguccaccaagcuccgccucgccaccggccuccgcaacguccccuccauccagucccgcggccucuucggcgccaucgccggcuucaucgagggcggcuggaccggcauggucgacggcugguacggcuaccaccaccagaacgagcagggcuccggcuacgccgccgaccucaaguccacccagaacgccaucgacaagaucaccaacaaggucaacuccgucaucgagaagaugaacacccaguucaccgccgucggcaaggaguucaaccaccucgagaagcgcaucgagaaccucaacaagaaggucgacgacggcuuccucgacaucuggaccuacaacgccgagcuccucguccuccucgagaacgagcgcacccucgacuaccacgacuccaacgucaagaaccucuacgagaagguccgcaaccagcucaagaacaacgccaaggagaucggcaacggcugcuucgaguucuaccacaagugcgacaacaccugcauggaguccgucaagaacggcaccuacgacuaccccaaguacuccgaggaggccaagcucaaccgcgagaagaucgacggcgucaagcucgaguccacccgcaucuaccagauccucgccaucuacuccaccgucgccuccucccucguccucgucgucucccucggcgccaucuccuucuggaugugcuccaacggcucccuccagugccgcaucugcaucuga

SEQ ID NO: 107944 - RNA, 1701 nt, Artificial Sequence; identical to SEQ ID NO: 106076
  derived and/or modified CDS sequence (opt2) from hemagglutinin__InfluenzaA__AHV83781

SEQ ID NO: 107945 - RNA, 1701 nt, Artificial Sequence
  derived and/or modified CDS sequence (opt2) from hemagglutinin__InfluenzaA__AHV83782
augaaggccauccucgucguccuccucuacacccucgccaccgccaacgccgacacccucugcaucggcuaccacgccaacaacuccaccgacaccgucgacaccguccucgagaagaacgucaccgucacccacuccgucaaccuccucgaggacaagcacaacggcaagcucugcaagcuccgcggcgucgccccccuccaccucggcaagugcaacaucgccggcuggauccucggcaaccccgagugcgagucccucuccaccgccuccuccugguccuacaucgucgagaccuccuccuccgacaacggcaccugcuaccccggcgacuucaucaacuacgaggagcuccgcgagcagcucuccuccgucuccuccuucgagcgcuucgagaucuuccccaagaccuccuccuggcccaaccacgacuccaacaagggcgucaccgccgccugcccccacgccggcgccaaguccuucuacaagaaccucaucuggcucgucaagaagggcaacuccuaccccaagcucucccaguccuacaucaacgacaagggcaaggagguccucguccucuggggcauccaccaccccuccaccaccgccgaccagcagucccucuaccagaacgccgacgccuacgucuucgucggcaccucccgcuacuccaagaaguucaagcccgagaucgccauccgccccaagguccgcgaccaggagggccgcaugaacuacuacuggacccucgucgagcccggcgacaagaucaccuucgaggccaccggcaaccucgucgccccccgcuacgccuucaccauggagcgcaacgccggcuccggcaucaucaucuccgacacccccguccacgacugcaacaccaccugccagacccccgagggcgccaucaacaccucccuccccuuccagaacauccaccccaucaccaucggcaagugccccaaguacgucaaguccaccaagcuccgccucgccaccggccuccgcaacguccccuccauccagucccgcggccucuucggcgccaucgccggcuucaucgagggcggcuggaccggcauggucgacggcugguacggcuaccaccaccagaacgagcagggcuccggcuacgccgccgaccucaaguccacccagaacgccaucgacaagaucaccaacaaggucaacuccgucaucgagaagaugaacacccaguucaccgccgucggcaaggaguucaaccaccucgagaagcgcaucgagaaccucaacaagaaggucgacgacggcuuccucgacaucuggaccuacaacgccgagcuccucguccuccucgagaacgagcgcacccucgacuaccacgacuccaacgucaagaaccucuacgagaagguccgcaaccagcucaagaacaacgccaaggagaucggcaacggcugcuucgaguucuaccacaagugcgacaacaccugcauggaguccgucaagaacggcaccuacgacuaccccaaguacuccgaggaggccaagcucaaccgcgagaagaucgacggcgucaagcucgaguccacccgcaucuaccagauccucgccaucuacuccaccgucgccuccucccucguccucgucgucucccucggcgccaucuccuucuggaugugcuccaacggcucccuccagugccgcaucugcaucuga

SEQ ID NO: 107946 - RNA, 1701 nt, Artificial Sequence
  derived and/or modified CDS sequence (opt2) from hemagglutinin__InfluenzaA__AHV83783
augaaggccauccucgucguccuccucuacaccuucgccaccgccaacgccgacacccucugcaucggcuaccacgccaacaacuccaccgacaccgucgacaccguccucgagaagaacaucaccgucacccacuccgucaaccuccucgaggacaagcacaacggcaagcucugcaagcuccgcggcgucgccccccuccaccucggcaagugcaacaucgccggcuggauccucggcaaccccgagugcgagucccucuccaccgccuccuccugguccuacaucgucgagaccuccuccuccgacaacggcaccugcuaccccggcgacuucaucaacuacgaggagcuccgcgagcagcucuccuccgucuccuccuucgagcgcuucgagaucuuccccaagaccuccuccuggcccaaccacgacuccaacaagggcgucaccgccgccugcccccacgccggcgccaagggcuucuacaagaaccucaucuggcucgucaagaagggcaacuccuaccccaagcuccgccaguccuacaucaacgacaagggcaaggagguccucguccucuggggcauccaccaccccuccaccaccaccgaccagcagucccucuaccagaacgccgacgccuacgucuucgucggcaccucccgcuacuccaagaaguucaagcccgagaucgccauccgccccaagguccgcgaccaggagggccgcaugaacuacuacuggacccucgucgagcccggcgacaagaucaccuucgaggccaccggcaaccucgucgucccccgcuacgccuucaccauggagcgcaacgccggcuccggcaucaucaucuccgacacccccguccacgacugcaacaccaccugccagacccccgagggcgccaucaacaccucccuccccuuccagaacauccaccccaucaccaucggcaagugccccaaguacgucaaguccaccaagcuccgccucgccaccggccuccgcaacguccccuccauccagucccgcggccucuucggcgccaucgccggcuucaucgagggcggcuggaccggcauggucgacggcugguacggcuaccaccaccagaacgagcagggcuccggcuacgccgccgaccucaaguccacccagaacgccaucgacaagaucaccaacaaggucaacuccgucaucgagaagaugaacacccaguucaccgccgucggcaaggaguucaaccaccucgagaagcgcaucgagaaccucaacaagaaggucgacgacggcuuccucgacaucuggaccuacaacgccgagcuccucguccuccucgagaacgagcgcacccucgacuaccacgacuccaacgucaagaaccucuacgagaagguccgcaaccagcucaagaacaacgccaaggagaucggcaacggcugcuucgaguucuaccacaagugcgacaacaccugcauggaguccgucaagaacggcaccuacgacuaccccaaguacuccgaggaggccaagcucaaccgcgagaagaucgacggcgucaagcucgaguccacccgcaucuaccagauccucgccaucuacuccaccgucgccuccucccucguccucgucgucucccucggcgccaucuccuucuggaugugcuccaacggcucccuccagugccgcaucugcaucuga

SEQ ID NO: 107947 - RNA, 1701 nt, Artificial Sequence; identical to SEQ ID NO: 106076
  derived and/or modified CDS sequence (opt2) from hemagglutinin__InfluenzaA__AHV83784

SEQ ID NO: 107948 - RNA, 1701 nt, Artificial Sequence; identical to SEQ ID NO: 106076
  derived and/or modified CDS sequence (opt2) from hemagglutinin__InfluenzaA__AHV83785

SEQ ID NO: 107949 - RNA, 1701 nt, Artificial Sequence; identical to SEQ ID NO: 106076
  derived and/or modified CDS sequence (opt2) from hemagglutinin__InfluenzaA__AHV83787

SEQ ID NO: 107950 - RNA, 1701 nt, Artificial Sequence
  derived and/or modified CDS sequence (opt2) from hemagglutinin__InfluenzaA__AHV83788
augaaggccauccucgucguccuccucuacaccuucgccaccgccaacgccgacacccucugcaucggcuaccacgccaacaacuccaccgacaccgucgacaccguccucgagaagaacgucaccgucacccacuccgucaaccuccucgaggacaagcacaacggcaagcucugcaagcuccgcggcgucuccccccuccaccucggcaagugcaacaucgccggcuggauccucggcaaccccgagugcgagucccucuccaccgccuccuccugguccuacaucgucgagaccuccuccuccgacaacggcaccugcuaccccggcgacuucgucaacuacgaggagcuccgcgagcagcucuccuccgucuccuccuucgagcgcuucgagaucuuccccaagaccuccuccuggcccaaccacgacuccaacaagggcgucaccgccgccugcccccacgccggcgccaaguccuucuacaagaaccucaucuggcucgucaagaagggcaacuccuaccccaagcucucccaguccuacaucaacgacaagggcaaggagguccucguccucuggggcauccaccaccccuccaccaccgccgaccagcagucccucuaccagaacgccgacgccuacgucuucgucggcaccucccgcuacuccaagaaguucaagcccgagaucgccauccgccccaagguccgcgaccaggagggccgcaugaacuacuacuggacccucgucgagcccggcgacaagaucaccuucgaggccaccggcaaccucgucgucccccgcuacgccuucaccauggagcgcaacgccggcuccggcaucaucaucuccgacacccccguccacgacugcaacaccaccugccagacccccgagggcgccaucaacaccucccuccccuuccagaacauccaccccaucaccaucggcaagugccccaaguacgucaaguccaccaagcuccgccucgccaccggccuccgcaacguccccuccauccagucccgcggccucuucggcgccaucgccggcuucaucgagggcggcuggaccggcauggucgacggcugguacggcuaccaccaccagaacgagcagggcuccggcuacgccgccgaccucaaguccacccagaacgccaucgacaagaucaccaacaaggucaacuccgucaucgagaagaugaacacccaguucaccgccgucggcaaggaguucaaccaccucgagaagcgcaucgagaaccucaacaagaaggucgacgacggcuuccucgacaucuggaccuacaacgccgagcuccucguccuccucgagaacgagcgcacccucgacuaccacgacuccaacgucaagaaccucuacgagaagguccgcaaccagcucaagaacaacgccaaggagaucggcaacggcugcuucgaguucuaccacaagugcgacaacaccugcauggaguccgucaagaacggcaccuacgacuaccccaaguacuccgaggaggccaagcucaaccgcgagaagaucgacggcgucaagcucgaguccacccgcaucuaccagauccucgccaucuacuccaccgucgccuccucccucguccucgucgucucccucggcgccaucuccuucuggaugugcuccaacggcucccuccagugccgcaucugcaucuga

SEQ ID NO: 107951 - RNA, 1701 nt, Artificial Sequence; identical to SEQ ID NO: 107938
  derived and/or modified CDS sequence (opt2) from hemagglutinin__InfluenzaA__AHV83789

SEQ ID NO: 107952 - RNA, 1701 nt, Artificial Sequence; identical to SEQ ID NO: 106076
  derived and/or modified CDS sequence (opt2) from hemagglutinin__InfluenzaA__AHV83790

SEQ ID NO: 107953 - RNA, 1701 nt, Artificial Sequence; identical to SEQ ID NO: 106076
  derived and/or modified CDS sequence (opt2) from hemagglutinin__InfluenzaA__AHV83791

SEQ ID NO: 107954 - RNA, 1701 nt, Artificial Sequence; identical to SEQ ID NO: 106076
  derived and/or modified CDS sequence (opt2) from hemagglutinin__InfluenzaA__AHV83792

SEQ ID NO: 107955 - RNA, 1701 nt, Artificial Sequence
  derived and/or modified CDS sequence (opt2) from hemagglutinin__InfluenzaA__AHV83793
augaaggccauccucgucguccuccucuacaccuucgccaccgccaacgccgacacccucugcaucggcuaccacgccaacaacuccaccgacaccgucgacaccguccucgagaagaacgucaccgucacccacuccgucaaccuccucgaggacaagcacaacggcaagcucugcaagcuccgcggcgucgccccccuccaccucggcaagugcaacaucgccggcuggauccucggcaaccccgagugcgagucccucuccaccgccuccuccugguccuacaucgucgagaccuccuccuccgacaacggcaccugcuaccccggcgacuucaucaacuacgaggagcuccgcgagcagcucuccuccgucuccuccuucgagaaguucgagaucuuccccaagaccuccuccuggcccaaccacgacuccaacaagggcgucaccgccgccugcccccacgccggcgccaaguccuucuacaagaaccucaucuggcucgucaagaagggcaacuccuaccccaagcucucccaguccuacaucaacgacaagggcaaggagauccucguccucuggggcauccaccaccccuccaccaccgccgaccagcagucccucuaccagaacgccgacgccuacgucuucgucggcaccucccgcuacuccaagaaguucaagcccgagaucgccauccgccccaagguccgcgaccaggagggccgcaugaacuacuacuggacccucgucgagcccggcgacaagaucaccuucgaggccaccggcaaccucgucgucccccgcuacgccuucaccauggagcgcaacgccggcuccggcaucaucaucuccgacacccccguccacgacugcaacaccaccugccagacccccgagggcgccaucaacaccucccuccccuuccagaacauccaccccaucaccaucggcaagugccccaaguacgucaaguccaccaagcuccgccucgccaccggccuccgcaacguccccuccauccagucccgcggccucuucggcgccaucgccggcuucaucgagggcggcuggaccggcauggucgacggcugguacggcuaccaccaccagaacgagcagggcuccggcuacgccgccgaccagaaguccacccagaacgccaucgacaagaucaccaacaaggucaacuccgucaucgagaagaugaacacccaguucaccgccgucggcaaggaguucaaccaccucgagaagcgcaucgagaaccucaacaagaaggucgacgacggcuuccucgacaucuggaccuacaacgccgagcuccucguccuccucgagaacgagcgcacccucgacuaccacgacuccaacgucaagaaccucuacgagaagguccgcaaccagcucaagaacaacgccaaggagaucggcaacggcugcuucgaguucuaccacaagugcgacaacaccugcauggaguccgucaagaacggcaccuacgacuaccccaaguacuccgaggaggccaagcucaaccgcgagaagaucgacggcgucaagcucgaguccacccgcaucuaccagauccucgccaucuacuccaccgucgccuccucccucguccucgucgucucccucggcgccaucuccuucuggaugugcuccaacggcucccuccagugccgcaucugcaucuga

SEQ ID NO: 107956 - RNA, 1701 nt, Artificial Sequence
  derived and/or modified CDS sequence (opt2) from hemagglutinin__InfluenzaA__AHV83794
augaaggccauccucgucguccuccucuacaccuucgccaccgccaacgccgacacccucugcaucggcuaccacgccaacaacuccaccgacaccgucgacaccguccucgagaagaacgucaccgucacccacuccgucaaccuccucgaggacaagcacaacggcaagcucugcaagcuccgcggcgucgccccccuccaccucggcaagugcaacaucgccggcuggauccucggcaaccccgagugcgagucccucuccaccgccuccuccugguccuacaucgucgagaccuccuccuccgacaacggcaccugcuaccccggcgacuucaucaacuacgaggagcuccgcgagcagcucuccuccgucuccuccuucgagcgcuucgagaucuuccccaagaccuccuccuggcccaaccacgacuccaacaagggcgucaccgccgccugcccccacgccggcgccaaguccuucuacaagaaccucaucuggcucgucaagaagggcaacuccuaccccaagcucucccaguccuacaucaacgacaagggcaaggagguccucguccucuggggcauccaccaccccuccaccaccgccgaccagcagucccucuaccagaacgccgacgccuacgucuucgucggcaccucccgcuacuccaagaaguucaagcccgagaucgccauccgccccaagguccgcgaccaggagggccgcaugaacuacuacuggacccucgucgagcccggcgacaagaucaccuucgaggccaccggcaaccucgucgucccccgcuacgccuucaccauggagcgcaacgccggcuccggcaucaucaucuccgacacccccguccacgacugcaacaccaccugccagacccccgagggcgccaucaacaccucccuccccuuccagaacauccaccccaucaccaucggcaagugccccaaguacgucaaguccaccaagcuccgccucgccaccggccuccgcaacguccccuccauccagucccgcggccucuucggcgccaucgccggcuucaucgagggcggcuggaccggcauggucgacggcugguacggcuaccaccaccagaacgagcagggcuccggcuacgccgccgaccagaaguccacccagaacgccaucgacaagaucaccaacaaggucaacuccgucaucgagaagaugaacacccaguucaccgccgucggcaaggaguucaaccaccucgagaagcgcaucgagaaccucaacaagaaggucgacgacggcuuccucgacaucuggaccuacaacgccgagcuccucguccuccucgagaacgagcgcacccucgacuaccacgacuccaacgucaagaaccucuacgagaagguccgcaaccagcucaagaacaacgccaaggagaucggcaacggcugcuucgaguucuaccacaagugcgacaacaccugcauggaguccgucaagaacggcaccuacgacuaccccaaguacuccgaggaggccaagcucaaccgcgagaagaucgacggcgucaagcucgaguccacccgcaucuaccagauccucgccaucuacuccaccgucgccuccucccucguccucgucgucucccucggcgccaucuccuucuggaugugcuccaacggcucccuccagugccgcaucugcaucuga

SEQ ID NO: 107957 - RNA, 1701 nt, Artificial Sequence
  derived and/or modified CDS sequence (opt2) from hemagglutinin__InfluenzaA__AHV83795
augaaggccauccucgucguccuccucuacaccuucgccaccgccaacgccgacacccucugcaucggcuaccacgccaacaacuccaccgacaccgucgacaccguccucgagaagaacgucaccgucacccacuccgucaaccuccucgaggacaagcacaacggcaagcucugcaagcuccgcggcgucgccccccuccaccucggcaagugcaacaucgccggcuggauccucggcaaccccgagugcgagucccucuccgccgccuccuccugguccuacaucgucgagaccuccuccuccgacaacggcaccugcuaccccggcgacuucaucaacuacgaggagcuccgcgagcagcucuccuccgucuccuccuucgagcgcuucgagaucuuccccaagaccuccuccuggcccaaccacgacuccaacaagggcgucaccgccgccugcccccacgccggcgccaaguccuucuacaagaaccucaucuggcucgucaagaagggcaacuccuaccccaagcucucccaguccuacaucaacgacaagggcaaggagguccucguccucuggggcauccaccaccccuccaccaccgccgaccagcagucccucuaccagaacgccgacaccuacgucuucgucggcaccucccgcuacuccaagaaguucaagcccgagaucgccauccgccccaagguccgcgaccaggagggccgcaugaacuacuacuggacccucgucgagcccggcgacaagaucaccuucgaggccaccggcaaccucgucgucccccgcuacgccuucaccauggagcgcaacgccggcuccggcaucaucaucuccgacacccccguccacgacugcaacaccaccugccagacccccgagggcgccaucaacaccucccuccccuuccagaacauccaccccaucaccaucggcaagugccccaaguacgucaaguccaccaagcuccgccucgccaccggccuccgcaacguccccuccauccagucccgcggccucuucggcgccaucgccggcuucaucgagggcggcuggaccggcauggucgacggcugguacggcuaccaccaccagaacgagcagggcuccggcuacgccgccgaccagaaguccacccagaacgccaucgacaagaucaccaacaaggucaacuccgucaucgagaagaugaacacccaguucaccgccgucggcaaggaguucaaccaccucgagaagcgcaucgagaaccucaacaagaaggucgacgacggcuuccucgacaucuggaccuacaacgccgagcuccucguccuccucgagaacgagcgcacccucgacuaccacgacuccaacgucaagaaccucuacgagaagguccgcaaccagcucaagaacaacgccaaggagaucggcaacggcugcuucgaguucuaccacaagugcgacaacaccugcauggaguccgucaagaacggcaccuacgacuaccccaaguacuccgaggaggccaagcucaaccgcgagaagaucgacggcgucaagcucgaguccaccaagaucuaccagauccucgccaucuacuccaccgucgccuccucccucguccucgucgucucccucggcgccaucuccuucuggaugugcuccaacggcucccuccagugccgcaucugcaucuga

SEQ ID NO: 107958 - RNA, 1701 nt, Artificial Sequence; identical to SEQ ID NO: 107956
  derived and/or modified CDS sequence (opt2) from hemagglutinin__InfluenzaA__AHV83796

SEQ ID NO: 107959 - RNA, 1701 nt, Artificial Sequence; identical to SEQ ID NO: 106076
  derived and/or modified CDS sequence (opt2) from hemagglutinin__InfluenzaA__AHV83798

SEQ ID NO: 107960 - RNA, 1701 nt, Artificial Sequence; identical to SEQ ID NO: 106076
  derived and/or modified CDS sequence (opt2) from hemagglutinin__InfluenzaA__AHV83799

SEQ ID NO: 107961 - RNA, 1701 nt, Artificial Sequence
  derived and/or modified CDS sequence (opt2) from hemagglutinin__InfluenzaA__AHV83800
augaaggccauccucgucguccuccucuacaccuucgccaccgccaacgccgacacccucugcaucggcuaccacgccaacaacuccaccgacaccgucgacaccguccucgagaagaacgucaccgucacccacuccgucaaccuccucgaggacaagcacaacggcaagcucugcaagcuccgcggcgucgccccccuccaccucggcaagugcaacaucgccggcuggauccucggcaaccccgagugcgagucccucuccaccgccuccuccugguccuacaucgucgagaccuccuccuccgacaacggcaccugcuaccccggcgacuucaucaacuacgaggagcuccgcgagcagcucuccuccgucuccuccuucgagcgcuucgagaucuuccccaagaccuccuccuggcccaaccacgacuccaacaagggcgucaccgccgccugcccccacgccggcgccaaguccuucuacaagaaccucaucuggcucgucaagaagggcaacuccuaccccaagcucucccaguccuacaucaacgacaagggcaaggagguccucguccucuggggcauccaccaccccuccaccaccgccgaccagcagucccucuaccagaacgccgacgccuacgucuucgucggcaccucccgcuacuccaagaaguucaagcccgagaucgccauccgccccaagguccgcgaccaggagggccgcaugaacuacuacuggacccucgucgagcccggcgacaagaucaccuucgaggccaccggcaaccucgucgucccccgcuacgccuucaccauggagcgcaacgccggcuccggcaucaucaucuccgacacccccguccacgacugcaacaccaccugccagacccccgagggcgccaucaacaccucccuccccuuccagaacauccaccccaucaccaucggcaagugccccaaguacgucaaguccaccaagcuccgccucgccaccggccuccgcaacguccccuccauccagucccgcggccucuucggcgccaucgccggcuucaucgagggcggcuggaccggcauggucgacggcugguacggcuaccaccaccagaacgagcagggcuccggcuacgccgccgaccucaaguccacccagaacgccaucgacaagaucaccaacaaggucaacuccgucaucgagaagaugaacacccaguucaccgccgucggcaaggaguucaaccaccucgagaagcgcaucgagaaccucaacaagaaggucgacgacggcuuccucgacaucuggaccuacaacgccgagcuccucguccuccucgagaacgagaagacccucgacuaccacgacuccaacgucaagaaccucuacgagaagguccgcaaccagcucaagaacaacgccaaggagaucggcaacggcugcuucgaguucuaccacaagugcgacaacaccugcauggaguccgucaagaacggcaccuacgacuaccccaaguacuccgaggaggccaagcucaaccgcgagaagaucgacggcgucaagcucgaguccacccgcaucuaccagauccucgccaucuacuccaccgucgccuccucccucguccucgucgucucccucggcgccaucuccuucuggaugugcuccaacggcucccuccagugccgcaucugcaucuga

SEQ ID NO: 107962 - RNA, 1701 nt, Artificial Sequence
  derived and/or modified CDS sequence (opt2) from hemagglutinin__InfluenzaA__AHV83801
augaaggccauccucgucguccuccucuacaccuucgccaccgccaacgccgacacccucugcaucggcuaccacgccaacaacuccaccgacaccgucgacaccguccucgagaagaacgucaccgucacccacuccgucaaccuccucgaggacaagcacaacggcaagcucugcaagcuccgcggcgucgccccccuccaccucggcaagugcaacaucgccggcuggauccucggcaaccccgagugcgagucccucuccaccgccuccuccugguccuacaucgucgagaccuccuccuccgacaacggcaccugcuaccccggcgacuucaucaacuacgaggagcuccgcgagcagcucuccuccgucuccuccuucgagcgcuucgagaucuuccccaagaccuccuccuggcccaaccacgacuccaacaagggcgucaccgccgccugcccccacgccggcgccaaguccuucuacaagaaccucaucuggcucgucaagaagggcaacuccuaccccaagcucucccaguccuacaucaacgacaagggcaaggagguccucguccucuggggcauccaccaccccuccaccaccgccgaccagcagucccucuaccagaacgccgacgccuacgucuucgucggcaccucccgcuacuccaagaaguucaagcccgagaucgccauccgccccaagguccgcgaccaggagggccgcaugaacuacuacuggacccucgucgagcccggcgacaagaucaccuucgaggccaccggcaaccucgucgucccccgcuacgccuucaccauggagcgcaacgccggcuccggcaucaucaucuccgacacccccguccacgacugcaacaccaccugccagacccccgagggcgccaucaacaccucccuccccuuccagaacauccaccccaucaccaucggcaagugccccaaguacgucaaguccaccaagcuccgccucgccaccggccuccgcaacguccccuccauccagucccgcggccucuucggcgccaucgccggcuucaucgagggcggcuggaccggcauggucgacggcugguacggcuaccaccaccagaacgagcagggcuccggcuacgccgccgaccagaaguccacccagaacgccaucgacaagaucaccaacaaggucaacuccgucaucgagaagaugaacacccaguucaccgccgucggcaaggaguucaaccaccucgagaagcgcaucgagaaccucaacaagaaggucgacgacggcuuccucgacaucuggaccuacaacgccgagcuccucguccuccucgagaacgagcgcacccucgacuaccacgacuccaacgucaagaaccucuacgagaagguccgcaaccagcucaagaacaacgccaaggagaucggcaacggcugcuucgaguucuaccacaagugcgacaacaccugcauggaguccgucaagaacggcaccuacgacuaccccaaguacuccgaggaggccaagcucaaccgcgagaagaucgacggcgucaagcucgaguccaccaagaucuaccagauccucgccaucuacuccaccgucgccuccucccucguccucgucgucucccucggcgccaucuccuucuggaugugcuccaacggcucccuccagugccgcaucugcaucuga

SEQ ID NO: 107963 - RNA, 1701 nt, Artificial Sequence
  derived and/or modified CDS sequence (opt2) from hemagglutinin__InfluenzaA__AHV83802
augaaggccauccucgucguccuccucuacaccuucgccaccgccaacgccgacacccucugcaucggcuaccacgccaacaacuccaccgacaccgucgacaccguccucgagaagaacgucaccgucacccacuccgucaaccuccucgaggacaagcacaacggcaagcucugcaagcuccgcggcgucgccccccuccaccucggcaagugcaacaucgccggcuggauccucggcaaccccgagugcgagucccucuccaccgccuccuccugguccuacaucgucgagaccuccuccuccgacaacggcaccugcuaccccggcgacuucaucaacuacgaggagcuccgcgagcagcucuccuccgucuccuccuucgagcgcuucgagaucuuccccaagaccuccuccuggcccaaccacgacuccaacaagggcgucaccgccgccugcccccacgccggcgccaaguccuucuacaagaaccucaucuggcucgucaagaagggcaacuccuaccccaagcucucccaguccuacaucaacgacaagggcaaggagguccucguccucuggggcauccaccaccccuccaccaccgccgaccagcagggccucuaccagaacgucgacgccuacgucuucgucggcaccucccgcuacuccaagaaguucaagcccgagaucgccauccgccccaagguccgcgaccaggagggccgcaugaacuacuacuggacccucgucgagcccggcgacaagaucaccuucgaggccaccggcaaccucgucgucccccgcuacgccuucaccauggagcgcaacgccggcuccggcaucaucaucuccgacacccccguccacgacugcaacaccaccugccagacccccgagggcgccaucaacaccucccuccccuuccagaacauccaccccaucaccaucggcaagugccccaaguacgucaaguccaccaagcuccgccucgccaccggccuccgcaacguccccuccauccagucccgcggccucuucggcgccaucgccggcuucaucgagggcggcuggaccggcauggucgacggcugguacggcuaccaccaccagaacgagcagggcuccggcuacgccgccgaccucaaguccacccagaacgccaucgacaagaucaccaacaaggucaacuccgucaucgagaagaugaacacccaguucaccgccgucggcaaggaguucaaccaccucgagaagcgcaucgagaaccucaacaagaaggucgacgacggcuuccucgacaucuggaccuacaacgccgagcuccucguccuccucgagaacgagcgcacccucgacuaccacgacuccaacgucaagaaccucuacgagaagguccgcaaccagcucaagaacaacgccaaggagaucggcaacggcugcuucgaguucuaccacaagugcgacaacaccugcauggaguccgucaagaacggcaccuacgacuaccccaaguacuccgaggaggccaagcucaaccgcgagaagaucgacggcgucaagcucgaguccacccgcaucuaccagauccucgccaucuacuccaccgucgccuccucccucguccucgucgucucccucggcgccaucuccuucuggaugugcuccaacggcucccuccagugccgcaucugcaucuga

SEQ ID NO: 107964 - RNA, 1701 nt, Artificial Sequence; identical to SEQ ID NO: 106076
  derived and/or modified CDS sequence (opt2) from hemagglutinin__InfluenzaA__AHV83803

SEQ ID NO: 107965 - RNA, 1701 nt, Artificial Sequence; identical to SEQ ID NO: 106076
  derived and/or modified CDS sequence (opt2) from hemagglutinin__InfluenzaA__AHV83804

SEQ ID NO: 107966 - RNA, 1701 nt, Artificial Sequence; identical to SEQ ID NO: 106076
  derived and/or modified CDS sequence (opt2) from hemagglutinin__InfluenzaA__AHV83805

SEQ ID NO: 107967 - RNA, 1701 nt, Artificial Sequence; identical to SEQ ID NO: 107956
  derived and/or modified CDS sequence (opt2) from hemagglutinin__InfluenzaA__AHV83806

SEQ ID NO: 107968 - RNA, 1701 nt, Artificial Sequence
  derived and/or modified CDS sequence (opt2) from hemagglutinin__InfluenzaA__AHV83807
augaaggccauccucgucguccuccucuacaccuucgccaccgccaacgccgacacccucugcaucggcuaccacgccaacaacuccaccgacaccgucgacaccguccucgagaaggacgucaccgucacccacuccgucaaccuccucgaggacaagcacaacggcaagcucugcaagcuccgcggcgucgccccccuccaccucggcaagugcaacaucgccggcuggauccucggcaaccccgagugcgagucccucuccaccgccuccuccugguccuacaucgucgagaccuccuccuccgacaacggcaccugcuaccccggcgacuucaucaacuacgaggagcuccgcgagcagcucuccuccgucuccuccuucgagcgcuucgagaucuuccccaagaccuccuccuggcccaaccacgacuccaacaagggcgucaccgccgccugcccccacgccggcgccaaguccuucuacaagaaccucaucuggcucgucaagaagggcaacuccuaccccaagcucucccaguccuacaucaacgacaagggcaaggagguccucguccucuggggcauccaccaccccuccaccaccgccgaccagcagucccucuaccagaacgccgacgccuacgucuucgucggcaccucccgcuacuccaagaaguucaagcccgagaucgccauccgccccaagguccgcgaccaggagggccgcaugaacuacuacuggacccucgucgagcccggcgacaagaucaccuucgaggccaccggcaaccucgucgucccccgcuacgccuucaccauggagcgcaacgccggcuccggcaucaucaucuccgacacccccguccacgacugcaacaccaccugccagacccccgagggcgccaucaacaccucccuccccuuccagaacauccaccccaucaccaucggcaagugccccaaguacgucaaguccaccaagcuccgccucgccaccggccuccgcaacguccccuccauccagucccgcggccucuucggcgccaucgccggcuucaucgagggcggcuggaccggcauggucgacggcugguacggcuaccaccaccagaacgagcagggcuccggcuacgccgccgaccucaaguccacccagaacgccaucgacaagaucaccaacaaggucaacuccgucaucgagaagaugaacacccaguucaccgccgucggcaaggaguucaaccaccucgagaagcgcaucgagaaccucaacaagaaggucgacgacggcuuccucgacaucuggaccuacaacgccgagcuccucguccuccucgagaacgagcgcacccucgacuaccacgacuccaacgucaagaaccucuacgagaagguccgcaaccagcucaagaacaacgccaaggagaucggcaacggcugcuucgaguucuaccacaagugcgacaacaccugcauggaguccgucaagaacggcaccuacgacuaccccaaguacuccgaggaggccaagcucaaccgcgagaagaucgacggcgucaagcucgaguccacccgcaucuaccagauccucgccaucuacuccaccgucgccuccucccucguccucgucgucucccucggcgccaucuccuucuggaugugcuccaacggcucccuccagugccgcaucugcaucuga

SEQ ID NO: 107969 - RNA, 1701 nt, Artificial Sequence
  derived and/or modified CDS sequence (opt2) from hemagglutinin__InfluenzaA__AHV83808
augaaggccauccucgucguccuccucuacaccuucgccaccgccaacgccgacacccucugcaucggcuaccacgccaacaacuccaccgacaccgucgacaccguccucgagaagaacgucaccgucacccacuccgucaaccuccucgaggacaagcacaacggcaagcucugcaagcuccgcggcgucgccccccuccaccucggcaagugcaacaucgccggcuggauccucggcaaccccgagugcgagucccucuccaccgccuccuccugguccuacaucgucgagaccuccuccuccgacaacggcaccugcuaccccggcgacuucaucaacuacgaggagcuccgcgagcagcucuccuccgucuccuccuucgagcgcuucgagaucuuccccaagaccuccuccuggcccaaccacgacuccaacaagggcgucaccgccgccugcccccacgccggcgccaaguccuucuacaagaaccucaucuggcucgucaagaagggcaacuccuaccccaagcucucccaguccuacaucaacgacaagggcaaggagguccucguccucuggggcauccaccaccccuccaccaccgccgaccagcagucccucuaccagaacgccgaggccuacgucuucgucggcaccucccgcuacuccaagaaguucaagcccgagaucgccauccgccccaagguccgcgaccaggagggccgcaugaacuacuacuggacccucgucgagcccggcgacaagaucaccuucgaggccaccggcaaccucgucgucccccgcuacgccuucaccauggagcgcaacgccggcuccggcaucaucaucuccgacacccccguccacgacugcaacaccaccugccagacccccgagggcgccaucaacaccucccuccccuuccagaacauccaccccaucaccaucggcaagugccccaaguacgucaaguccaccaagcuccgccucgccaccggccuccgcaacguccccuccauccagucccgcggccucuucggcgccaucgccggcuucaucgagggcggcuggaccggcauggucgacggcugguacggcuaccaccaccagaacgagcagggcuccggcuacgccgccgaccucaaguccacccagaacgccaucgacaagaucaccaacaaggucaacuccgucaucgagaagaugaacacccaguucaccgccgucggcaaggaguucaaccaccucgagaagcgcaucgagaaccucaacaagaaggucgacgacggcuuccucgacaucuggaccuacaacgccgagcuccucguccuccucgagaacgagcgcacccucgacuaccacgacuccaacgucaagaaccucuacgagaagguccgcaaccagcucaagaacaacgccaaggagaucggcaacggcugcuucgaguucuaccacaagugcgacaacaugugcauggaguccgucaagaacggcaccuacgacuaccccaaguacuccgaggaggccaagcucaaccgcgagaagaucgacggcgucaagcucgaguccacccgcaucuaccagauccucgccaucuacuccaccgucgccuccucccucguccucgucgucucccucggcgccaucuccuucuggaugugcuccaacggcucccuccagugccgcaucugcaucuga

SEQ ID NO: 107970 - RNA, 1701 nt, Artificial Sequence; identical to SEQ ID NO: 106076
  derived and/or modified CDS sequence (opt2) from hemagglutinin__InfluenzaA__AHV83809

SEQ ID NO: 107971 - RNA, 1701 nt, Artificial Sequence; identical to SEQ ID NO: 107057
  derived and/or modified CDS sequence (opt2) from hemagglutinin__InfluenzaA__AHV83810

SEQ ID NO: 107972 - RNA, 1701 nt, Artificial Sequence
  derived and/or modified CDS sequence (opt2) from hemagglutinin__InfluenzaA__AHV83812
augaaggccauccucgucguccuccucuacaccuucaccaccgccaacgccgacacccucugcaucggcuaccacgccaacaacuccaccgacaccgucgacaccguccucgagaagaacgucaccgucacccacuccgucaaccuccucgaggacaagcacaacggcaagcucugcaagcuccgcggcgucgccccccuccaccucggcaagugcaacaucgccggcuggauccucggcaaccccgagugcgagucccucuccaccgccuccuccugguccuacaucgucgagaccuccuccuccgacaacggcaccugcuaccccggcgacuucaucaacuacgaggagcuccgcgagcagcucuccuccgucuccuccuucgagcgcuucgagaucuuccccaagaccuccuccuggcccaaccacgacuccaacaagggcgucaccgccgccugcccccacgccggcgccaaguccuucuacaagaaccucaucuggcucgucaagaagggcaacuccuaccccaagcucucccaguccuacaucaacgacaagggcaaggagguccucguccucuggggcauccaccaccccuccaccaccgccgaccagcagucccucuaccagaacgccgacgccuacgucuucgucggcaccucccgcuacuccaagaaguucaagcccgagaucgccauccgccccaagguccgcgaccaggagggccgcaugaacuacuacuggacccucgucgagcccggcgacaagaucaccuucgaggccaccggcaaccucgucgucccccgcuacgccuucaccauggagcgcaacgccggcuccggcaucaucaucuccgacacccccguccacgacugcaacaccaccugccagacccccgagggcgccaucaacaccucccuccccuuccagaacauccaccccaucaccaucggcaagugccccaaguacgucaaguccaccaagcuccgccucgccaccggccuccgcaacguccccuccauccagucccgcggccucuucggcgccaucgccggcuucaucgagggcggcuggaccggcauggucgacggcugguacggcuaccaccaccagaacgagcagggcuccggcuacgccgccgaccucaaguccacccagaacgccaucgacaagaucaccaacaaggucaacuccgucaucgagaagaugaacacccaguucaccgccgucggcaaggaguucaaccaccucgagaagcgcaucgagaaccucaacaagaaggucgacgacggcuuccucgacaucuggaccuacaacgccgagcuccucguccuccucgagaacgagcgcacccucgacuaccacgacuccaacgucaagaaccucuacgagaagguccgcaaccagcucaagaacaacgccaaggagaucggcaacggcugcuucgaguucuaccacaagugcgacaacaccugcauggaguccgucaagaacggcaccuacgaguaccccaaguacuccgaggaggccaagcucaaccgcgagaagaucgacggcgucaagcucgaguccaccaagaucuaccagauccucgccaucuacuccaccgucgccuccucccucguccucgucgucucccucggcgccaucuccuucuggaugugcuccaacggcucccuccagugccgcaucugcaucuga

SEQ ID NO: 107973 - RNA, 1701 nt, Artificial Sequence; identical to SEQ ID NO: 106076
  derived and/or modified CDS sequence (opt2) from hemagglutinin__InfluenzaA__AHV83813

SEQ ID NO: 107974 - RNA, 1701 nt, Artificial Sequence
  derived and/or modified CDS sequence (opt2) from hemagglutinin__InfluenzaA__AHV83814
augaaggccauccucgucguccuccucuacaccuucgccaccgccaacgccgacacccucugcaucggcuaccacgccaacaacuccaccgacaccgucgacaccguccucgagaagaacgucaccgucacccacuccgucaaccuccucgaggacaagcacaacggcaagcucugcaagcuccgcggcgucgccccccuccaccucggcaagugcaacaucgccggcuggauccucggcaaccccgagugcgagucccucuccaccgccuccuccugguccuacaucgucgagaccuccuccuccgacaacggcaccugcuaccccggcgacuucaucaacuacgaggagcuccgcgagcagcucuccuccgucuccuccuucgagcgcuucgagaucuuccccaagaccuccuccuggcccaaccacgacuccaacaagggcgucaccgccgccugcccccacgccggcgccaaguccuucuacaagaaccucaucuggcucgucaagaagggcaacuccuaccccaagcucucccaguccuacaucaacgacaagggcaaggagguccucguccucuggggcauccaccaccccuccaccaccgccgaccagcagucccucuaccagaacgccgacgccuacgucuucgucggcaccucccgcuacuccaagaaguucaagcccgagaucgccauccgccccaagguccgcgaccaggagggccgcaugaacuacuacuggacccucgucgagcccggcgacaagaucaccuucgaggccaccggcaaccucgucgucccccgcuacgccuucaccauggagcgcaacgccggcuccggcaucaucaucuccgacacccccguccacgacugcaacaccaccugccagacccccgagggcgccaucaacaccucccuccccuuccagaacauccaccccaucaccaucggcaagugccccaaguacgucaaguccaccaagcuccgccucgccaccggccuccgcaacguccccuccauccagucccgcggccucuucggcgccaucgccggcuucaucgagggcggcuggaccggcauggucgacggcugguacggcuaccaccaccagaacgagcagggcuccggcuacgccgccgaccucaaguccacccagaacgccaucgacaagaucaccaacaaggucaacuccgucaucgagaagaugaacacccaguucaccgccgucggcaaggaguucaaccaccucgagaagcgcaucgagaaccucaacaagaaggucgacgacggcuuccucgacaucuggaccuacaacgccgagcuccucguccuccucgagaacgagcgcaaccucgacuaccacgacuccaacgucaagaaccucuacgagaagguccgcaaccagcucaagaccaacgccaaggagaucggcaacggcugcuucgaguucuaccacaagugcgacaacaccugcauggaguccgucaagaacggcaccuacgacuaccccaaguacuccgaggaggccaagcucaaccgcgagaagaucgacggcgucaagcucgaguccacccgcaucuaccagauccucgccaucuacuccaccgucgccuccucccucguccucgucgucucccucggcgccaucuccuucuggaugugcuccaacggcucccuccagugccgcaucugcaucuga

SEQ ID NO: 107975 - RNA, 1701 nt, Artificial Sequence; identical to SEQ ID NO: 107057
  derived and/or modified CDS sequence (opt2) from hemagglutinin__InfluenzaA__AHV83815

SEQ ID NO: 107976 - RNA, 1701 nt, Artificial Sequence; identical to SEQ ID NO: 106076
  derived and/or modified CDS sequence (opt2) from hemagglutinin__InfluenzaA__AHV83816

SEQ ID NO: 107977 - RNA, 1701 nt, Artificial Sequence
  derived and/or modified CDS sequence (opt2) from hemagglutinin__InfluenzaA__AHV83817
augaaggccauccucgucguccuccucuacaccuucgccaccgccaacgccgacacccucugcaucggcuaccacgccaacaacuccaccgacaccgucgacaccguccucgagaagaacgucaccgucacccacuccgucaaccuccucgaggacaagcacaacggcaagcucugcaagcuccgcggcgucgccccccuccaccucggcaagugcaacaucgccggcuggauccucggcaaccccgagugcgagucccucuccaccgccuccuccugguccuacaucgucgagaccuccuccuccgacaacggcaccugcuaccccggcgacuucaucaacuacgaggagcuccgcgagcagcucuccuccgucuccuccuucgagcgcuucgagaucuuccccaagaccuccuccuggcccaaccacgacuccaacaagggcgucaccgccgccugcccccacgccggcgccaaguccuucuacaagaaccucgucuggcucgucaagaagggcaacuccuaccccaagcucucccaguccuacaucaacgacaagggcaaggagguccucguccucuggggcauccaccaccccuccaccaccgccgaccagcagucccucuaccagaacgccgacgccuacgucuucgucggcaccucccgcuacuccaagaaguucaagcccgagaucgccauccgccccaagguccgcgaccaggagggccgcaugaacuacuacuggacccucgucgagcccggcgacaagaucaccuucgaggccaccggcaaccucgucgucccccgcuacgccuucaccauggagcgcaacgccggcuccggcaucaucaucuccgacacccccguccacgacugcaacaccaccugccagacccccgagggcgccaucaacaccucccuccccuuccagaacauccaccccaucaccaucggcaagugccccaaguacgucaaguccaccaagcuccgccucgccaccggccuccgcaacguccccuccauccagucccgcggccucuucggcgccaucgccggcuucaucgagggcggcuggaccggcauggucgacggcugguacggcuaccaccaccagaacgagcagggcuccggcuacgccgccgaccucaaguccacccagaacgccaucgacaagaucaccaacaaggucaacuccgucaucgagaagaugaacacccaguucaccgccgucggcaaggaguucaaccaccucgagaagcgcaucgagaaccucaacaagaaggucgacgacggcuuccucgacaucuggaccuacaacgccgagcuccucguccuccucgagaacgagcgcacccucgacuaccacgacuccaacgucaagaaccucuacgagaagguccgcaaccagcucaagaacaacgccaaggagaucggcaacggcugcuucgaguucuaccacaagugcgacaacaccugcauggaguccgucaagaacggcaccuacgacuaccccaaguacuccgaggaggccaagcucaaccgcgagaagaucgacggcgucaagcucgaguccacccgcaucuaccagauccucgccaucuacuccaccgucgccuccucccucguccucgucgucucccucggcgccaucuccuucuggaugugcuccaacggcucccuccagugccgcaucugcaucuga

SEQ ID NO: 107978 - RNA, 1701 nt, Artificial Sequence; identical to SEQ ID NO: 107956
  derived and/or modified CDS sequence (opt2) from hemagglutinin__InfluenzaA__AHV83818

SEQ ID NO: 107979 - RNA, 1701 nt, Artificial Sequence; identical to SEQ ID NO: 107938
  derived and/or modified CDS sequence (opt2) from hemagglutinin__InfluenzaA__AHV83819

SEQ ID NO: 107980 - RNA, 1701 nt, Artificial Sequence
  derived and/or modified CDS sequence (opt2) from hemagglutinin__InfluenzaA__AHV83821
augaaggccauccucgucguccuccucuacaccuucgccaccgccaacgccgacacccucugcaucggcuaccacgccaacaacuccaccgacaccgucgacaccguccucgagaagaacgucaccgucacccacuccgucaaccuccucgaggacaagcacaacggcaagcucugcaagcuccgcggcgucuccccccuccaccucggcaagugcaacaucgccggcuggauccucggcaaccccgagugcgagucccucuccaccgccuccuccugguccuacaucgucgagaccuccuccuccgacaacggcaccugcuaccccggcgacuucgucaacuacgaggagcuccgcgagcagcucuccuccgucuccuccuucgagcgcuucgagaucuuccccaagaccuccuccuggcccaaccacgacuccaacaagggcgucaccgccgccugcccccacgccggcgccaaguccuucuacaagaaccucaucuggcucgucaagaagggcaacuccuaccccaagcucucccaguccuacaucaacgacaagggcaaggagguccucguccucuggggcauccaccaccccuccaccaccgccgaccagcagucccucuaccagaacgccgacgccuacgucuucgucggcaccucccgcuacuccaagaaguucaagcccgagaucgccauccgccccaagguccgcgaccaggagggccgcaugaacuacuacuggacccucgucgagcccggcgacaagaucaccuucgaggccaccggcaaccucgucgucccccgcuacgccuucaccauggagcgcaacgccggcuccggcaucaucaucuccgacacccccguccacaacugcaacaccaccugccagacccccgagggcgccaucaacaccucccuccccuuccagaacauccaccccaucaccaucggcaagugccccaaguacgucaaguccaccaagcuccgccucgccaccggccuccgcaacguccccuccauccagucccgcggccucuucggcgccaucgccggcuucaucgagggcggcuggaccggcauggucgacggcugguacggcuaccaccaccagaacgagcagggcuccggcuacgccgccgaccucaaguccacccagaacgccaucgacaagaucaccaacaaggucaacuccgucaucgagaagaugaacacccaguucaccgccgucggcaaggaguucaaccaccucgagaagcgcaucgagaaccucaacaagaaggucgacgacggcuuccucgacaucuggaccuacaacgccgagcuccucguccuccucgagaacgagcgcacccucgacuaccacgacuccaacgucaagaaccucuacgagaagguccgcaaccagcucaagaacaacgccaaggagaucggcaacggcugcuucgaguucuaccacaagugcgacaacaccugcauggaguccgucaagaacggcaccuacgacuaccccaaguacuccgaggaggccaagcucaaccgcgagaagaucgacggcgucaagcucgaguccacccgcaucuaccagauccucgccaucuacuccaccgucgccuccucccucguccucgucgucucccucggcgccaucuccuucuggaugugcuccaacggcucccuccagugccgcaucugcaucuga

SEQ ID NO: 107981 - RNA, 1701 nt, Artificial Sequence
  derived and/or modified CDS sequence (opt2) from hemagglutinin__InfluenzaA__AHV83822
augaaggccauccucgucguccuccucuacaccuucgccaccgccaacgccgacacccucugcaucggcuaccacgccaacaacuccaccgacaccgucgacaccguccucgagaagaacgucaccgucacccacuccgucaaccuccucgaggacaagcacaacggcaagcucugcaagcuccgcggcgucuccccccuccaccucggcaagugcaacaucgccggcuggauccucggcaaccccgagugcgagucccucuccaccgccuccuccugguccuacaucgucgagaccuccuccuccgacaacggcaccugcuaccccggcgacuucgucaacuacgaggagcuccgcgagcagcucuccuccgucuccuccuucgagcgcuucgagaucuuccccaagaccuccuccuggcccaaccacgacuccaacaagggcgucaccgccgccugcccccacgccggcgccaaguccuucuacaagaaccucaucuggcucgucaagaagggcaacuccuaccccaagcucucccaguccuacaucaacgacaagggcaaggagguccucguccucuggggcauccaccaccccuccaccaccgccgaccagcagucccucuaccagaacgccgacgccuacgucuucgucggcaccucccgcuacuccaagaaguucaagcccgagaucgccauccgccccaagguccgcgaccaggagggccgcaugaacuacuacuggacccucgucgagcccggcgacaagaucaccuucgaggccaccggcaaccucgucgucccccgcuacgccuucaccauggagcgcaacgccggcuccggcaucaucaucuccgacacccccguccacgacugcaacaccaccugccagacccccgagggcgccaucaacaccucccuccccuuccagaacauccaccccaucaccaucggcaagugccccaaguacgucaaguccaccaagcuccgccucgccaccggccuccgcaacguccccuccauccagucccgcggccucuucggcgccaucgccggcuucaucgagggcggcuggaccggcauggucgacggcugguacggcuaccaccaccagaacgagcagggcuccggcuacgccgccgaccucaaguccacccagaacgccaucgacaagaucaccaacaaggucaacuccaucaucgagaagaugaacacccaguucaccgccgucggcaaggaguucaaccaccucgagaagcgcaucgagaaccucaacaagaaggucgacgacggcuuccucgacaucuggaccuacaacgccgagcuccucguccuccucgagaacgagcgcacccucgacuaccacgacuccaacgucaagaaccucuacgagaagguccgcaaccagcucaagaacaacgccaaggagaucggcaacggcugcuucgaguucuaccacaagugcgacaacaccugcauggaguccgucaagaacggcaccuacgacuaccccaaguacuccgaggaggccaagcucaaccgcgagaagaucgacggcgucaagcucgaguccacccgcaucuaccagauccucgccaucuacuccaccgucgccuccucccucguccucgucgucucccucggcgccaucuccuucuggaugugcuccaacggcucccuccagugccgcaucugcaucuga

SEQ ID NO: 107982 - RNA, 1701 nt, Artificial Sequence
  derived and/or modified CDS sequence (opt2) from hemagglutinin__InfluenzaA__AHV83823
augaaggccauccucgucguccuccucuacaccuucgccaccgccaacgccgacacccucugcaucggcuaccacgccaacaacuccaccgacaccgucgacaccguccucgagaagaacgucaccgucacccacuccgucaaccuccucgaggacaagcacaacggcaagcucugcaagcuccgcggcgucgccccccuccaccucggcaagugcaacaucgccggcuggauccucggcaaccccgagugcgagucccucuccaccgccuccuccugguccuacaucgucgagaccuccuccuccgacaacggcaccugcuaccccggcgacuucaucaacuacgaggagcuccgcgagcagcucuccuccgucuccuccuucgagcgcuucgagaucuuccccaagaccuccuccuggcccaaccacgacuccaacaagggcgucaccgccgccugcccccacgccggcgccaaguccuucuacaagaaccucaucuggcucgucaagaagggcaacuccuaccccaagaucucccaguccuacaucaacgacaagggcaaggagguccucguccucuggggcauccaccaccccuccaccaccgccgaccagcagucccucuaccagaacgccgacgccuacgucuucgucggcaccucccgcuacuccaagaaguucaagcccgagaucgccauccgccccaagguccgcgaccaggagggccgcaugaacuacuacuggacccucgucgagcccggcgacaagaucaccuucgaggccaccggcaaccucgucgucccccgcuacgccuucaccauggagcgcaacaccggcuccggcaucaucaucuccgacacccccguccacgacugcaacaccaccugccagacccccgagggcgccaucaacaccucccuccccuuccagaacauccaccccaucaccaucggcaagugccccaaguacgucaaguccaccaagcuccgccucgccaccggccuccgcaacguccccuccauccagucccgcggccucuucggcgccaucgccggcuucaucgagggcggcuggaccggcauggucgacggcugguacggcuaccaccaccagaacgagcagggcuccggcuacgccgccgaccucaaguccacccagaacgccaucgacaagaucaccaacaaggucaacuccgucaucgagaagaugaacacccaguucaccgccgucggcaaggaguucaaccaccucgagaagcgcaucgagaaccucaacaagaaggucgacgacggcuuccucgacaucuggaccuacaacgccgagcuccucguccuccucgagaacgagcgcacccucgacuaccacgacuccaacgucaagaaccucuacgagaagguccgcaaccagcucaagaacaacgccaaggagaucggcaacggcugcuucgaguucuaccacaagugcgacaacaccugcauggaguccgucaagaacggcaccuacgacuaccccaaguacuccgaggaggccaagcucaaccgcgagaagaucgacggcgucaagcucgaguccacccgcaucuaccagauccucgccaucuacuccaccgucgccuccucccucguccucgucgucucccucggcgccaucuccuucuggaugugcuccaacggcucccuccagugccgcaucugcaucuga

SEQ ID NO: 107983 - RNA, 1701 nt, Artificial Sequence
  derived and/or modified CDS sequence (opt2) from hemagglutinin__InfluenzaA__AHV83824
augaaggccauccucgucguccuccucuacaccuucgccaccgccaacgccgacacccucugcaucggcuaccacgccaacaacuccaccgacaccgucgacaccguccucgagaagaacgucaccgucacccacuccgucaaccuccucgaggacaagcacaacggcaagcucugcaagcuccgcggcgucgccccccuccaccucggcaagugcaacaucgccggcuggauccucggcaaccccgagugcgagucccucuccaccgccuccuccugguccuacaucgucgagaccuccuccuccgacaacggcaccugcuaccccggcgacuucaucaacuacgaggagcuccgcgagcagcucuccuccgucuccuccuucgagcgcuucgagaucuuccccaagaccuccuccuggcccaaccacgacuccaacaagggcgucaccgccgccugcccccacgccggcgccaaguccuucuacaagaaccucaucuggcucgucaagaagggcaacuccuaccccaagcuccgccaguccuacaucaacgacaagggcaaggagguccucguccucuggggcauccaccaccccuccaccaccaccgaccagcagucccucuaccagaacgccgacgccuacgucuucgucggcaccucccgcuacuccaagaaguucaagcccgagaucgccauccgccccaagguccgcgaccaggagggccgcaugaacuacuacuggacccucgucgagcccggcgacaagaucaccuucgaggccaccggcaaccucgucgucccccgcuacgccuucaccauggagcgcaacgccggcuccggcaucaucaucuccgacacccccguccacgacugcaacaccaccugccagacccccgagggcgccaucaacaccucccuccccuuccagaacauccaccccaucaccaucggcaagugccccaaguacgucaaguccaccaagcuccgccucgccaccggccuccgcaacguccccuccauccagucccgcggccucuucggcgccaucgccggcuucaucgagggcggcuggaccggcauggucgacggcugguacggcuaccaccaccagaacgagcagggcuccggcuacgccgccgaccucaaguccacccagaacgccaucgacaagaucaccaacaaggucaacuccgucaucgagaagaugaacacccaguucaccgccgucggcaaggaguucaaccaccucgagaagcgcaucgagaaccucaacaagaaggucgacgacggcuuccucgacaucuggaccuacaacgccgagcuccucguccuccucgagaacgagcgcaaccucgacuaccacgacuccaacgucaagaaccucuacgagaagguccgcaaccagcucaagaacaacgccaaggagaucggcaacggcugcuucgaguucuaccacaagugcgacaacaccugcauggaguccgucaagaacggcaccuacgacuaccccaaguacuccgaggaggccaagcucaaccgcgagaagaucgacggcgucaagcucgaguccacccgcaucuaccagauccucgccaucuacuccaccgucgccuccucccucguccucgucgucucccucggcgccaucuccuucuggaugugcuccaacggcucccuccagugccgcaucugcaucuga

SEQ ID NO: 107984 - RNA, 1701 nt, Artificial Sequence; identical to SEQ ID NO: 107956
  derived and/or modified CDS sequence (opt2) from hemagglutinin__InfluenzaA__AHV83825

SEQ ID NO: 107985 - RNA, 1701 nt, Artificial Sequence
  derived and/or modified CDS sequence (opt2) from hemagglutinin__InfluenzaA__AHV83826
augaaggccauccucgucguccuccucuacaccuucgccaccgccaacgccgacacccucugcaucggcuaccacgccaacaacuccaccgacaccgucgacaccguccucgagaagaacgucaccgucacccacuccgucaaccuccucgaggacaagcacaacggcaagcucugcaagcuccgcggcgucgccccccuccaccucggcaagugcaacaucgccggcuggauccucggcaaccccgagugcgagucccucuccaccgccuccuccugguccuacaucgucgagaccuccuccuccgacaacggcaccugcuaccccggcgacuucaucaacuacgaggagcuccgcgagcagcucuccuccgucuccuccuucgagcgcuucgagaucuuccccaagaccuccuccuggcccaaccacgacuccaacaagggcgucaccgccgccugcccccacgccggcgccaaguccuucuacaagaaccucaucuggcucgucaagaagggcaacuccuaccccaagcucucccaguccuacuucaacgacaagggcaaggagguccucguccucuggggcauccaccaccccuccaccaccgccgaccagcagucccucuaccagaacgccgacgccuacgucuucgucggcaccucccgcuacuccaagaaguucaagcccgagaucgccauccgccccaagguccgcgaccaggagggccgcaugaacuacuacuggacccucgucgagcccggcgacaagaucaccuucgaggccaccggcaaccucgucgucccccgcuacgccuucaccauggagcgcaacgccggcuccggcaucaucaucuccgacacccccguccacgacugcaacaccaccugccagacccccgagggcgccaucaacaccucccuccccuuccagaacauccaccccaucaccaucggcaagugccccaaguacgucaaguccaccaagcuccgccucgccaccggccuccgcaacguccccuccauccagucccgcggccucuucggcgccaucgccggcuucaucgagggcggcuggaccggcauggucgacggcugguacggcuaccaccaccagaacgagcagggcuccggcuacgccgccgaccucaaguccacccagaacgccaucgacaagaucaccaacaaggucaacuccgucaucgagaagaugaacacccaguucaccgccgucggcaaggaguucaaccaccucgagaagcgcaucgagaaccucaacaagaaggucgacgacggcuuccucgacaucuggaccuacaacgccgagcuccucguccuccucgagaacgagcgcacccucgacuaccacgacuccaacgucaagaaccucuacgagaagguccgcaaccagcucaagaacaacgccaaggagaucggcaacggcugcuucgaguucuaccacaagugcgacaacaccugcauggaguccgucaagaacggcaccuacgacuaccccaaguacuccgaggaggccaagcucaaccgcgagaagaucgacggcgucaagcucgaguccacccgcaucuaccagauccucgccaucuacuccaccgccgccuccucccucguccucgucgucucccucggcgccaucuccuucuggaugugcuccaacggcucccuccagugccgcaucugcaucuga

SEQ ID NO: 107986 - RNA, 1701 nt, Artificial Sequence; identical to SEQ ID NO: 106076
  derived and/or modified CDS sequence (opt2) from hemagglutinin__InfluenzaA__AHV83827

SEQ ID NO: 107987 - RNA, 1701 nt, Artificial Sequence; identical to SEQ ID NO: 106076
  derived and/or modified CDS sequence (opt2) from hemagglutinin__InfluenzaA__AHV83828

SEQ ID NO: 107988 - RNA, 1701 nt, Artificial Sequence
  derived and/or modified CDS sequence (opt2) from hemagglutinin__InfluenzaA__AHV83829
auggaggccauccucgucguccuccucuacaccuucgccaccgccaacgccgacacccucugcaucggcuaccacgccaacaacuccaccgacaccgucgacaccguccucgagaagaacgucaccgucacccacuccgucaaccuccucgaggacaagcacaacggcaagcucugcaagcuccgcggcgucgccccccuccaccucggcaagugcaacaucgccggcuggauccucggcaaccccgagugcgagucccucuccaccgccuccuccugguccuacaucgucgagaccuccuccuccgacaacggcaccugcuaccccggcgacuucaucaacuacgaggagcuccgcgagcagcucuccuccgucuccuccuucgagcgcuucgagaucuuccccaagaccuccuccuggcccaaccacgacuccaacaagggcgucaccgccgccugcccccacgccggcgccaaguccuucuacaagaaccucaucuggcucgucaagaagggcaacuccuaccccaagaucucccaguccuacaucaacgacaagggcaaggagguccucguccucuggggcauccaccaccccuccaccaccgccgaccagcagucccucuaccagaacgccgacgccuacgucuucgucggcaccucccgcuacuccaagaaguucaagcccgagaucgccauccgccccaagguccgcgaccaggagggccgcaugaacuacuacuggacccucgucgagcccggcgacaagaucaccuucgaggccaccggcaaccucgucgucccccgcuacgccuucaccauggagcgcaacgccggcuccggcaucaucaucuccgacacccccguccacgacugcaacaccaccugccagacccccgagggcgccaucaacaccucccuccccuuccagaacauccaccccaucaccaucggcaagugccccaaguacgucaaguccaccaagcuccgccucgccaccggccuccgcaacguccccuccauccagucccgcggccucuucggcgccaucgccggcuucaucgagggcggcuggaccggcauggucgacggcugguacggcuaccaccaccagaacgagcagggcuccggcuacgccgccgaccucaaguccacccagaacgccaucgacaagaucaccaacaaggucaacuccgucaucgagaagaugaacacccaguucaccgccgucggcaaggaguucaaccaccucgagaagcgcaucgagaaccucaacaagaaggucgacgacggcuuccucgacaucuggaccuacaacgccgagcuccucguccuccucgagaacgagcgcacccucgacuaccacgacuccaacgucaagaaccucuacgagaagguccgcaaccagcucaagaacaacgccaaggagaucggcaacggcugcuucgaguucuaccacaagugcgacaacaccugcauggaguccgucaagaacggcaccuacgacuaccccaaguacuccgaggaggccaagcucaaccgcgagaagaucgacggcgucaagcucgaguccacccgcaucuaccagauccucgccaucuacuccaccgucgccuccucccucguccucgucgucucccucggcgccaucuccuucuggaugugcuccaacggcucccuccagugccgcaucugcaucuga

SEQ ID NO: 107989 - RNA, 1701 nt, Artificial Sequence; identical to SEQ ID NO: 106076
  derived and/or modified CDS sequence (opt2) from hemagglutinin__InfluenzaA__AHV83830

SEQ ID NO: 107990 - RNA, 1701 nt, Artificial Sequence
  derived and/or modified CDS sequence (opt2) from hemagglutinin__InfluenzaA__AHV83831
augaaggccauccucgucguccuccucuacaccuucgccaccgccaacgccgacacccucugcaucggcuaccacgccaacaacuccaccgacaccgucgacaccguccucgagaagaacgucaccgucacccacuccgucaaccuccucgaggacaagcacaacggcaagcucugcaagcuccgcggcgucgccccccuccaccucggcaagugcaacaucgccggcuggauccucggcaaccccgagugcgagucccucuccaccgccuccuccugguccuacaucgucgagaccuccuccuccgacaacggcaccugcuaccccggcgacuucaucaacuacgaggagcuccgcgagcagcucuccuccgucuccuccuucgagcgcuucgagaucuuccccaagaccuccuccuggcccaaccacgacuccaacaagggcgucaccgccgccugcccccacgccggcgccaaguccuucuacaagaaccucaucuggcucgucaagaagggcaacuccuaccccaagcucucccaguccuacaucaacgacaagggcaaggagguccucguccucuggggcauccaccaccccuccaccaucgccgaccagcagucccucuaccagaacgccgacgccuacgucuucgucggcaccucccgcuacuccaagaaguucaagcccgagaucgccauccgccccaagguccgcgaccaggagggccgcaugaacuacuacuggacccucgucgagcccggcgacaagaucaccuucgaggccaccggcaaccucgucgucccccgcuacgccuucaccauggagcgcaacgccggcuccggcaucaucgucuccgacacccccguccacgacugcaacaccaccugccagacccccgagggcgccaucaacaccucccuccccuuccagaacauccaccccaucaccaucggcaagugccccaaguacgucaaguccaccaagcuccgccucgccaccggccuccgcaacguccccuccauccagucccgcggccucuucggcgccaucgccggcuucaucgagggcggcuggaccggcauggucgacggcugguacggcuaccaccaccagaacgagcagggcuccggcuacgccgccgaccucaaguccacccagaacgccaucgacaagaucaccaacaaggucaacuccgucaucgagaagaugaacacccaguucaccgccgucggcaaggaguucaaccaccucgagaagcgcaucgagaaccucaacaagaaggucgacgacggcuuccucgacaucuggaccuacaacgccgagcuccucguccuccucgagaacgagcgcacccucgacuaccacgacuccaacgucaagaaccucuacgagaagguccgcaaccagcucaagaacaacgccaaggagaucggcaacggcugcuucgaguucuaccacaagugcgacaacaccugcauggaguccgucaagaacggcaccuacgacuaccccaaguacuccgaggaggccaagcucaaccgcgagaagaucgacggcgucaagcucgaguccacccgcaucuaccagauccucgccaucuacuccaccgucgccuccucccucguccucgucgucucccucggcgccaucuccuucuggaugugcuccaacggcucccuccagugccgcaucugcaucuga

SEQ ID NO: 107991 - RNA, 1701 nt, Artificial Sequence; identical to SEQ ID NO: 107039
  derived and/or modified CDS sequence (opt2) from hemagglutinin__InfluenzaA__AHV83832

SEQ ID NO: 107992 - RNA, 1701 nt, Artificial Sequence; identical to SEQ ID NO: 106076
  derived and/or modified CDS sequence (opt2) from hemagglutinin__InfluenzaA__AHV83833

SEQ ID NO: 107993 - RNA, 1701 nt, Artificial Sequence; identical to SEQ ID NO: 107057
  derived and/or modified CDS sequence (opt2) from hemagglutinin__InfluenzaA__AHV83834

SEQ ID NO: 107994 - RNA, 1701 nt, Artificial Sequence
  derived and/or modified CDS sequence (opt2) from hemagglutinin__InfluenzaA__AHV83836
augaaggccauccucgucguccuccucuacaccuucgccaccgccaacgccgacacccucugcaucggcuaccacgccaacaacuccaccgacaccgucgacaccguccucgagaagaacgucaccgucacccacuccgucaaccuccucgaggacaagcacaacggcaagcucugcaagcuccgcggcgucgccccccuccaccucggcaagugcaacaucgccggcuggauccucggcaaccccgagugcgagucccucuccaccgccuccuccugguccuacaucgucgagaccuccuccuccgacaacggcaccugcuaccccggcgacuucaucaacuacgaggagcuccgcgagcagcucuccuccgucuccuccuucgagcgcuucgagaucuuccccaagaccuccuccuggcccaaccacgacuccaacaagggcgucaccgccgccugcccccacgccggcgccaaguccuucuacaagaaccucaucuggcucgucaagaaggagaacuccuaccccaagcuccgccaguccuacaucaacgacaagggcaaggagguccucguccucuggggcauccaccaccccuccaccaccaccgaccagcagucccucuaccagaacgccgacgccuacgucuucgucggcaccucccgcuacuccaagaaguucaagcccgagaucgccauccgccccaagguccgcgaccaggagggccgcaugaacuacuacuggacccucgucgagcccggcgacaagaucaccuucgaggccaccggcaaccucgucgucccccgcuacgccuucaccauggagcgcaacgccggcuccggcaucaucaucuccgacacccccguccacgacugcaacaccaccugccagacccccgagggcgccaucaacaccucccuccccuuccagaacauccaccccaucaccaucggcaagugccccaaguacgucaaguccaccaagcuccgccucgccaccggccuccgcaacguccccuccauccagucccgcggccucuucggcgccaucgccggcuucaucgagggcggcuggaccggcauggucgacggcugguacggcuaccaccaccagaacgagcagggcuccggcuacgccgccgaccucaaguccacccagaacgccaucgacaagaucaccaacaaggucaacuccgucaucgagaagaugaacacccaguucaccgccgucggcaaggaguucaaccaccucgagaagcgcaucgagaaccucaacaagaaggucgacgacggcuuccucgacaucuggaccuacaacgccgagcuccucguccuccucgagaacgagcgcacccucgacuaccacgacuccaacgucaagaaccucuacgagaagguccgcaaccagcucaagaacaacgccaaggagaucggcaacggcugcuucgaguucuaccacaagugcgacaacaccugcauggaguccgucaagaacggcaccuacgacuaccccaaguacuccgaggaggccaagcucaaccgcgagaagaucgacggcgucaagcucgaguccacccgcaucuaccagauccucgccaucuacuccaccgucgccuccucccucguccucgucgucucccucggcgccaucuccuucuggaugugcuccaacggcucccuccagugccgcaucugcaucuga

SEQ ID NO: 107995 - RNA, 1701 nt, Artificial Sequence; identical to SEQ ID NO: 107943
  derived and/or modified CDS sequence (opt2) from hemagglutinin__InfluenzaA__AHV83837

SEQ ID NO: 107996 - RNA, 1701 nt, Artificial Sequence; identical to SEQ ID NO: 106076
  derived and/or modified CDS sequence (opt2) from hemagglutinin__InfluenzaA__AHV83838

SEQ ID NO: 107997 - RNA, 1701 nt, Artificial Sequence; identical to SEQ ID NO: 107039
  derived and/or modified CDS sequence (opt2) from hemagglutinin__InfluenzaA__AHV83839

SEQ ID NO: 107998 - RNA, 1701 nt, Artificial Sequence; identical to SEQ ID NO: 107057
  derived and/or modified CDS sequence (opt2) from hemagglutinin__InfluenzaA__AHV83840

SEQ ID NO: 107999 - RNA, 1701 nt, Artificial Sequence
  derived and/or modified CDS sequence (opt2) from hemagglutinin__InfluenzaA__AHV83841
augaaggccauccucgucguccuccucuacaccuucgccaccgccaacgccgacacccucugcaucggcuaccacgccaacaacuccaccgacaccgucgacaccguccucgagaagaacgucaccgucacccacuccgucaaccuccucgaggacaagcacaacggcaagcucugcaagcuccgcggcgucgccccccuccaccucggcaagugcaacaucgccggcuggauccucggcaaccccgagugcgagucccucuccaccgccuccuccugguccuacaucgucgagaccuccuccuccgacaacggcaccugcuaccccggcgacuucaucaacuacgaggagcuccgcgagcagcucuccuccgucuccuccuucgagcgcuucgagaucuuccccaagaccuccuccuggcccaaccacgacuccaacaagggcgucaccgccgccugcccccacgccggcgccaaguccuucuacaagaaccucaucuggcucgucaagaagggcaacuccuaccccaagcuccgccaguccuacaucaacgacaagggcaaggagguccucguccucuggggcauccaccaccccuccaccaccaccgaccagcagucccucuaccagaacgccgacgccuacgucuucgucggcaccucccgcuacuccaagaaguucaagcccgagaucgccauccgccccaagguccgcgaccaggagggccgcaugaacuacuacuggacccucgucgagcccggcgacaagaucaccuucgaggccaccggcaaccucgucgucccccgcuacgccuucaccauggagcgcaacgccggcuccggcaucaucaucuccgacacccccguccacaacugcaacaccaccugccagacccccgagggcgccaucaacaccucccuccccuuccagaacauccaccccaucaccaucggcaagugccccaaguacgucaaguccaccaagcuccgccucgccaccggccuccgcaacguccccuccauccagucccgcggccucuucggcgccaucgccggcuucaucgagggcggcuggaccggcauggucgacggcugguacggcuaccaccaccagaacgagcagggcuccggcuacgccgccgaccucaaguccacccagaacgccaucgacaagaucaccaacaaggucaacuccgucaucgagaagaugaacacccaguucaccgccgucggcaaggaguucaaccaccucgagaagcgcaucgagaaccucaacaagaaggucgacgacggcuuccucgacaucuggaccuacaacgccgagcuccucguccuccucgagaacgagcgcacccucgacuaccacgacuccaacgucaagaaccucuacgagaagguccgcaaccagcucaagaacaacgccaaggagaucggcaacggcugcuucgaguucuaccacaagugcgacaacaccugcauggaguccgucaagaacggcaccuacgacuaccccaaguacuccgaggaggccaagcucaaccgcgagaagaucgacggcgucaagcucgaguccacccgcaucuaccagauccucgccaucuacuccaccgucgccuccucccucguccucgucgucucccucggcgccaucuccuucuggaugugcuccaacggcucccuccagugccgcaucugcaucuga

SEQ ID NO: 108000 - RNA, 1701 nt, Artificial Sequence; identical to SEQ ID NO: 106076
  derived and/or modified CDS sequence (opt2) from hemagglutinin__InfluenzaA__AHV83842

SEQ ID NO: 108001 - RNA, 1701 nt, Artificial Sequence; identical to SEQ ID NO: 106076
  derived and/or modified CDS sequence (opt2) from hemagglutinin__InfluenzaA__AHV83843

SEQ ID NO: 108002 - RNA, 1701 nt, Artificial Sequence; identical to SEQ ID NO: 106076
  derived and/or modified CDS sequence (opt2) from hemagglutinin__InfluenzaA__AHV83844

SEQ ID NO: 108003 - RNA, 1701 nt, Artificial Sequence
  derived and/or modified CDS sequence (opt2) from hemagglutinin__InfluenzaA__AHV83845
augaaggccauccucgucguccuccucuacaccuucgccaccgccaacgccgacacccucugcaucggcuaccacgccaacaacuccaccgacaccgucgacaccguccucgagaagaacgucaccgucacccacuccgucaaccuccucgaggacaagcacaacggcaagcucugcaagcuccgcggcgucgccccccuccaccucggcaagugcaacaucgccggcuggauccucggcaaccccgagugcgagucccucuccaccgccuccuccugguccuacaucgucgagaccuccuccuccgacaacggcaccugcuaccccggcgacuucaucaacuacgaggagcuccgcgagcagcucuccuccgucuccuccuucgagcgcuucgagaucuuccccaagaccuccuccuggcccaaccacgacuccaacaagggcgucaccgccgccugcccccacgccggcgccaaguccuucuacaagaaccucaucuggcucgucaagaagggcaacuccuaccccaagcucucccaguccuacaucaacgacaagggcaaggagguccucguccucuggggcauccaccacccccccaccaccgccgaccagcagucccucuaccagaacgccgacgccuacgucuucgucggcaccucccgcuacuccaagaaguucaagcccgagaucgccauccgccccaagguccgcgaccaggagggccgcaugaacuacuacuggacccucgucgagcccggcgacaagaucaccuucgaggccaccggcaaccucgucgucccccgcuacgccuucaccauggagcgcaacgccggcuccggcaucaucaucuccgacacccccguccacgacugcaacaccaccugccagacccccgagggcgccaucaacaccucccuccccuuccagaacauccaccccaucaccaucggcaagugccccaaguacgucaaguccaccaagcuccgccucgccaccggccuccgcaacguccccuccauccagucccgcggccucuucggcgccaucgccggcuucaucgagggcggcuggaccggcauggucgacggcugguacggcuaccaccaccagaacgagcagggcuccggcuacgccgccgaccucaaguccacccagaacgccaucgacaagaucaccaacaaggucaacuccgucaucgagaagaugaacacccaguucaccgccgucggcaaggaguucaaccaccucgagaagcgcaucgagaaccucaacaagaaggucgacgacggcuuccucgacaucuggaccuacaacgccgagcuccucguccuccucgagaacgagcgcacccucgacuaccacgacuccaacgucaagaaccucuacgagaagguccgcaaccagcucaagaacaacgccaaggagaucggcaacggcugcuucgaguucuaccacaagugcgacaacaccugcauggaguccgucaagaacggcaccuacgacuaccccaaguacuccgaggaggccaagcucaaccgcgagaagaucgacggcgucaagcucgaguccacccgcaucuaccagauccucgccaucuacuccaccgccgccuccucccucguccucgucgucucccucggcgccaucuccuucuggaugugcuccaacggcucccuccagugccgcaucugcaucuga

SEQ ID NO: 108004 - RNA, 1701 nt, Artificial Sequence; identical to SEQ ID NO: 106076
  derived and/or modified CDS sequence (opt2) from hemagglutinin__InfluenzaA__AHV83846

SEQ ID NO: 108005 - RNA, 1701 nt, Artificial Sequence; identical to SEQ ID NO: 106076
  derived and/or modified CDS sequence (opt2) from hemagglutinin__InfluenzaA__AHV83847

SEQ ID NO: 108006 - RNA, 1701 nt, Artificial Sequence; identical to SEQ ID NO: 106076
  derived and/or modified CDS sequence (opt2) from hemagglutinin__InfluenzaA__AHV83848

SEQ ID NO: 108007 - RNA, 1701 nt, Artificial Sequence; identical to SEQ ID NO: 107929
  derived and/or modified CDS sequence (opt2) from hemagglutinin__InfluenzaA__AHV83849

SEQ ID NO: 108008 - RNA, 1701 nt, Artificial Sequence
  derived and/or modified CDS sequence (opt2) from hemagglutinin__InfluenzaA__AHV83850
augaaggccauccucgucguccuccucuacaccuucgccaccaccaacgccgacacccucugcaucggcuaccacgccaacaacuccaccgacaccgucgacaccguccucgagaagaacgucaccgucacccacuccgucaaccuccucgaggacaagcacaacggcaagcucugcaagcuccgcggcgucgccccccuccaccucggcaagugcaacaucgccggcuggauccucggcaaccccgagugcgagucccucuccaaggccuccuccugguccuacaucgucgagaccuccuccuccgacaacggcaccugcuaccccggcgacuucaucaacuacgaggagcuccgcgagcagcucuccuccgucuccuccuucgagcgcuucgagaucuuccccaagaccuccuccuggcccaaccacgacuccaacaagggcgucaccgccgccugcccccacgccggcgccaaguccuucuacaagaaccucaucuggcucgucaagaagggcaacuccuaccccaagcucucccaguccuacaucaacgacaagggcaaggagguccucguccucuggggcauccaccaccccuccaccaccgccgaccagcagucccucuaccagaacgccgacgccuacgucuucgucggcaccucccgcuacuccaagaaguucaagcccgagaucgccauccgccccaagguccgcgaccaggagggccgcaugaacuacuacuggacccucgucgagcccggcgacaagaucaccuucgaggccaccggcaaccucgucgucccccgcuacgccuucaccauggagcgcaacgccggcuccggcaucaucaucuccgacacccccguccacgacugcaacaccaccugccagacccccgagggcgccaucaacaccucccuccccuuccagaacauccaccccaucaccaucggcaagugccccaaguacgucaaguccaccaagcuccgccucgccaccggccuccgcaacguccccuccauccagucccgcggccucuucggcgccaucgccggcuucaucgagggcggcuggaccggcauggucgacggcugguacggcuaccaccaccagaacgagcagggcuccggcuacgccgccgaccucaaguccacccagaacgccaucgacaagaucaccaacaaggucaacuccgucaucgagaagaugaacacccaguucaccgccgucggcaaggaguucaaccaccucgagaagcgcaucgagaaccucaacaagaaggucgacgacggcuuccucgacaucuggaccuacaacgccgagcuccucguccuccucgagaacgagcgcacccucgacuaccacgacuccaacgucaagaaccucuacgagaagguccgcaaccagcucaagaacaacgccaaggagaucggcaacggcugcuucgaguucuaccacaagugcgacaacaccugcauggaguccgucaagaacggcaccuacgacuaccccaaguacuccgaggaggccaagcucaaccgcgagaagaucgacggcgucaagcucgaguccacccgcaucuaccagauccucgccaucuacuccaccgucgccuccucccucguccucgucgucucccucggcgccaucuccuucuggaugugcuccaacggcucccuccagugccgcaucugcaucuga

SEQ ID NO: 108009 - RNA, 1701 nt, Artificial Sequence; identical to SEQ ID NO: 106076
  derived and/or modified CDS sequence (opt2) from hemagglutinin__InfluenzaA__AHV83851

SEQ ID NO: 108010 - RNA, 1701 nt, Artificial Sequence; identical to SEQ ID NO: 106076
  derived and/or modified CDS sequence (opt2) from hemagglutinin__InfluenzaA__AHV83852

SEQ ID NO: 108011 - RNA, 1701 nt, Artificial Sequence
  derived and/or modified CDS sequence (opt2) from hemagglutinin__InfluenzaA__AHV83853
augaaggccauccucgucguccuccucuacaccuucgccaccgccaacgccgacacccucugcaucggcuaccacgccaacaacuccaccgacaccgucgacaccguccucgagaagaacgucaccgucacccacuccgucaaccuccucgaggacaagcacaacggcaagcucugcaagcuccgcggcgucgccccccuccaccucggcaagugcaacaucgccggcuggauccucggcaaccccgagugcgagacccucuccaccgccuccuccugguccuacaucgucgagaccuccuccuccgacaacggcaccugcuaccccggcgacuucaucgacuacgaggagcuccgcgagcagcucuccuccgucuccuccuucgagcgcuucgagaucuuccccaagaccuccuccuggcccaaccacgacuccaacaagggcgucaccgccgccugcccccacgccggcgccaagggcuucuacaagaaccucaucuggcucgucaagaagggcaacuccuaccccaagcucuccaaguccuacaucaacgacaagggcaaggagguccucguccucuggggcauccaccaccccuccaccaccgccgaccagcagucccucuaccagaacgccgacaccuacgucuucgucggcaccucccgcuacuccaagaaguucaagcccgagaucgccauccgccccaagguccgcgaccaggagggccgcaugaacuacuacuggacccucgucgagcccggcgacaagaucaccuucgaggccaccggcaaccucgucgucccccgcuacgccuucgccauggagcgcgacgccggcuccggcaucaucaucuccgacacccccguccacgacugcaacaccaccugccagacccccaagggcgccaucaacaccucccuccccuuccagaacauccaccccaucaccaucggcaagugccccaaguacgucaaguccaccaagcuccgccucgccaccggccuccgcaacguccccuccauccagucccgcggccucuucggcgccaucgccggcuucaucgagggcggcuggaccggcauggucgacggcugguacggcuaccaccaccagaacgagcagggcuccggcuacgccgccgaccucaaguccacccagaacgccaucgacaagaucaccaacaaggucaacuccgucaucgagaagaugaacacccaguucaccgccgucggcaaggaguucaaccaccucgagaagcgcaucgagaaccucaacaagaaggucgacgacggcuuccucgacaucuggaccuacaacgccgagcuccucguccuccucgagaacgagcgcacccucgacuaccacgacuccaacgucaagaaccucuacgagaagguccgcacccagcucaagaacaacgccaaggagaucggcaacggcugcuucgaguucuaccacaagugcgacaacaccugcauggaguccgucaagaacggcaccuacgacuaccccaaguacuccgaggaggccaagcucaaccgcgaggagaucgacggcgucaagcucgaguccacccgcaucuaccagauccucgccaucuacuccaccgccgccuccucccucguccucgucgucucccucggcgccaucuccuucuggaugugcuccaacggcucccuccagugccgcaucugcaucuga

SEQ ID NO: 108012 - RNA, 1701 nt, Artificial Sequence; identical to SEQ ID NO: 107938
  derived and/or modified CDS sequence (opt2) from hemagglutinin__InfluenzaA__AHV83855

SEQ ID NO: 108013 - RNA, 1701 nt, Artificial Sequence
  derived and/or modified CDS sequence (opt2) from hemagglutinin__InfluenzaA__AHV83856
augaaggccauccucgucguccuccucuacaccuucgccaccgccaacgccgacacccucugcaucggcuaccacgccaacaacuccaccgacaccgucgacaccguccucgagaagaacgucaccgucacccacuccgucaaccuccucgaggacaagcacaacggcaagcucugcaagcuccgcggcgucgccccccuccaccucggcaagugcaacaucgccggcuggauccucggcaaccccgagugcgagucccucuccaccgccuccuccugguccuacaucgucgagaccuccuccuccgacaacggcaccugcuaccccggcgacuucaucaacuacgaggagcuccgcgagcagcucuccuccgucuccuccuucgagcgcuucgagaucuuccccaagaccuccuccuggcccaaccacgacuccaacaagggcgucaccgccgccugcccccacgccggcgccaaguccuucuacaagaaccucaucuggcucgucaagaagggcaacuccuaccccaagcucucccaguccuacaucaacgacaagggcaaggagguccucguccucuggggcauccaccaccccuccaccaccgccgaccagcagucccucuaccagaacgccgacgccuacgucuucgucggcaccucccgcuacuccaagaaguucaagcccgagaucgccauccgccccaagguccgcgaccaggagggccgcaugaacuacuacuggacccucgucgagcccggcgacaagaucaccuucgaggccaccggcaaccucgucgucccccgcuacgccuucaccauggagcgcaacgccggcuccggcaucaucaucuccgacacccccguccacgacugcaacaccaccugccagacccccgagggcgccaucaacaccucccuccccuuccagaacauccaccccaucaccaucggcaagugccccaaguacgucaaguccaccaagcuccgccucgccaccggccuccgcaacguccccuccauccagucccgcggccucuucggcgccaucgccggcuucaucgagggcggcuggaccggcauggucgacggcugguacggcuaccaccaccagaacgagcagggcuccggcuacgccgccgaccucaaguccacccagaacgccaucgacaagaucaccaacaaggucaacuccgucaucgagaagaugaacacccaguucaccgccgucggcaaggaguucaaccaccucgagaagcgcaucgagaaccucaacaagaaggucgacgacggcuuccucgacaucuggaccuacaacgccgagcuccucguccuccucgagaacgagcgcacccucgacuaccacgacuccaacgucaagaaccucuacgagaagguccgcaaccagcucaagaacaacgccaaggagaucggcaacggcugcuucgaguucuaccacaagugcgacaacaccugcauggagaucgucaagaacggcaccuacgacuaccccaaguacuccgaggaggccaagcucaaccgcgagaagaucgacggcgucaagcucgaguccacccgcaucuaccagauccucgccaucuacuccaccgucgccuccucccucguccucgucgucucccucggcgccaucuccuucuggaugugcuccaacggcucccuccagugccgcaucugcaucuga

SEQ ID NO: 108014 - RNA, 1701 nt, Artificial Sequence; identical to SEQ ID NO: 107938
  derived and/or modified CDS sequence (opt2) from hemagglutinin__InfluenzaA__AHV83857

SEQ ID NO: 108015 - RNA, 1701 nt, Artificial Sequence
  derived and/or modified CDS sequence (opt2) from hemagglutinin__InfluenzaA__AHV83858
augaaggccauccucgucguccuccucuacaccuucgccaccgccaacaccgacacccucugcaucggcuaccacgccaacaacuccaccgacaccgucgacaccguccucgagaagaacgucaccgucacccacuccgucaaccuccucgaggacaagcacaacggcaagcucugcaagcuccgcggcgucgccccccuccaccucggcaagugcaacaucgccggcuggauccucggcaaccccgagugcgagucccucuccaccgccuccuccugguccuacaucgucgagaccuccuccuccgacaacggcaccugcuaccccggcgacuucaucaacuacgaggagcuccgcgagcagcucuccuccgucuccuccuucgagcgcuucgagaucuuccccaagaccuccuccuggcccaaccacgacuccaacaagggcgucaccgccgccugcccccacgccggcgccaaguccuucuacaagaaccucaucuggcucgucaagaagggcaacuccuaccccaagcucucccaguccuacaucaacgacaagggcaaggagguccucguccucuggggcauccaccaccccuccaccaccgccgaccagcagucccucuaccagaacgccgacgccuacgucuucgucggcaccucccgcuacuccaagaaguucaagcccgagaucgccauccgccccaagguccgcgaccaggagggccgcaugaacuacuacuggacccucgucgagcccggcgacaagaucaccuucgaggccaccggcaaccucgucgucccccgcuacgccuucaccauggagcgcaacgccggcuccggcaucaucaucuccgacacccccguccacgacugcaacaccaccugccagacccccgagggcgccaucaacaccucccuccccuuccagaacauccaccccaucaccaucggcaagugccccaaguacgucaaguccaccaagcuccgccucgccaccggccuccgcaacguccccuccauccagucccgcggccucuucggcgccaucgccggcuucaucgagggcggcuggaccggcauggucgacggcugguacggcuaccaccaccagaacgagcagggcuccggcuacgccgccgaccagaaguccacccagaacgccaucgacaagaucaccaacaaggucaacuccgucaucgagaagaugaacacccaguucaccgccgucggcaaggaguucaaccaccucgagaagcgcaucgagaaccucaacaagaaggucgacgacggcuuccucgacaucuggaccuacaacgccgagcuccucguccuccucgagaacgagcgcacccucgacuaccacgacuccaacgucaagaaccucuacgagaagguccgcaaccagcucaagaacaacgccaaggagaucggcaacggcugcuucgaguucuaccacaagugcgacaacaccugcauggaguccgucaagaacggcaccuacgacuaccccaaguacuccgaggaggccaagcucaaccgcgagaagaucgacggcgucaagcucgaguccacccgcaucuaccagauccucgccaucuacuccaccgucgccuccucccucguccucgucgucucccucggcgccaucuccuucuggaugugcuccaacggcucccuccagugccgcaucugcaucuga

SEQ ID NO: 108016 - RNA, 1701 nt, Artificial Sequence; identical to SEQ ID NO: 106076
  derived and/or modified CDS sequence (opt2) from hemagglutinin__InfluenzaA__AHV83859

SEQ ID NO: 108017 - RNA, 1701 nt, Artificial Sequence
  derived and/or modified CDS sequence (opt2) from hemagglutinin__InfluenzaA__AHV83861
augaaggccauccucgucguccuccucuacaccuucaccaccgccaacgccgacacccucugcaucggcuaccacgccaacaacuccaccgacaccgucgacaccguccucgagaagaacgucaccgucacccacuccgucaaccuccucgaggacaagcacaacggcaagcucugcaagcuccgcggcgucgccccccuccaccucggcaagugcaacaucgccggcuggauccucggcaaccccgagugcgagucccucuccaccgccuccuccugguccuacaucgucgagaccuccuccuccgacaacggcaccugcuaccccggcgacuucaucaacuacgaggagcuccgcgagcagcucuccuccgucuccuccuucgagcgcuucgagaucuuccccaagaccuccuccuggcccaaccacgacuccaacaagggcgucaccgccgccugcccccacgccggcgccaaguccuucuacaagaaccucaucuggcucgucaagaagggcaacuccuaccccaagcucucccaguccuacaucaacgacaagggcaaggagguccucguccucuggggcauccaccaccccuccaccaccgccgaccagcagucccucuaccagaacgccgacgccuacgucuucgucggcaccucccgcuacuccaagaaguucaagcccgagaucgccauccgccccaagguccgcgaccaggagggccgcaugaacuacuacuggacccucgucgagcccggcgacaagaucaccuucgaggccaccggcaaccucgucgucccccgcuacgccuucaccauggagcgcaacgccggcuccggcaucaucaucuccgacacccccguccacgacugcaacaccaccugccagacccccgagggcgccaucaacaccucccuccccuuccagaacauccaccccaucaccaucggcaagugccccaaguacgucaaguccaccaagcuccgccucgccaccggccuccgcaacguccccuccauccagucccgcggccucuucggcgccaucgccggcuucaucgagggcggcuggaccggcauggucgacggcugguacggcuaccaccaccagaacgagcagggcuccggcuacgccgccgaccucaaguccacccagaacgccaucgacaagaucaccaacaaggucaacuccgucaucgagaagaugaacacccaguucaccgccgucggcaaggaguucaaccaccucgagaagcgcaucgagaaccucaacaagaaggucgacgacggcuuccucgacaucuggaccuacaacgccgagcuccucguccuccucgagaacgagcgcacccucgacuaccacgacuccaacgucaagaaccucuacgagaagguccgcaaccagcucaagaacaacgccaaggagaucggcaacggcugcuucgaguucuaccacaagugcgacaacaccugcauggaguccgucaagaacggcaccuacgacuaccccaaguacuccgaggaggccaagcucaaccgcgagaagaucgacggcgucaagcucgaguccacccgcaucuaccagauccucgccaucuacuccaccgucgccuccucccucguccucgucgucucccucggcgccaucuccuucuggaugugcuccaacggcucccuccagugccgcaucugcaucuga

SEQ ID NO: 108018 - RNA, 1701 nt, Artificial Sequence; identical to SEQ ID NO: 108017
  derived and/or modified CDS sequence (opt2) from hemagglutinin__InfluenzaA__AHV83862

SEQ ID NO: 108019 - RNA, 1701 nt, Artificial Sequence; identical to SEQ ID NO: 106076
  derived and/or modified CDS sequence (opt2) from hemagglutinin__InfluenzaA__AHV83863

SEQ ID NO: 108020 - RNA, 1701 nt, Artificial Sequence; identical to SEQ ID NO: 106076
  derived and/or modified CDS sequence (opt2) from hemagglutinin__InfluenzaA__AHV83864

SEQ ID NO: 108021 - RNA, 1701 nt, Artificial Sequence
  derived and/or modified CDS sequence (opt2) from hemagglutinin__InfluenzaA__AHV83866
augaaggccauccucgucguccuccucuacaccuucgccaccgccaacgccgacacccucugcaucggcuaccacgccaacaacuccaccgacaccgucgacaccguccucgagaagaacgucaccgucacccacuccgucaaccuccucgaggacaagcacaacggcaagcucugcaagcuccgcggcgucgccccccuccaccucggcaagugcaacaucgccggcuggauccucggcaaccccgagugcgagucccucuccaccgccuccuccugguccuacaucgucgagaccuccuccuccgacaacggcaccugcuaccccggcgacuucaucaacuacgaggagcuccgcgagcagcucuccuccgucuccuccuucgagcgcuucgagaucuuccccaagaccuccuccuggcccaaccacgacuccaacaagggcgucaccgccgccugcccccacgccggcgccaaguccuucuacaagaaccucaucuggcucgucaagaagggcaacuccuaccccaagcucucccaguccuacaucaacgacaagggcaaggagguccucguccucuggggcauccaccaccccuccaccaccgccgaccagcagucccucuaccagaacgccgacgccuacgucuucgucggcaccucccgcuacuccaagaaguucaagcccgagaucgccauccgccccaagguccgcgaccaggagggccgcaugaacuacuacuggacccucgucgagcccggcgacaagaucaccuucgaggccaccggcaaccucgucgucccccgcuacgccuucaccauggagcgcaacgccggcuccggcaucaucaucuccgacacccccauccacgacugcaacaccaccugccagacccccgagggcgccaucaacaccucccuccccuuccagaacauccaccccaucaccaucggcaagugccccaaguacgucaaguccaccaagcuccgccucgccaccggccuccgcaacguccccuccauccagucccgcggccucuucggcgccaucgccggcuucaucgagggcggcuggaccggcauggucgacggcugguacggcuaccaccaccagaacgagcagggcuccggcuacgccgccgaccucaaguccacccagaacgccaucgacaagaucaccaacaaggucaacuccgucaucgagaagaugaacacccaguucaccgccgucggcaaggaguucaaccaccucgagaagcgcaucgagaaccucaacaagaaggucgacgacggcuuccucgacaucuggaccuacaacgccgagcuccucguccuccucgagaacgagcgcacccucgacuaccacgacuccaacgucaagaaccucuacgagaagguccgcaaccagcucaagaacaacgccaaggagaucggcaacggcugcuucgaguucuaccacaagugcgacgacaccugcauggaguccgucaagaacggcaccuacgacuaccccaaguacuccgaggaggccaagcucaaccgcgagaagaucgacggcgucaagcucgaguccacccgcaucuaccagauccucgccaucuacuccaccgucgccuccucccucguccucgucgucucccucggcgccaucuccuucuggaugugcuccaacggcucccuccagugccgcaucugcaucuga

SEQ ID NO: 108022 - RNA, 1701 nt, Artificial Sequence
  derived and/or modified CDS sequence (opt2) from hemagglutinin__InfluenzaA__AHV83867
augaaggccauccucgucguccuccucuacaccuucgccaccgccaacgccgacacccucugcaucggcuaccacgccaacaacuccaccgacaccgucgacaccguccucgagaagaacgucaccgucacccacuccgucaaccuccucgaggacaagcacaacggcaagcucugcaagcuccgcggcgucgccccccuccaccucggcaagugcaacaucgccggcuggauccucggcaaccccgagugcgagucccucuccaccgccuccuccugguccuacaucgucgagaccuccuccuccgacaacggcaccugcuaccccggcgacuucaucaacuacgaggagcuccgcgagcagcucuccuccgucuccuccuucgagcgcuucgagaucuuccccaagaccuccuccuggcccaaccacgacuccaacaagggcgucaccgccgccugcccccacgccggcgccaaguccuucuacaagaaccucaucuggcucgucaagaagggcaacuccuaccccaagcucucccaguccuacaucaacgacaagggcaaggagguccucguccucuggggcauccaccaccccuccaccaccgccgaccagcagucccucuaccagaacgccgacgccuacgucuucgucggcaccucccgcuacuccaagaaguucaagcccgagaucgccauccgccccaagguccgcgaccaggagggccgcaugaacuacuacuggacccucgucgagcccggcgacaagaucaccuucgaggccaccggcaaccucgucgucccccgcuacgccuucaccauggagcgcaacgccggcuccggcaucaucaucuccgacacccccguccacgacugcaacaccaccugccagacccccgagggcgccaucaacaccucccuccccuuccagaacauccaccccaucaccaucggcaagugccccaaguacgucaaguccaccaagcuccgccucgccaccggccuccgcaacguccccuccauccagucccgcggccucuucggcgccaucgccggcuucaucgagggcggcuggaccggcauggucgacggcugguacggcuaccaccaccagaacgagcagggcuccggcuacgccgccgaccucaaguccacccagaacgccaucgacaagaucaccaacaaggucaacuccgucaucgagaagaugaacacccaguucaccgccgucggcaaggaguucaaccaccucgagaagcgcaucgagaaccucaacaagaaggucgacgacggcuuccucgacaucuggaccuacaacgccgagcuccucguccuccucgagaacgagcgcacccucgacuaccacgacuccaacgucaagaaccucuacgagaagguccgcaaccagcucaagaacaacgccaaggagaucggcaacggcugcuucgaguucuaccacaagugcgacgacaccugcauggaguccgucaagaacggcaccuacgacuaccccaaguacuccgaggaggccaagcucaaccgcgagaagaucgacggcgucaagcucgaguccacccgcaucuaccagauccucgccaucuacuccaccgucgccuccucccucguccucgucgucucccucggcgccaucuccuucuggaugugcuccaacggcucccuccagugccgcaucugcaucuga

SEQ ID NO: 108023 - RNA, 1701 nt, Artificial Sequence; identical to SEQ ID NO: 106076
  derived and/or modified CDS sequence (opt2) from hemagglutinin__InfluenzaA__AHV83868

SEQ ID NO: 108024 - RNA, 1701 nt, Artificial Sequence
  derived and/or modified CDS sequence (opt2) from hemagglutinin__InfluenzaA__AHV83869
augaaggccauccucgucguccuccucuacaccuucgccaccgccaacgccgacacccucugcaucggcuaccacgccaacaacuccaccgacaccgucgacaccguccucgagaagaacgucaccgucacccacuccgucaaccuccucgaggacaagcacaacggcaagcucugcaagcuccgcggcgucgccccccuccaccucggcaagugcaacaucgccggcuggauccucggcaaccccgagugcgagucccucuccaccgccuccuccugguccuacaucgucgagaccuccuccuccgacaacggcaccugcuaccccggcgacuucaucaacuacgaggagcuccgcgagcagcucuccuccgucuccuccuucgagcgcuucgagaucuuccccaagaccaacuccuggcccaaccacgacuccaacaagggcgucaccgccgccugcccccacgccggcgccaaguccuucuacaagaaccucaucuggcucgucaagaagggcaacuccuaccccaagcucucccaguccuacaucaacgacaagggcaaggagguccucguccucuggggcauccaccaccccuccaccaccgccgaccagcagucccucuaccagaacgccgacgccuacgucuucgucggcaccucccgcuacuccaagaaguucaagcccgagaucgccauccgccccaagguccgcgaccaggagggccgcaugaacuacuacuggacccucgucgagcccggcgacaagaucaccuucgaggccaccggcaaccucgucgucccccgcuacgccuucaccauggagcgcaacgccggcuccggcaucaucaucuccgacacccccguccacgacugcaacaccaccugccagacccccgagggcgccaucaacaccucccuccccuuccagaacauccaccccaucaccaucggcaagugccccaaguacgucaaguccaccaagcuccgccucgccaccggccuccgcaacguccccuccauccagucccgcggccucuucggcgccaucgccggcuucaucgagggcggcuggaccggcauggucgacggcugguacggcuaccaccaccagaacgagcagggcuccggcuacgccgccgaccucaaguccacccagaacgccaucgacaagaucaccaacaaggucaacuccgucaucgagaagaugaacacccaguucaccgccgucggcaaggaguucaaccaccucgagaagcgcaucgagaaccucaacaagaaggucgacgacggcuuccucgacaucuggaccuacaacgccgagcuccucguccuccucgagaacgagcgcacccucgacuaccacgacuccaacgucaagaaccucuacgagaagguccgcaaccagcucaagaacaacgccaaggagaucggcaacggcugcuucgaguucuaccacaagugcgacaacaccugcauggaguccgucaagaacggcaccuacgacuaccccaaguacuccgaggaggccaagcucaaccgcgagaagaucgacggcgucaagcucgaguccacccgcaucuaccagauccucgccaucuacuccaccgucgccuccucccucguccucgucgucucccucggcgccaucuccuucuggaugugcuccaacggcucccuccagugccgcaucugcaucuga

SEQ ID NO: 108025 - RNA, 1701 nt, Artificial Sequence; identical to SEQ ID NO: 106076
  derived and/or modified CDS sequence (opt2) from hemagglutinin__InfluenzaA__AHV83870

SEQ ID NO: 108026 - RNA, 1701 nt, Artificial Sequence; identical to SEQ ID NO: 106076
  derived and/or modified CDS sequence (opt2) from hemagglutinin__InfluenzaA__AHV83871

SEQ ID NO: 108027 - RNA, 1701 nt, Artificial Sequence; identical to SEQ ID NO: 106076
  derived and/or modified CDS sequence (opt2) from hemagglutinin__InfluenzaA__AHV83872

SEQ ID NO: 108028 - RNA, 1701 nt, Artificial Sequence
  derived and/or modified CDS sequence (opt2) from hemagglutinin__InfluenzaA__AHV83873
augaaggccauccucgucguccuccucuacaccuucgccaccaccaacgccgacacccucugcaucggcuaccacgccaacaacuccaccgacaccgucgacaccguccucgagaagaacgucaccgucacccacuccgucaaccuccucgaggacaagcacaacggcaagcucugcaagcuccgcggcgucgccccccuccaccucggcaagugcaacaucgccggcuggauccucggcaaccccgagugcgagucccucuccaccgccuccuccugguccuacaucgucgagaccuccuccuccgacaacggcaccugcuaccccggcgacuucaucaacuacgaggagcuccgcgagcagcucuccuccgucuccuccuucgagcgcuucgagaucuuccccaagaccuccuccuggcccaaccacgacuccaacaagggcgucaccgccgccugcccccacgccggcgccaaguccuucuacaagaaccucaucuggcucgucaagaagggcaacuccuaccccaagcucucccaguccuacaucaacgacaagggcaaggagguccucguccucuggggcauccaccaccccuccaccgucgccgaccagcagucccucuaccagaacgccgacgccuacgucuucgucggcaccucccgcuacuccaagaaguucaagcccgagaucgccauccgccccaagguccgcgaccaggagggccgcaugaacuacuacuggacccucgucgagcccggcgacaagaucaccuucgaggccaccggcaaccucgucgucccccgcuacgccuucaccauggagcgcaacgccggcuccggcaucaucaucuccgacacccccguccacgacugcaacaccaccugccagacccccgagggcgccaucaacaccucccuccccuuccagaacauccaccccaucaccaucggcaagugccccaaguacgucaaguccaccaagcuccgccucgccaccggccuccgcaacguccccuccauccagucccgcggccucuucggcgccaucgccggcuucaucgagggcggcuggaccggcauggucgacggcugguacggcuaccaccaccagaacgagcagggcuccggcuacgccgccgaccucaaguccacccagaacgccaucgacaagaucaccaacaaggucaacuccgucaucgagaagaugaacacccaguucaccgccgucggcaaggaguucaaccaccucgagaagcgcaucgagaaccucaacaagaaggucgacgacggcuuccucgacaucuggaccuacaacgccgagcuccucguccuccucgagaacgagcgcacccucgacuaccacgacuccaacgucaagaaccucuacgagaagguccgcaaccagcucaagaacaacgccaaggagaucggcaacggcugcuucgaguucuaccacaagugcgacaacaccugcauggaguccgucaagaacggcaccuacgacuaccccaaguacuccgaggaggccaagcucaaccgcgagaagaucgacggcgucaagcucgaguccacccgcaucuaccagauccucgccaucuacuccaccgucgccuccucccucguccucgucgucucccucggcgccaucuccuucuggaugugcuccaacggcucccuccagugccgcaucugcaucuga

SEQ ID NO: 108029 - RNA, 1701 nt, Artificial Sequence; identical to SEQ ID NO: 106076
  derived and/or modified CDS sequence (opt2) from hemagglutinin__InfluenzaA__AHV83874

SEQ ID NO: 108030 - RNA, 1701 nt, Artificial Sequence; identical to SEQ ID NO: 106076
  derived and/or modified CDS sequence (opt2) from hemagglutinin__InfluenzaA__AHV83875

SEQ ID NO: 108031 - RNA, 1701 nt, Artificial Sequence; identical to SEQ ID NO: 106076
  derived and/or modified CDS sequence (opt2) from hemagglutinin__InfluenzaA__AHV83876

SEQ ID NO: 108032 - RNA, 1701 nt, Artificial Sequence
  derived and/or modified CDS sequence (opt2) from hemagglutinin__InfluenzaA__AHV83877
augaaggccauccucgucguccuccucuacaccuucgccaccgccaacgccgacacccucugcaucggcuaccacgccaacaacuccaccgacaccgucgacaccguccucgagaagaacgucaccgucacccacuccgucaaccuccucgaggacaagcacaacggcaagcucugcaagcuccgcggcgucgccccccuccaccucggcaagugcaacaucgccggcuggauccucggcaaccccgagugcgagucccucuccaccgccuccuccugguccuacaucgucgagaccuccuccuccgacaacggcaccugcuaccccggcgacuucaucaacuacgaggagcuccgcgagcagcucuccuccgucuccuccuucaagcgcuucgagaucuuccccaagaccuccuccuggcccaaccacgacuccaacaagggcgucaccgccgccugcccccacgccggcgccaaguccuucuacaagaaccucaucuggcucgucaagaagggcaacuccuaccccaagcucucccaguccuacaucaacgacaagggcaaggagguccucguccucuggggcauccaccaccccuccaccaccgccgaccagcagucccucuaccagaacgccgacgccuacgucuucgucggcaccucccgcuacuccaagaaguucaagcccgagaucgccauccgccccaagguccgcgaccaggagggccgcaugaacuacuacuggacccucgucgagcccggcgacaagaucaccuucgaggccaccggcaaccucgucgucccccgcuacgccuucaccauggagcgcaacgccggcuccggcaucaucaucuccgacacccccguccacgacugcaacaccaccugccagacccccgagggcgccaucaacaccucccuccccuuccagaacauccaccccaucaccaucggcaagugccccaaguacgucaaguccaccaagcuccgccucgccaccggccuccgcaacguccccuccauccagucccgcggccucuucggcgccaucgccggcuucaucgagggcggcuggaccggcauggucgacggcugguacggcuaccaccaccagaacgagcagggcuccggcuacgccgccgaccucaaguccacccagaacgccaucgacaagaucaccaacaaggucaacuccgucaucgagaagaugaacacccaguucaccgccgucggcaaggaguucaaccaccucgagaagcgcaucgagaaccucaacaagaaggucgacgacggcuuccucgacaucuggaccuacaacgccgagcuccucguccuccucgagaacgagcgcacccucgacuaccacgacuccaacgucaagaaccucuacgagaagguccgcaaccagcucaagaacaacgccaaggagaucggcaacggcugcuucgaguucuaccacaagugcgacaacaccugcauggaguccgucaagaacggcaccuacgacuaccccaaguacuccgaggaggccaagcucaaccgcgagaagaucgacggcgucaagcucgaguccacccgcaucuaccagauccucgccaucuacuccaccgucgccuccucccucguccucgucgucucccucggcgccaucuccuucuggaugugcuccaacggcucccuccagugccgcaucugcaucuga

SEQ ID NO: 108033 - RNA, 1701 nt, Artificial Sequence; identical to SEQ ID NO: 107943
  derived and/or modified CDS sequence (opt2) from hemagglutinin__InfluenzaA__AHV83878

SEQ ID NO: 108034 - RNA, 1701 nt, Artificial Sequence; identical to SEQ ID NO: 107943
  derived and/or modified CDS sequence (opt2) from hemagglutinin__InfluenzaA__AHV83879

SEQ ID NO: 108035 - RNA, 1701 nt, Artificial Sequence
  derived and/or modified CDS sequence (opt2) from hemagglutinin__InfluenzaA__AHV83881
augaaggccacccucgucguccuccucuacaccuucgccaccgccaacgccgacacccucugcaucggcuaccacgccaacaacuccaccgacaccgucgacaccguccucgagaagaacgucaccgucacccacuccgucaaccuccucgaggacaagcacaacggcaagcucugcaagcuccgcggcgucgccccccuccaccucggcaagugcaacaucgccggcuggauccucggcaaccccgagugcgagucccucuccaccgccuccuccugguccuacaucgucgagaccuccuccuccgacaacggcaccugcuaccccggcgacuucaucaacuacgaggagcuccgcgagcagcucuccuccgucuccuccuucgagcgcuucgagaucuuccccaagaccuccuccuggcccaaccacgacuccaacaagggcgucaccgccgccugcccccacgccggcgccaaguccuucuacaagaaccucaucuggcucgucaagaagggcaacuccuaccccaagcucucccaguccuacaucaacgacaagggcaaggagguccucguccucuggggcauccaccaccccuccaccaccgccgaccagcagucccucuaccagaacgccgacgccuacgucuucgucggcaccucccgcuacuccaagaaguucaagcccgagaucgccauccgccccaagguccgcgaccaggagggccgcaugaacuacuacuggacccucgucgagcccggcgacaagaucaccuucgaggccaccggcaaccucgucgucccccgcuacgccuucaccauggagcgcaacgccggcuccggcaucaucaucuccgacacccccguccacgacugcaacaccaccugccagacccccgagggcgccaucaacaccucccuccccuuccagaacauccaccccaucaccaucggcaagugccccaaguacgucaaguccaccaagcuccgccucgccaccggccuccgcaacguccccuccauccagucccgcggccucuucggcgccaucgccggcuucaucgagggcggcuggaccggcauggucgacggcugguacggcuaccaccaccagaacgagcagggcuccggcuacgccgccgaccucaaguccacccagaacgccaucgacaagaucaccaacaaggucaacuccgucaucgagaagaugaacacccaguucaccgccgucggcaaggaguucaaccaccucgagaagcgcaucgagaaccucaacaagaaggucgacgacggcuuccucgacaucuggaccuacaacgccgagcuccucguccuccucgagaacgagcgcacccucgacuaccacgacuccaacgucaagaaccucuacgagaagguccgcaaccagcucaagaacaacgccaaggagaucggcaacggcugcuucgaguucuaccacaagugcgacaacaccugcauggaguccgucaagaacggcaccuacgacuaccccaaguacuccgaggaggccaagcucaaccgcgagaagaucgacggcgucaagcucgaguccacccgcaucuaccagauccucgccaucuacuccaccgucgccuccucccucguccucgucgucucccucggcgccaucuccuucuggaugugcuccaacggcucccuccagugccgcaucugcaucuga

SEQ ID NO: 108036 - RNA, 1701 nt, Artificial Sequence; identical to SEQ ID NO: 107057
  derived and/or modified CDS sequence (opt2) from hemagglutinin__InfluenzaA__AHV83882

SEQ ID NO: 108037 - RNA, 1701 nt, Artificial Sequence; identical to SEQ ID NO: 107039
  derived and/or modified CDS sequence (opt2) from hemagglutinin__InfluenzaA__AHV83883

SEQ ID NO: 108038 - RNA, 1701 nt, Artificial Sequence; identical to SEQ ID NO: 106076
  derived and/or modified CDS sequence (opt2) from hemagglutinin__InfluenzaA__AHV83884

SEQ ID NO: 108039 - RNA, 1701 nt, Artificial Sequence
  derived and/or modified CDS sequence (opt2) from hemagglutinin__InfluenzaA__AHV83885
augaaggccauccucgucguccuccucuacaccuucgccaccgccaacgccgacacccucugcaucggcuaccacgccaacaacuccaccgacaccgucgacaccguccucgagaagaacgucaccgucacccacuccgucaaccuccucgaggacaagcacaacggcaagcucugcaagcuccgcggcgucgccccccuccaccucggcaagugcaacaucgccggcuggauccucggcaaccccgagugcgagucccucuccaccgccuccuccugguccuacaucgucgagaccuccuccuccgacaacggcaccugcuaccccggcgacuucaucaacuacgaggagcuccgcgagcagcucuccuccgucuccuccuucgagcgcuucgagaucuuccccaagaccuccuccuggcccaaccacgacuccaacaagggcgucaccgccgccugcccccacgccggcgccaaguccuucuacaagaaccucaucuggcucgucaagaagggcaacuccuaccccaagcucucccaguccuacaucaacgacaagggcaaggagguccucguccucuggggcauccaccaccccuccaccaccgccgaccagcagucccucuaccagaacgccgacgccuacgucuucgucggcaccucccgcuacuccaagaaguucaagcccgagaucgccauccgccccaagguccgcgaccaggagggccgcaugaacuacuacuggacccucgucgagcccggcgacaagaucaccuucgaggccaccggcaaccucgucgucccccgcuacgccuucaccauggagcgcaacgccggcuccggcaucaucaucuccgacacccccgucuacgacugcaacaccaccugccagacccccgagggcgccaucaacaccucccuccccuuccagaacauccaccccaucaccaucggcaagugccccaaguacgucaaguccaccaagcuccgccucgccaccggccuccgcaacguccccuccauccagucccgcggccucuucggcgccaucgccggcuucaucgagggcggcuggaccggcauggucgacggcugguacggcuaccaccaccagaacgagcagggcuccggcuacgccgccgaccucaaguccacccagaacgccaucgacaagaucaccaacaaggucaacuccgucaucgagaagaugaacacccaguucaccgccgucggcaaggaguucaaccaccucgagaagcgcaucgagaaccucaacaagaaggucgacgacggcuuccucgacaucuggaccuacaacgccgagcuccucguccuccucgagaacgagcgcacccucgacuaccacgacuccaacgucaagaaccucuacgagaagguccgcaaccagcucaagaacaacgccaaggagaucggcaacggcugcuucgaguucuaccacaagugcgacaacaccugcauggaguccgucaagaacggcaccuacgacuaccccaaguacuccgaggaggccaagcucaaccgcgagaagaucgacggcgucaagcucgaguccacccgcaucuaccagauccucgccaucuacuccaccgucgccuccucccucguccucgucgucucccucggcgccaucuccuucuggaugugcuccaacggcucccuccagugccgcaucugcaucuga

SEQ ID NO: 108040 - RNA, 1701 nt, Artificial Sequence; identical to SEQ ID NO: 107956
  derived and/or modified CDS sequence (opt2) from hemagglutinin__InfluenzaA__AHV83887

SEQ ID NO: 108041 - RNA, 1701 nt, Artificial Sequence; identical to SEQ ID NO: 106076
  derived and/or modified CDS sequence (opt2) from hemagglutinin__InfluenzaA__AHV83888

SEQ ID NO: 108042 - RNA, 1701 nt, Artificial Sequence
  derived and/or modified CDS sequence (opt2) from hemagglutinin__InfluenzaA__AHV83889
augaaggccauccucgucguccuccuccacacccucgccaccgccaacgccgacacccucugcaucggcuaccacgccaacaacuccaccgacaccgucgacaccguccucgagaagaacgucaccgucacccacuccgucaaccuccucgaggacaagcacaacggcaagcucugcaagcuccgcggcgucgccccccuccaccucggcaagugcaacaucgccggcuggauccucggcaaccccgagugcgagucccucuccaccgccuccuccugguccuacaucgucgagaccuccuccuccgacaacggcaccugcuaccccggcgacuucaucaacuacgaggagcuccgcgagcagcucuccuccgucuccuccuucgagcgcuucgagaucuuccccaagaccuccuccuggcccaaccacgacuccaacaagggcgucaccgccgccugcccccacgccggcgccaaguccuucuacaagaaccucaucuggcucgucaagaagggcaacuccuaccccaagcucucccaguccuacaucaacgacaagggcaaggagguccucguccucuggggcauccaccaccccuccaccaccgccgaccagcagucccucuaccagaacgccgacgccuacgucuucgucggcaccucccgcuacuccaagaaguucaagcccgagaucgccauccgccccaagguccgcgaccaggagggccgcaugaacuacuacuggacccucgucgagcccggcgacaagaucaccuucgaggccaccggcaaccucgucgucccccgcuacgccuucaccauggagcgcaacgccggcuccggcaucaucaucuccgacacccccguccacgacugcaacaccaccugccagacccccgagggcgccaucaacaccucccuccccuuccagaacauccaccccaucaccaucggcaagugccccaaguacgucaaguccaccaagcuccgccucgccaccggccuccgcaacguccccuccauccagucccgcggccucuucggcgccaucgccggcuucaucgagggcggcuggaccggcauggucgacggcugguacggcuaccaccaccagaacgagcagggcuccggcuacgccgccgaccucaaguccacccagaacgccaucgacaagaucaccaacaaggucaacuccgucaucgagaagaugaacacccaguucaccgccgucggcaaggaguucaaccaccucgagaagcgcaucgagaaccucaacaagaaggucgacgacggcuuccucgacaucuggaccuacaacgccgagcuccucguccuccucgagaacgagcgcacccucgacuaccacgacuccaacgucaagaaccucuacgagaagguccgcaaccagcucaagaacaacgccaaggagaucggcaacggcugcuucgaguucuaccacaagugcgacaacaccugcauggaguccgucaagaacggcaccuacgacuaccccaaguacuccgaggaggccaagcucaaccgcgagaagaucgacggcgucaagcucgaguccacccgcaucuaccagauccucgccaucuacuccaccgucgccuccucccucguccucgucgucucccucggcgccaucuccuucuggaugugcuccaacggcucccuccagugccgcaucugcaucuga

SEQ ID NO: 108043 - RNA, 1701 nt, Artificial Sequence; identical to SEQ ID NO: 106076
  derived and/or modified CDS sequence (opt2) from hemagglutinin__InfluenzaA__AHV83890

SEQ ID NO: 108044 - RNA, 1701 nt, Artificial Sequence; identical to SEQ ID NO: 106076
  derived and/or modified CDS sequence (opt2) from hemagglutinin__InfluenzaA__AHV83891

SEQ ID NO: 108045 - RNA, 1701 nt, Artificial Sequence; identical to SEQ ID NO: 106076
  derived and/or modified CDS sequence (opt2) from hemagglutinin__InfluenzaA__AHV83893

SEQ ID NO: 108046 - RNA, 1701 nt, Artificial Sequence; identical to SEQ ID NO: 106076
  derived and/or modified CDS sequence (opt2) from hemagglutinin__InfluenzaA__AHV83894

SEQ ID NO: 108047 - RNA, 1701 nt, Artificial Sequence
  derived and/or modified CDS sequence (opt2) from hemagglutinin__InfluenzaA__AHV83895
augaaggccauccucgucguccuccucuacaccuucgccaccgccaacgccgacacccucugcaucggcuaccacgccaacaacuccaccgacaccgucgacaccguccucgagaagaacgucaccgucacccacuccgucaaccuccucgaggacaagcacaacggcaagcucugcaagcuccgcggcgucgccccccuccaccucggcaagugcaacaucgccggcuggauccucggcaaccccgagugcgagucccucuccaccgccuccuccugguccuacaucgucgagaccuccuccuccgacaacggcaccugcuaccccggcgacuucaucaacuacgaggagcuccgcgagcagcucuccuccgucuccuccuucgagcgcuucgagaucuuccccaagaccuccuccuggcccaaccacgacuccaacaagggcgucaccgccgccugcccccacgccggcgccaaguccuucuacaagaaccucaucuggcucgucaagaagggcaacuccuaccccaagcucucccaguccuacaucaacgacaagggcaaggagguccucguccucuggggcauccaccaccccuccaccaccgccgaccagcagucccucuaccagaacgccgacgccuacgucuucgucggcaccucccgcuacuccaagaaguucaagcccgagaucgccauccgccccaagguccgcgaccaggagggccgcaugaacuacuacuggacccucgucgagcccggcgacaagaucaccuucgaggccaccggcaaccucgucgucccccgcuacgccuucaccauggagcgcaacgccggcuccggcaucaucaucuccgacacccccguccacgacugcaacaccaccugccagacccccgagggcgccaucaacaccucccuccccuuccagaacauccaccccaucaccaucggcaagugccccaaguacgucaaguccaccaagcuccgccucgccaccggccuccgcaacguccccuccauccagucccgcggccucuucggcgccaucgccggcuucaucgagggcggcuggaccggcauggucgacggcugguacggcuaccaccaccagaacgagcagggcuccggcuacgccgccgaccucaaguccacccagaacgccaucgacaagaucaccaacaaggucaacuccgucaucgagaagaugaacacccaguucaccgccgucggcaaggaguucaaccaccucgagaagcgcaucgagaaccucaacaagaaggucgacgacggcuuccucgacaucuggaccuacaacgccgagcuccucguccuccucgagaacgagcgcacccucgacuaccacgacuccaacgucaagaaccucuacgagaagguccgcaaccagcucaagaacaacgccaaggagaucggcaacggcugcuucgaguucuaccacaagugcgacaacaccugcauggaguccgucaagaacggcaccuacgacuaccccaaguacuccgaggagaccaagcucaaccgcgagaagaucgacggcgucaagcucgaguccacccgcaucuaccagauccucgccaucuacuccaccgucgccuccucccucguccucgucgucucccucggcgccaucuccuucuggaugugcuccaacggcucccuccagugccgcaucugcaucuga

SEQ ID NO: 108048 - RNA, 1701 nt, Artificial Sequence; identical to SEQ ID NO: 106076
  derived and/or modified CDS sequence (opt2) from hemagglutinin__InfluenzaA__AHV83896

SEQ ID NO: 108049 - RNA, 1701 nt, Artificial Sequence; identical to SEQ ID NO: 106076
  derived and/or modified CDS sequence (opt2) from hemagglutinin__InfluenzaA__AHV83897

SEQ ID NO: 108050 - RNA, 1701 nt, Artificial Sequence
  derived and/or modified CDS sequence (opt2) from hemagglutinin__InfluenzaA__AHV83898
augaaggccauccucgucguccuccucuacaccuucgccaccgccaacgccgacacccucugcaucggcuaccacgccaacaacuccaccgacaccgucgacaccguccucgagaagaacgucaccgucacccacuccgucaaccuccucgaggacaagcacaacggcaagcucugcaagcuccgcggcgucgccccccuccaccucggcaagugcaacaucgccggcuggauccucggcaaccccgagugcgagucccucuccaccgccuccuccugguccuacaucgucgagaccuccuccuccgacaacggcaccugcuaccccggcgacuucaucaacuacgaggagcuccgcgagcagcucuccuccgucuccuccuucgagcgcuucgagaucuuccccaagaccuccuccuggcccaaccacgacuccaacaagggcgucaccgccgccugcccccacgccggcgccaaguccuucuacaagaaccucaucuggcucgucaagaagggcaacuccuaccccaagcucucccaguccuacaucaacgacaagggcaaggagguccucguccucuggggcauccaccaccccuccaccaccgccgaccagcagucccucuaccagaacgccgacgccuacgucuucgucggcaccucccgcuacuccaagaaguucaagcccgagaucgccauccgccccaagguccgcgaccaggagggccgcaugaacuacuacuggacccucgucgagcccggcgacaagaucaccuucgaggccaccggcaaccucgucgucccccgcuacgccuucaccauggagcgcaacgccggcuccggcaucaucaucuccgacacccccguccacgacugcaacaccaccugccagacccccgagggcgccaucaacaccucccuccccuuccagaacauccaccccaucaccaucggcaagugccccaaguacgucaaguccaccaagcuccgccucgucaccggccuccgcaacguccccuccauccagucccgcggccucuucggcgccaucgccggcuucaucgagggcggcuggaccggcauggucgacggcugguacggcuaccaccaccagaacgagcagggcuccggcuacgccgccgaccucaaguccacccagaacgccaucgacaagaucaccaacaaggucaacuccgucaucgagaagaugaacacccaguucaccgccgucggcaaggaguucaaccaccucgagaagcgcaucgagaaccucaacaagaaggucgacgacggcuuccucgacaucuggaccuacaacgccgagcuccucguccuccucgagaacgagcgcacccucgacuaccacgacuccaacgucaagaaccucuacgagaagguccgcaaccagcucaagaacaacgccaaggagaucggcaacggcugcuucgaguucuaccacaagugcgacaacaccugcauggaguccgucaagaacggcaccuacgacuaccccaaguacuccgaggaggccaagcucaaccgcgagaagaucgacggcgucaagcucgaguccacccgcaucuaccagauccucgccaucuacuccaccgucgccuccucccucguccucgucgucucccucggcgccaucuccuucuggaugugcuccaacggcucccuccagugccgcaucugcaucuga

SEQ ID NO: 108051 - RNA, 1701 nt, Artificial Sequence; identical to SEQ ID NO: 106076
  derived and/or modified CDS sequence (opt2) from hemagglutinin__InfluenzaA__AHV83899

SEQ ID NO: 108052 - RNA, 1701 nt, Artificial Sequence; identical to SEQ ID NO: 106076
  derived and/or modified CDS sequence (opt2) from hemagglutinin__InfluenzaA__AHV83900

SEQ ID NO: 108053 - RNA, 1701 nt, Artificial Sequence; identical to SEQ ID NO: 106076
  derived and/or modified CDS sequence (opt2) from hemagglutinin__InfluenzaA__AHV83901

SEQ ID NO: 108054 - RNA, 1701 nt, Artificial Sequence; identical to SEQ ID NO: 106076
  derived and/or modified CDS sequence (opt2) from hemagglutinin__InfluenzaA__AHV83902

SEQ ID NO: 108055 - RNA, 1701 nt, Artificial Sequence; identical to SEQ ID NO: 106076
  derived and/or modified CDS sequence (opt2) from hemagglutinin__InfluenzaA__AHV83903

SEQ ID NO: 108056 - RNA, 1701 nt, Artificial Sequence; identical to SEQ ID NO: 106076
  derived and/or modified CDS sequence (opt2) from hemagglutinin__InfluenzaA__AHV83904

SEQ ID NO: 108057 - RNA, 1701 nt, Artificial Sequence
  derived and/or modified CDS sequence (opt2) from hemagglutinin__InfluenzaA__AHV83905
augaaggccauccucgucguccuccucuacacccucaccaccgccaacgccgacacccucugcaucggcuaccacgccaacaacuccaccgacaccgucgacaccguccucgagaagaacgucaccgucacccacuccgucaaccuccucgaggacaagcacaacggcaagcucugcaagcuccgcggcgucgccccccuccaccucggcaagugcaacaucgccggcuggauccucggcaaccccgagugcgagucccucuccaccgccuccuccugguccuacaucgucgagaccuccuccuccgacaacggcaccugcuaccccggcgacuucaucaacuacgaggagcuccgcgagcagcucuccuccgucuccuccuucgagcgcuucgagaucuuccccaagaccuccuccuggcccaaccacgacuccaacaagggcgucaccgccgccugcccccacgccggcgccaaguccuucuacaagaaccucaucuggcucgucaagaagggcaacuccuaccccaagcucucccaguccuacaucaacgacaagggcaaggagguccucguccucuggggcauccaccaccccuccaccaccgccgaccagcagucccucuaccagaacgccgacgccuacgucuucgucggcaccucccgcuacuccaagaaguucaagcccgagaucgccauccgccccaagguccgcgaccaggagggccgcaugaacuacuacuggacccucgucgagcccggcgacaagaucaccuucgaggccaccggcaaccucgucgucccccgcuacgccuucaccauggagcgcaacgccggcuccggcaucaucaucuccgacacccccguccacgacugcaacaccaccugccagacccccgagggcgccaucaacaccucccuccccuuccagaacauccaccccaucaccaucggcaagugccccaaguacgucaaguccaccaagcuccgccucgccaccggccuccgcaacguccccuccauccagucccgcggccucuucggcgccaucgccggcuucaucgagggcggcuggaccggcauggucgacggcugguacggcuaccaccaccagaacgagcagggcuccggcuacgccgccgaccucaaguccacccagaacgccaucgacaagaucaccaacaaggucaacuccgucaucgagaagaugaacacccaguucaccgccgucggcaaggaguucaaccaccucgagaagcgcaucgagaaccucaacaagaaggucgacgacggcuuccucgacaucuggaccuacaacgccgagcuccucguccuccucgagaacgagcgcacccucgacuaccacgacuccaacgucaagaaccucuacgagaagguccgcaaccagcucaagaacaacgccaaggagaucggcaacggcugcuucgaguucuaccacaagugcgacaacaccugcauggaguccgucaagaacggcaccuacgacuaccccaaguacuccgaggaggccaagcucaaccgcgagaagaucgacggcgucaagcucgaguccacccgcaucuaccagauccucgccaucuacuccaccgucgccuccucccucguccucgucgucucccucggcgccaucuccuucuggaugugcuccaacggcucccuccagugccgcaucugcaucuga

SEQ ID NO: 108058 - RNA, 1701 nt, Artificial Sequence; identical to SEQ ID NO: 106076
  derived and/or modified CDS sequence (opt2) from hemagglutinin__InfluenzaA__AHV83906

SEQ ID NO: 108059 - RNA, 1701 nt, Artificial Sequence; identical to SEQ ID NO: 106076
  derived and/or modified CDS sequence (opt2) from hemagglutinin__InfluenzaA__AHV83907

SEQ ID NO: 108060 - RNA, 1701 nt, Artificial Sequence
  derived and/or modified CDS sequence (opt2) from hemagglutinin__InfluenzaA__AHV83908
augaaggccauccucgucguccuccucuacaccuucgccaccgccaacgccgacacccucugcaucggcuaccacgccaacaacuccaccgacaccgucgacaccguccucgagaagaacgucaccgucacccacuccgucaaccuccucgaggacaagcacaacggcaagcucugcaagcuccgcggcgucgccccccuccaccucggcaagugcaacaucgccggcuggauccucggcaaccccgagugcgagccccucuccaccgccuccuccugguccuacaucgucgagaccuccuccuccgacaacggcaccugcuaccccggcgacuucaucaacuacgaggagcuccgcgagcagcucuccuccgucuccuccuucgagcgcuucgagaucuuccccaagaccuccuccuggcccaaccacgacuccaacaagggcgucaccgccgccugcccccacgccggcgccaaguccuucuacaagaaccucaucuggcucgucaagaagggcaacuccuaccccaagcucucccaguccuacaucaacgacaagggcaagaagguccucguccucuggggcauccaccaccccuccaccaccgccgaccagcagucccucuaccagaacgccgacgccuacgucuucgucggcaccucccgcuacuccaagaaguucaagcccgagaucgccauccgccccaagguccgcgaccaggagggccgcaugaacuacuacuggacccucgucgagcccggcgacaagaucaccuucgaggccaccggcaaccucgucgucccccgcuacgccuucaccauggagcgcaacgccggcuccggcaucaucaucuccgacacccccguccacgacugcaacaccaccugccagacccccgagggcgccaucaacaccucccuccccuuccagaacauccaccccaucaccaucggcaagugccccaaguacgucaaguccaccaagcuccgccucgccaccggccuccgcaacguccccuccauccagucccgcggccucuucggcgccaucgccggcuucaucgagggcggcuggaccggcauggucgacggcugguacggcuaccaccaccagaacgagcagggcuccggcuacgccgccgaccucaaguccacccagaacgccaucgacaagaucaccaacaaggucaacuccgucaucgagaagaugaacacccaguucaccgccgucggcaaggaguucaaccaccucgagaagcgcaucgagaaccucaacaagaaggucgacgacggcuuccucgacaucuggaccuacaacgccgagcuccucguccuccucgagaacgagcgcacccucgacuaccacgacuccaacgucaagaaccucuacgagaagguccgcaaccagcucaagaacaacgccaaggagaucggcaacggcugcuucgaguucuaccacaagugcgacaacaccugcauggaguccgucaagaacggcaccuacgacuaccccaaguacuccgaggaggccaagcucaaccgcgagaagaucgacggcgucaagcucgaguccacccgcaucuaccagauccucgccaucuacuccaccgucgccuccucccucguccucgucgucucccucggcgccaucuccuucuggaugugcuccaacggcucccuccagugccgcaucugcaucuga

SEQ ID NO: 108061 - RNA, 1701 nt, Artificial Sequence
  derived and/or modified CDS sequence (opt2) from hemagglutinin__InfluenzaA__AHV83911
augaaggccauccucgucguccuccucuacaccuucgccaccgccaacgccgacacccucugcaucggcuaccacgccaacaacuccaccgacaccgucgacaccguccucgagaagaacgucaccgucacccacuccgucaaccuccucgaggacaagcacaacggcaagcucugcaagcuccgcggcgucgccccccuccaccucggcaagugcaacaucgccggcuggauccucggcaaccccgagugcgagccccucuccaccgccuccuccugguccuacaucgucgagaccuccuccuccgacaacggcaccugcuaccccggcgacuucaucaacuacgaggagcuccgcgagcagcucuccuccgucuccuccuucgagcgcuucgagaucuuccccaagaccuccuccuggcccaaccacgacuccaacaagggcgucaccgccgccugcccccacgccggcgccaaguccuucuacaagaaccucaucuggcucgucaagaagggcaacuccuaccccaagcucucccaguccuacaucaacgacaagggcaaggagguccucguccucuggggcauccaccaccccuccaccaccgccgaccagcagucccucuaccagaacgccgacgccuacgucuucgucggcaccucccgcuacuccaagaaguucaagcccgagaucgccauccgccccaagguccgcgaccaggagggccgcaugaacuacuacuggacccucgucgagcccggcgacaagaucaccuucgaggccaccggcaaccucgucgucccccgcuacgccuucaccauggagcgcaacgccggcuccggcaucaucaucuccgacacccccguccacgacugcaacaccaccugccagacccccgagggcgccaucaacaccucccuccccuuccagaacauccaccccaucaccaucggcaagugccccaaguacgucaaguccaccaagcuccgccucgccaccggccuccgcaacguccccuccauccagucccgcggccucuucggcgccaucgccggcuucaucgagggcggcuggaccggcauggucgacggcugguacggcuaccaccaccagaacgagcagggcuccggcuacgccgccgaccucaaguccacccagaacgccaucgacaagaucaccaacaaggucaacuccgucaucgagaagaugaacacccaguucaccgccgucggcaaggaguucaaccaccucgagaagcgcaucgagaaccucaacaagaaggucgacgacggcuuccucgacaucuggaccuacaacgccgagcuccucguccuccucgagaacgagcgcacccucgacuaccacgacuccaacgucaagaaccucuacgagaagguccgcaaccagcucaagaacaacgccaaggagaucggcaacggcugcuucgaguucuaccacaagugcgacaacaccugcauggaguccgucaagaacggcaccuacgacuaccccaaguacuccgaggaggccaagcucaaccgcgagaagaucgacggcgucaagcucgaguccacccgcaucuaccagauccucgccaucuacuccaccgucgccuccucccucguccucgucgucucccucggcgccaucuccuucuggaugugcuccaacggcucccuccagugccgcaucugcaucuga

SEQ ID NO: 108062 - RNA, 1701 nt, Artificial Sequence; identical to SEQ ID NO: 106076
  derived and/or modified CDS sequence (opt2) from hemagglutinin__InfluenzaA__AHV83912

SEQ ID NO: 108063 - RNA, 1701 nt, Artificial Sequence; identical to SEQ ID NO: 106076
  derived and/or modified CDS sequence (opt2) from hemagglutinin__InfluenzaA__AHV83913

SEQ ID NO: 108064 - RNA, 1701 nt, Artificial Sequence; identical to SEQ ID NO: 106076
  derived and/or modified CDS sequence (opt2) from hemagglutinin__InfluenzaA__AHV83915

SEQ ID NO: 108065 - RNA, 1701 nt, Artificial Sequence; identical to SEQ ID NO: 106076
  derived and/or modified CDS sequence (opt2) from hemagglutinin__InfluenzaA__AHV83916

SEQ ID NO: 108066 - RNA, 1701 nt, Artificial Sequence; identical to SEQ ID NO: 108061
  derived and/or modified CDS sequence (opt2) from hemagglutinin__InfluenzaA__AHV83917

SEQ ID NO: 108067 - RNA, 1701 nt, Artificial Sequence; identical to SEQ ID NO: 107039
  derived and/or modified CDS sequence (opt2) from hemagglutinin__InfluenzaA__AHV83919

SEQ ID NO: 108068 - RNA, 1701 nt, Artificial Sequence; identical to SEQ ID NO: 107956
  derived and/or modified CDS sequence (opt2) from hemagglutinin__InfluenzaA__AHV83920

SEQ ID NO: 108069 - RNA, 1701 nt, Artificial Sequence; identical to SEQ ID NO: 107057
  derived and/or modified CDS sequence (opt2) from hemagglutinin__InfluenzaA__AHV83921

SEQ ID NO: 108070 - RNA, 1701 nt, Artificial Sequence
  derived and/or modified CDS sequence (opt2) from hemagglutinin__InfluenzaA__AHV83922
augaaggccauccucgucguccuccucuacaccuucgccaccgccaacgccgacacccucugcaucggcuaccacgccaacaacuccaccgacaccgucgacaccguccucgagaagaacgucaccgucacccacuccgucaaccuccucgaggacaagcacaacggcaagcucugcaagcuccgcggcgucgccccccuccaccucggcaagugcaacaucgccggcuggauccucggcaaccccgagugcgagucccucuccaccgccuccuccugguccuacaucgucgagaccuccuccuccgacaacggcaccugcuaccccggcgacuucaucaacuacgaggagcuccgcgagcagcucuccuccgucuccuccuucgagcgcuucgagaucuuccccaagaccuccuccuggcccaaccacgacuccaacaagggcgucaccgccgccugcccccacgccggcgccaaguccuucuacaagaaccucaucuggcucgucaagaagggcaacuccuaccccaagcucucccaguccuacaucaacgacaagggcaaggagguccucguccucuggggcauccaccaccccuccaccaccgccgaccagcagucccucuaccagaacgccgacgccuacgucuucgucggcaccucccgcuacuccaagaaguucaagcccgagaucgccauccgccccaagguccgcgaccaggagggccgcaugaacuacuacuggacccucgucgagcccggcgacaagaucaccuucgaggccaccggcaaccucgucgucccccgcuacgccuucaccauggagcgcaacgccggcuccggcaucaucaucuccgacacccccguccacgacugcaacaccaccugccagacccccgagggcgccaucaacaccucccuccccuuccagaacauccaccccaucaccaucggcaagugccccaaguacgucaaguccaccaagcuccgccucgccaccggccuccgcaacguccccuccauccagucccgcggccucuucggcgccaucgccggcuucaucgagggcggcuggaccggcauggucgacggcugguacggcuaccaccaccagaacgagcagggcuccggcuacgccgccgaccucaaguccacccagaacgccaucgacaagaucaccaacaaggucaacuccgucaucgagaagaugaacacccaguucaccgccgucggcaaggaguucucccaccucgagaagcgcaucgagaaccucaacaagaaggucgacgacggcuuccucgacaucuggaccuacaacgccgagcuccucguccuccucgagaacgagcgcacccucgacuaccacgacuccaacgucaagaaccucuacgagaagguccgcaaccagcucaagaacaacgccaaggagaucggcaacggcugcuucgaguucuaccacaagugcgacaacaccugcauggaguccgucaagaacggcaccuacgacuaccccaaguacuccgaggaggccaagcucaaccgcgagaagaucgacggcgucaagcucgaguccacccgcaucuaccagauccucgccaucuacuccaccgucgccuccucccucguccucgucgucucccucggcgccaucuccuucuggaugugcuccaacggcucccuccagugccgcaucugcaucuga

SEQ ID NO: 108071 - RNA, 1701 nt, Artificial Sequence; identical to SEQ ID NO: 107972
  derived and/or modified CDS sequence (opt2) from hemagglutinin__InfluenzaA__AHV83923

SEQ ID NO: 108072 - RNA, 1701 nt, Artificial Sequence; identical to SEQ ID NO: 107956
  derived and/or modified CDS sequence (opt2) from hemagglutinin__InfluenzaA__AHV83924

SEQ ID NO: 108073 - RNA, 1701 nt, Artificial Sequence; identical to SEQ ID NO: 107972
  derived and/or modified CDS sequence (opt2) from hemagglutinin__InfluenzaA__AHV83925

SEQ ID NO: 108074 - RNA, 1701 nt, Artificial Sequence; identical to SEQ ID NO: 107956
  derived and/or modified CDS sequence (opt2) from hemagglutinin__InfluenzaA__AHV83926

SEQ ID NO: 108075 - RNA, 1701 nt, Artificial Sequence; identical to SEQ ID NO: 108061
  derived and/or modified CDS sequence (opt2) from hemagglutinin__InfluenzaA__AHV83927

SEQ ID NO: 108076 - RNA, 1701 nt, Artificial Sequence
  derived and/or modified CDS sequence (opt2) from hemagglutinin__InfluenzaA__AHV83928
augaaggccauccucgucguccuccucuacaccuucaccaccgccaacgccgacacccucugcaucggcuaccacgccaacaacuccaccgacaccgucgacaccguccucgagaagaacgucaccgucacccacuccgucaaccuccucgaggacaagcacaacggcaagcucugcaagcuccgcggcgucgccccccuccaccucggcaagugcaacaucgccggcuggauccucggcaaccccgagugcgagucccucuccaccgccuccuccugguccuacaucgucgagaccuccuccuccgacaacggcaccugcuaccccggcgacuucaucaacuacgaggagcuccgcgagcagcucuccuccgucuccuccuucgagcgcuucgagaucuuccccaagaccuccuccuggcccaaccacgacuccaacaagggcgucaccgccgccugcccccacgccggcgccaaguccuucuacaagaaccucaucuggcucgucaagaagggcaacuccuaccccaagcucucccaguccuacaucaacgacaagggcaaggagguccucguccucuggggcauccaccaccccuccaccaccgccgaccagcagucccucuaccagaacgccgacgccuacgucuucgucggcaccucccgcuacuccaagaaguucaagcccgagaucgccauccgccccaagguccgcgaccaggagggccgcaugaacuacuacuggacccucgucgagcccggcgacaagaucaccuucgaggccaccggcaaccucgucgucccccgcuacgccuucaccauggagcgcaacgccggcuccggcaucaucaucuccgacacccccguccacgacugcaacaccaccugccagacccccgagggcgccaucaacaccucccuccccuuccagaacauccaccccaucaccaucggcaagugccccaaguacgucaaguccaccaagcuccgccucgccaccggccuccgcaacguccccuccauccagucccgcggccucuucggcgccaucgccggcuucaucgagggcggcuggaccggcauggucgacggcugguacggcuaccaccaccagaacgagcagggcuccggcuacgccgccgaccagaaguccacccagaacgccaucgacaagaucaccaacaaggucaacuccgucaucgagaagaugaacacccaguucaccgccgucggcaaggaguucaaccaccucgagaagcgcaucgagaaccucaacaagaaggucgacgacggcuuccucgacaucuggaccuacaacgccgagcuccucguccuccucgagaacgagcgcacccucgacuaccacgacuccaacgucaagaaccucuacgagaagguccgcaaccagcucaagaacaacgccaaggagaucggcaacggcugcuucgaguucuaccacaagugcgacaacaccugcauggaguccgucaagaacggcaccuacgacuaccccaaguacuccgaggaggccaagcucaaccgcgagaagaucgacggcgucaagcucgaguccacccgcaucuaccagauccucgccaucuacuccaccgucgccuccucccucguccucgucgucucccucggcgccaucuccuucuggaugugcuccaacggcucccuccagugccgcaucugcaucuga

SEQ ID NO: 108077 - RNA, 1701 nt, Artificial Sequence; identical to SEQ ID NO: 107956
  derived and/or modified CDS sequence (opt2) from hemagglutinin__InfluenzaA__AHV83929

SEQ ID NO: 108078 - RNA, 1701 nt, Artificial Sequence
  derived and/or modified CDS sequence (opt2) from hemagglutinin__InfluenzaA__AHV83930
augaaggccauccucgucauccuccucuacaccuucgccaccgccaacgccgacacccucugcaucggcuaccacgccaacaacuccaccgacaccgucgacaccguccucgagaagaacgucaccgucacccacuccgucaaccuccucgaggacaagcacaacggcaagcucugcaagcuccgcggcgucgccccccuccaccucggcaagugcaacaucgccggcuggauccucggcaaccccgagugcgagucccucuccaccgccuccuccugguccuacaucgucgagaccuccuccuccgacaacggcaccugcuaccccggcgacuucaucaacuacgaggagcuccgcgagcagcucuccuccgucuccuccuucgagcgcuucgagaucuuccccaagaccuccuccuggcccaaccacgacuccaacaagggcgucaccgccgccugcccccacgccggcgccaaguccuucuacaagaaccucaucuggcucgucaagaagggcaacuccuaccccaagcucucccaguccuacaucaacgacaagggcaaggagguccucguccucuggggcauccaccaccccuccaccaccgccgaccagcagucccucuaccagaacgccgacgccuacgucuucgucggcaccucccgcuacuccaagaaguucaagcccgagaucgccauccgccccaagguccgcgaccaggagggccgcaugaacuacuacuggacccucgucgagcccggcgacaagaucaccuucgaggccaccggcaaccucgucgucccccgcuacgccuucaccauggagcgcaacgccggcuccggcaucaucaucuccgacacccccguccacgacugcaacaccaccugccagacccccgagggcgccaucaacaccucccuccccuuccagaacauccaccccaucaccaucggcaagugccccaaguacgucaaguccaccaagcuccgccucgccaccggccuccgcaacguccccuccauccagucccgcggccucuucggcgccaucgccggcuucaucgagggcggcuggaccggcauggucgacggcugguacggcuaccaccaccagaacgagcagggcuccggcuacgccgccgaccucaaguccacccagaacgccaucgacaagaucaccaacaaggucaacuccgucaucgagaagaugaacacccaguucaccgccgucggcaaggaguucaaccaccucgagaagcgcaucgagaaccucaacaagaaggucgacgacggcuuccucgacaucuggaccuacaacgccgagcuccucguccuccucgagaacgagcgcacccucgacuaccacgacuccaacgucaagaaccucuacgagaagguccgcaaccagcucaagaacaacgccaaggagaucggcaacggcugcuucgaguucuaccacaagugcgacaacaccugcauggaguccgucaagaacggcaccuacgacuaccccaaguacuccgaggaggccaagcucaaccgcgagaagaucgacggcgucaagcucgaguccacccgcaucuaccagauccucgccaucuacuccaccgucgccuccucccucguccucgucgucucccucggcgccaucuccuucuggaugugcuccaacggcucccuccagugccgcaucugcaucuga

SEQ ID NO: 108079 - RNA, 1701 nt, Artificial Sequence; identical to SEQ ID NO: 107956
  derived and/or modified CDS sequence (opt2) from hemagglutinin__InfluenzaA__AHV83931

SEQ ID NO: 108080 - RNA, 1701 nt, Artificial Sequence; identical to SEQ ID NO: 106076
  derived and/or modified CDS sequence (opt2) from hemagglutinin__InfluenzaA__AHV83932

SEQ ID NO: 108081 - RNA, 1701 nt, Artificial Sequence
  derived and/or modified CDS sequence (opt2) from hemagglutinin__InfluenzaA__AHV83933
augaaggccauccucgucguccuccucuacaccuucgccaccgccaacgccgacacccucugcaucggcuaccacgccaacaacuccaccgacaccgucgacaccguccucgagaagaacgucaccgucacccacuccgucaaccuccucgaggacaagcacaacggcaagcucugcaagcuccgcggcgucaccccccuccaccucggcaagugcaacaucgccggcuggauccucggcaaccccgagugcgagucccucuccaccgccuccuccugguccuacaucgucgagaccuccuccuccgacaacggcaccugcuaccccggcgacuucaucaacuacgaggagcuccgcgagcagcucuccuccgucuccuccuucgagcgcuucgagaucuuccccaagaccuccuccuggcccaaccacgacuccaacaagggcgucaccgccgccugcccccacgccggcgccaaguccuucuacaagaaccucaucuggcucgucaagaagggcaacuccuaccccaagcucucccaguccuacaucaacgacaagggcaaggagguccucguccucuggggcauccaccaccccuccaccaccgccgaccagcagucccucuaccagaacgccgacgccuacgucuucgucggcaccucccgcuacuccaagaaguucaagcccgagaucgccauccgccccaagguccgcgaccaggagggccgcaugaacuacuacuggacccucgucgagcccggcgacaagaucaccuucgaggccaccggcaaccucgucgucccccgcuacgccuucaccauggagcgcaacgccggcuccggcaucaucaucuccgacacccccguccacgacugcaacaccaccugccagacccccgagggcgccaucaacaccucccuccccuuccagaacauccaccccaucaccaucggcaagugccccaaguacgucaaguccaccaagcuccgccucgccaccggccuccgcaacguccccuccauccagucccgcggccucuucggcgccaucgccggcuucaucgagggcggcuggaccggcauggucgacggcugguacggcuaccaccaccagaacgagcagggcuccggcuacgccgccgaccagaaguccacccagaacgccaucgacaagaucaccaacaaggucaacuccgucaucgagaagaugaacacccaguucaccgccgucggcaaggaguucaaccaccucgagaagcgcaucgagaaccucaacaagaaggucgacgacggcuuccucgacaucuggaccuacaacgccgagcuccucguccuccucgagaacgagcgcacccucgacuaccacgacuccaacgucaagaaccucuacgagaagguccgcaaccagcucaagaacaacgccaaggagaucggcaacggcugcuucgaguucuaccacaagugcgacaacaccugcauggaguccgucaagaacggcaccuacgacuaccccaaguacuccgaggaggccaagcucaaccgcgagaagaucgacggcgucaagcucgaguccacccgcaucuaccagauccucgcccucuacuccaccgucgccuccucccucguccucgucgucucccucggcgccaucuccuucuggaugugcuccaacggcucccuccagugccgcaucugcaucuga

SEQ ID NO: 108082 - RNA, 1701 nt, Artificial Sequence; identical to SEQ ID NO: 107039
  derived and/or modified CDS sequence (opt2) from hemagglutinin__InfluenzaA__AHV83934

SEQ ID NO: 108083 - RNA, 1701 nt, Artificial Sequence; identical to SEQ ID NO: 106076
  derived and/or modified CDS sequence (opt2) from hemagglutinin__InfluenzaA__AHV83935

SEQ ID NO: 108084 - RNA, 1701 nt, Artificial Sequence; identical to SEQ ID NO: 106076
  derived and/or modified CDS sequence (opt2) from hemagglutinin__InfluenzaA__AHV83937

SEQ ID NO: 108085 - RNA, 1701 nt, Artificial Sequence
  derived and/or modified CDS sequence (opt2) from hemagglutinin__InfluenzaA__AHV83938
augaaggccauccucgucguccuccucuacaccuucgccaccgccaacgccgacacccucugcaucggcuaccacgccaacaacuccaccgacaccgucgacaccguccucgagaagaacgucaccgucacccacuccgucaaccuccucgaggacaagcacaacggcaagcucugcaagcuccgcggcgucgccccccuccaccucggcaagugcaacaucgccggcuggauccucggcaaccccgagugcgagucccucuccaccgccuccuccugguccuacaucgucgagaccuccuccuccgacaacggcaccugcuaccccggcgacuucaucaacuacgaggagcuccgcgagcagcucuccuccgucuccuccuucgagcgcuucgagaucuuccccaagaccuccuccuggcccaaccacgacuccaacaagggcgucaccgccgccugcccccacgccggcgccaaguccuucuacaagaaccucaucuggcucgucaagaagggcaacuccuaccccaagaucucccaguccuacaucaacgacaagggcaaggagguccucguccucuggggcauccaccaccccuccaccaccgccgaccagcagucccucuaccagaacgccgacgccuacgucuucgucggcaccucccgcuacuccaagaaguucaagcccgagaucgccauccgccccaagguccgcgaccaggagggccgcaugaacuacuacuggacccucgucgagcccggcgacaagaucaccuucgaggccaccggcaaccucgucgucccccgcuacgccuucaccauggagcgcaacgccggcuccggcaucaucaucuccgacacccccguccacgacugcaacaccaccugccagacccccgagggcgccaucaacaccucccuccccuuccagaacauccaccccaucaccaucggcaagugccccaaguacgucaaguccaccaagcuccgccucgccaccggccuccgcaacguccccuccauccagucccgcggccucuucggcgccaucgccggcuucaucgagggcggcuggaccggcauggucgacggcugguacggcuaccaccaccagaacgagcagggcuccggcuacgccgccgaccagaaguccacccagaacgccaucgacaagaucaccaacaaggucaacuccgucaucgagaagaugaacacccaguucaccgccgucggcaaggaguucaaccaccucgagaagcgcaucgagaaccucaacaagaaggucgacgacggcuuccucgacaucuggaccuacaacgccgagcuccucguccuccucgagaacgagcgcacccucgacuaccacgacuccaacgucaagaaccucuacgagaagguccgcaaccagcucaagaacaacgccaaggagaucggcaacggcugcuucgaguucuaccacaagugcgacaacaccugcauggaguccgucaagaacggcaccuacgacuaccccaaguacuccgaggaggccaagcucaaccgcgagaagaucgacggcgucaagcucgaguccacccgcaucuaccagauccucgccaucuacuccaccgucgccuccucccucguccucgucgucucccucggcgccaucuccuucuggaugugcuccaacggcucccuccagugccgcaucugcaucuga

SEQ ID NO: 108086 - RNA, 1701 nt, Artificial Sequence; identical to SEQ ID NO: 108085
  derived and/or modified CDS sequence (opt2) from hemagglutinin__InfluenzaA__AHV83939

SEQ ID NO: 108087 - RNA, 1701 nt, Artificial Sequence
  derived and/or modified CDS sequence (opt2) from hemagglutinin__InfluenzaA__AHV83940
augaaggccauccucgucguccuccucuacaccuucgccaccgccaacgccgacacccucugcaucggcuaccacgccaacaacuccaccgacaccgucgacaccguccucgagaagaacgucaccgucacccacuccgucaaccuccucgaggacaagcacaacggcaagcucugcaagcuccgcggcgucgccccccuccaccucggcaagugcaacaucgccggcuggauccucggcaaccccgagugcgagucccucuccaccgccuccuccugguccuacaucgucgagaccuccuccuccgacaacggcaccugcuaccccggcgacuucaucaacuacgaggagcuccgcgagcagcucuccuccgucuccuccuucgagcgcuucgagaucuuccccaagaccuccuccuggcccaaccacgacuccaacaagggcgucaccgccgccugcccccacgccggcgccaaguccuucuacaagaaccucaucuggcucgucaagaagggcaacuccuaccccaagcucucccaguccuacaucaacgacaagggcaaggagguccucguccucuggggcauccaccaccccuccaccaccgccgaccagcagucccucuaccagaacgccgacgccuacgucuucgucggcaccucccgcuacuccaagaaguucaagcccgagaucgccauccgccccaagguccgcgaccaggagggccgcaugaacuacuacuggacccucgucgagcccggcgacaagaucaccuucgaggccaccggcaaccucgucgucccccgcuacgccuucaccauggagcgcaacgccggcuccggcaucaucaucuccgacacccccguccacgacugcaacaccaccugccagacccccgagggcgccaucaacaccucccuccccuuccagaacauccaccccaucaccaucggcaagugccccaaguacgucaaguccaccaagcuccgccucgccaccggccuccgcaacguccccuccauccagucccgcggccucuucggcgccaucgccggcuucaucgagggcggcuggaccggcauggucgacggcugguacggcuaccaccaccagaacgagcagggcuccggcuacgccgccgaccagaaguccacccagaacgccaucgacaagaucaccaacaaggucaacuccgucaucgagaagaugaacacccaguucaccgccgucggcaaggaguucaaccaccucgagaagcgcaucgagaaccucaacaagaaggucgacgacggcuucauggacaucuggaccuacaacgccgagcuccucguccuccucgagaacgagcgcacccucgacuaccacgacuccaacgucaagaaccucuacgagaagguccgcaaccagcucaagaacaacgccaaggagaucggcaacggcugcuucgaguucuaccacaagugcgacaacaccugcauggaguccgucaagaacggcaccuacgacuaccccaaguacuccgaggaggccaagcucaaccgcgagaagaucgaccgcgucaagcucgaguccacccgcaucuaccagauccucgccaucuacuccaccgucgccuccucccucguccucgucgucucccucggcgccaucuccuucuggaugugcuccaacggcucccuccagugccgcaucugcaucuga

SEQ ID NO: 108088 - RNA, 1701 nt, Artificial Sequence; identical to SEQ ID NO: 106076
  derived and/or modified CDS sequence (opt2) from hemagglutinin__InfluenzaA__AHV83941

SEQ ID NO: 108089 - RNA, 1701 nt, Artificial Sequence
  derived and/or modified CDS sequence (opt2) from hemagglutinin__InfluenzaA__AHV83943
augaaggccauccucgucguccuccucuacaccuucgccaccgccaacgccgacacccucugcaucggcuaccacgccaacaacuccaccgacaccgucgacaccguccucgagaagaacgucaccgucacccacuccgucaaccuccucgaggacaagcacaacggcaagcucugcaagcuccgcggcgucgccccccuccaccucggcaagugcaacaucgccggcuggauccucggcaaccccgagugcgagucccucuccaccgccuccuccugguccuacaucgucgagaccuccuccuccgacaacggcaccugcuaccccggcgacuucaucaacuacgaggagcuccgcgagcagcucuccuccgucuccuccuucgagcgcuucgagaucuuccccaagaccuccuccuggcccaaccacgacuccaacaagggcgucaccgccgccugcccccacgccggcgccaaguccuucuacaagaaccucaucuggcucgucaagaagggcaacuccuaccccaagcucucccaguccuacaucaacgacaagggcaaggagguccucguccucuggggcauccaccaccccuccaccaccgccgaccagcagucccucuaccagaacgccgacgccuacgucuucgucggcaccucccgcuacuccaagaaguucaagcccgagaucgccauccgccccaagguccgcgaccaggagggccgcaugaacuacuacuggacccucgucgagcccggcgacaagaucaccuucgaggccaccggcaaccucgucgucccccgcuacgccuucaccauggagcgcaacgccggcuccggcaucaucaucuccgacacccccguccacgacugcaacaccaccugccagacccccgagggcgccaucaacaccucccuccccuuccagaacauccaccccaucaccaucggcaagugccccaaguacgucaaguccaccaagcuccgccucgccaccggccuccgcaacguccccuccauccagucccgcggccucuucggcgccaucgccggcuucaucgagggcggcuggaccggcauggucgacggcugguacggcuaccaccaccagaacgagcagggcuccggcuacgccgccgaccucaaguccacccagaacgccaucgacaagaucaccaacaaggucaacuccgucaucgagaagaugaacacccaguucaccgccgucggcaaggaguucaaccaccucgagaagcgcaucgagaaccucaacaagaaggucgacgacggcuuccucgacaucuggaccuacaacgccgagcuccucguccuccucgagaacgagcgcacccucgacuaccacgacuccaacgucaagaaccucuacgagaagguccgcaaccagcucaagaacaacgccaaggagaucggcaacggcugcuucgaguucuaccacaagugcgacaacaugugcauggaguccgucaagaacggcaccuacgacuaccccaaguacuccgaggaggccaagcucaaccgcgagaagaucgacggcgucaagcucgaguccacccgcaucuaccagauccucgccaucuacuccaccgucgccuccucccucguccucgucgucucccucggcgccaucuccuucuggaugugcuccaacggcucccuccagugccgcaucugcaucuga

SEQ ID NO: 108090 - RNA, 1701 nt, Artificial Sequence
  derived and/or modified CDS sequence (opt2) from hemagglutinin__InfluenzaA__AHV83944
augaaggccauccucgucguccuccucuacaccuucgccaccgccaacgccgacacccucugcaucggcuaccacgccaacaacuccaccgacaccgucgacaccguccucgagaagaacgucaccgucacccacuccgucaaccuccucgaggacgagcacaacggcaagcucugcaagcuccgcggcgucgccccccuccaccucggcaagugcaacaucgccggcuggauccucggcaaccccgagugcgagucccucuccaccgccuccuccugguccuacaucgucgagaccuccuccuccgacaacggcaccugcuaccccggcgacuucaucaacuacgaggagcuccgcgagcagcucuccuccgucuccuccuucgagcgcuucgagaucuuccccaagaccuccuccuggcccaaccacgacuccaacaagggcgucaccgccgccugcccccacgccggcgccaaguccuucuacaagaaccucaucuggcucgucaagaagggcaacuccuaccccaagcucucccaguccuacaucaacgacaagggcaaggagguccucguccucuggggcauccaccaccccuccaccaccgccgaccagcagucccucuaccagaacgccgacgccuacgucuucgucggcaccucccgcuacuccaagaaguucaagcccgagaucgccauccgccccaagguccgcgaccaggagggccgcaugaacuacuacuggacccucgucgagcccggcgacaagaucaccuucgaggccaccggcaaccucgucgucccccgcuacgccuucaccauggagcgcaacgccggcuccggcaucaucaucuccgacacccccguccacgacugcaacaccaccugccagacccccgagggcgccaucaacaccucccuccccuuccagaacauccaccccaucaccaucggcaagugccccaaguacgucaaguccaccaagcuccgccucgccaccggccuccgcaacguccccuccauccagucccgcggccucuucggcgccaucgccggcuucaucgagggcggcuggaccggcauggucgacggcugguacggcuaccaccaccagaacgagcagggcuccggcuacgccgccgaccucaaguccacccagaacgccaucgacaagaucaccaacaaggucaacuccgucaucgagaagaugaacacccaguucaccgccgucggcaaggaguucaaccaccucgagaagcgcaucgagaaccucaacaagaaggucgacgacggcuuccucgacaucuggaccuacaacgccgagcuccucguccuccucgagaacgagcgcacccucgacuaccacgacuccaacgucaagaaccucuacgagaagguccgcaaccagcucaagaacaacgccaaggagaucggcaacggcugcuucgaguucuaccacaagugcgacaacaccugcauggaguccgucaagaacggcaccuacgacuaccccaaguacuccgaggaggccaagcucaaccgcgagaagaucgacggcgucaagcucgaguccacccgcaucuaccagauccucgccaucuacuccaccgucgccuccucccucguccucgucgucucccucggcgccaucuccuucuggaugugcuccaacggcucccuccagugccgcaucugcaucuga

SEQ ID NO: 108091 - RNA, 1701 nt, Artificial Sequence
  derived and/or modified CDS sequence (opt2) from hemagglutinin__InfluenzaA__AHV83945
augaaggccauccucgucguccuccucuacaccuucgccaccgccaacgccgacacccucugcaucggcuaccacgccaacaacuccaccgacaccgucgacaccguccucgagaagaacgucaccgucacccacuccgucaaccuccucgaggacaagcacaacggcaagcucugcaagcuccgcggcgucgccccccuccaccucggcaagugcaacaucgccggcuggauccucggcaaccccgagugcgagucccucuccaccgccuccuccugguccuacaucgucgagaccuccuccuccgacaacggcaccugcuaccccggcgacuucaucaacuacgaggagcuccgcgagcagcucuccuccgucuccuccuucgagcgcuucgagaucuuccccaagaccuccuccuggcccaaccacgacuccaacaagggcgucaccgccgccugcccccacgccggcgccaaguccuucuacaagaaccucaucuggcucgucaagaagggcaacuccuaccccaagcucucccaguccuacaucaacgacaagggcaaggagguccucguccucuggggcauccaccaccccuccaccaccaccgaccagcagucccucuaccagaacgccgacgccuacgucuucgucggcaccucccgcuacuccaagaaguucaagcccgagaucgccauccgccccaagguccgcgaccaggagggccgcaugaacuacuacuggacccucgucgagcccggcgacaagaucaccuucgaggccaccggcaaccucgucgucccccgcuacgccuucaccauggagcgcaacgccggcuccggcaucaucaucuccgacacccccguccacgacugcaacaccaccugccagacccccgagggcgccaucaacaccucccuccccuuccagaacauccaccccaucaccaucggcaagugccccaaguacgucaaguccaccaagcuccgccucgccaccggccuccgcaacguccccuccauccagucccgcggccucuucggcgccaucgccggcuucaucgagggcggcuggaccggcauggucgacggcugguacggcuaccaccaccagaacgagcagggcuccggcuacgccgccgaccucaaguccacccagaacgccaucgacaagaucaccaacaaggucaacuccgucaucgagaagaugaacacccaguucaccgccgucggcaaggaguucaaccaccucgagaagcgcaucgagaaccucaacaagaaggucgacgacggcuuccucgacaucuggaccuacaacgccgagcuccucguccuccucgagaacgagcgcacccucgacuaccacgacuccaacgucaagaaccucuacgagaagguccgcaaccagcucaagaacaacgccaaggagaucggcaacggcugcuucgaguucuaccacaagugcgacaacaccugcauggaguccgucaagaacggcaccuacgacuaccccaaguacuccgaggaggccaagcucaaccgcgagaagaucgacggcgucaagcucgaguccacccgcaucuaccagauccucgccaucuacuccaccgucgccuccucccucguccucgucgucucccucggcgccaucuccuucuggaugugcuccaacggcucccuccagugccgcaucugcaucuga

SEQ ID NO: 108092 - RNA, 1701 nt, Artificial Sequence
  derived and/or modified CDS sequence (opt2) from hemagglutinin__InfluenzaA__AHV83947
augaaggccauccucgucguccuccucuacaccuucgccaccgccaacgccgacacccucugcaucggcuaccacgccaacaacuccaccgacaccgucgacaccguccucgagaagaacgucaccgucacccacuccgucaaccuccucgaggacaagcacaacggcaagcucugcaagcuccgcggcgucgccccccuccaccucggcaagugcaacaucgccggcuggauccucggcaaccccgagugcgagucccucuccaccgccuccuccugguccuacaucgucgagaccuccuccuccgacaacggcaccugcuaccccggcgacuucaucaacuacgaggagcuccgcgagcagcucuccuccgucuccuccuucgagcgcuucgagaucuuccccaagaccuccuccuggcccaaccacgacuccaacaagggcgucaccgccgccugcccccacgccggcgccaaguccuucuacaagaaccucaucuggcucgucaagaagggcaacuccuaccccaagcucucccaguccuacaucaacgacaagggcaaggagguccucguccucuggggcauccaccaccccuccaccaccgccgaccagcagucccucuaccagaacgccgacgccuacgucuucgucggcaccucccgcuacuccaagaaguucaagcccgagaucgccauccgccccaagguccgcgaccaggagggccgcaugaacuacuacuggacccucgucgagcccggcgacaagaucaccuucgaggccaccggcaaccucgucgucccccgcuacgccuucaccgucaagcgcaacgccggcuccggcaucaucaucuccgacacccccguccacgacugcaacaccaccugccagacccccgagggcgccaucaacaccucccuccccuuccagaacauccaccccaucaccaucggcaagugccccaaguacgucaaguccaccaagcuccgccucgccaccggccuccgcaacguccccuccauccagucccgcggccucuucggcgccaucgccggcuucaucgagggcggcuggaccggcauggucgacggcugguacggcuaccaccaccagaacgagcagggcuccggcuacgccgccgaccagaaguccacccagaacgccaucgacaagaucaccaacaaggucaacuccgucaucgagaagaugaacacccaguucaccgccgucggcaaggaguucaaccaccucgagaagcgcaucgagaaccucaacaagaaggucgacgacggcuuccucgacaucuggaccuacaacgccgagcuccucguccuccucgagaacgagcgcacccucgacuaccacgacuccaacgucaagaaccucuacgagaagguccgcaaccagcucaagaacaacgccaaggagaucggcaacggcugcuucgaguucuaccacaagugcgacaacaccugcauggaguccgucaagaacggcaccuacgacuaccccaaguacuccgaggaggccaagcucaaccgcgagaagaucgacggcgucaagcucgaguccacccgcaucuaccagauccucgccaucuacuccaccgucgccuccucccucguccucgucgucucccucggcgccaucuccuucuggaugugcuccaacggcucccuccagugccgcaucugcaucuga

SEQ ID NO: 108093 - RNA, 1701 nt, Artificial Sequence; identical to SEQ ID NO: 106076
  derived and/or modified CDS sequence (opt2) from hemagglutinin__InfluenzaA__AHV83948

SEQ ID NO: 108094 - RNA, 1701 nt, Artificial Sequence; identical to SEQ ID NO: 106076
  derived and/or modified CDS sequence (opt2) from hemagglutinin__InfluenzaA__AHV83949

SEQ ID NO: 108095 - RNA, 1701 nt, Artificial Sequence; identical to SEQ ID NO: 106076
  derived and/or modified CDS sequence (opt2) from hemagglutinin__InfluenzaA__AHV83950

SEQ ID NO: 108096 - RNA, 1701 nt, Artificial Sequence
  derived and/or modified CDS sequence (opt2) from hemagglutinin__InfluenzaA__AHV83953
augaagaccaucaucgcccucuccuacauccucugccucgucuucgcccagaagcuccccggcaacgacaacuccaccgccacccucugccucggccaccacgccguccccaacggcaccaucgucaagaccaucaccaacgaccgcaucgaggucaccaacgccaccgagcucguccagaacuccuccaucggcgagaucugcgacuccccccaccagauccucgacggcgagaacugcacccucaucgacgcccuccucggcgacccccagugcgacggcuuccagaacaagaagugggaccucuucgucgagcgcuccaaggccuacuccaacugcuaccccuacgacguccccgacuacgccucccuccgcucccucgucgccuccuccggcacccucgaguucaacaacgaguccuucaacugggccggcgucacccagaacggcaccuccuccgccugcauccgcggcuccaacuccuccuucuucucccgccucaacuggcucacccaccucaacuucaaguaccccgcccucaacgucaccaugcccaacaacgagcaguucgacaagcucuacaucuggggcguccaccaccccggcaccgacaaggaccagaucuuccucuacgcccaguccuccggccgcaucaccgucuccaccaagcgcucccagcaggccgucauccccaacaucggcucccgcccccgcauccgcaacauccccucccgcaucuccaucuacuggaccaucgucaagcccggcgacauccuccucaucaacuccaccggcaaccucaucgccccccgcggcuacuucaagauccgcuccggcaaguccuccaucaugcgcuccgacgcccccaucggcaagugcaaguccgagugcaucacccccaacggcuccauccccaacgacaagcccuuccagaacgucaaccgcaucaccuacggcgccugcccccgcuacgucaagcaguccacccucaagcucgccaccggcaugcgcaacguccccgagaagcagacccgcggcaucuucggcgccaucgccggcuucaucgagaacggcugggagggcaugauggacggcugguacggcuuccgccaccagaacuccgagggccgcggccaggccgccgaccucaaguccacccaggccgccaucgaccagaucaacggcaagcucaaccgccucaucggcaagaccaacgagaaguuccaccagaucgagaaggaguucuccgaggucgagggccgcauccaggaccucgagaaguacgucgaggacaccaagaucgaccucugguccuacaacgccgagcuccucgucgcccucgagaaccagcacaccaucgaccucaccgacuccgagaugaacaagcucuucgagaagaccaagaagcagcuccgcgagaacgccgaggaccucggcaacggcugcuucaagaucuaccacaagugcgacaacgccugcaucggcuccauccgcaacggcaccuacgaccacgacgucuaccgcgacgaggcccucaacaaccgcuuccagaucaagggcgucgagcucaaguccggcuacaaggacuggauccucuggaucuccuucgccaucuccugcuuccuccucugcgucgcccuccucggcuucaucaugugggccugccagaagggcaacauccgcugcaacaucugcaucuga

SEQ ID NO: 108097 - RNA, 1701 nt, Artificial Sequence; identical to SEQ ID NO: 107928
  derived and/or modified CDS sequence (opt2) from hemagglutinin__InfluenzaA__AHV83954

SEQ ID NO: 108098 - RNA, 1701 nt, Artificial Sequence
  derived and/or modified CDS sequence (opt2) from hemagglutinin__InfluenzaA__AHV83956
augaagaccaucaucgcccucuccuacauccucugccucgucuucgcccagaagcuccccggcaacgacaacuccaccgccacccucugccucggccaccacgccguccccaacggcaccaucgucaagaccaucaccaacgaccgcaucgaggucaccaacgccaccgagcucguccagaacuccuccaucggcgagaucugcgacuccccccaccagauccucgacggcgagaacugcacccucaucgacgcccuccucggcgacccccagugcgacggcuuccagaacaagaagugggaccucuucgucgagcgcuccaaggccuacuccaacugcuaccccuacgacguccccgacuacgccucccuccgcucccucgucgccuccuccggcacccucgaguucaacaacgagaacuucaacugggccggcgucacccagaacggcaccuccuccgccugcauccgcggcuccaacuccuccuucuucucccgccucaacuggcucacccaccucaacuucaaguaccccgcccucaacgucaccaugcccaacaacgagcaguucgacaagcucuacaucuggggcguccaccaccccggcaccgacaaggaccagaucuuccucuacgcccaguccuccggccgcaucaccgucuccaccaagcgcucccagcaggccgucauccccaacaucggcucccgcccccgcauccgcaacauccccucccgcaucuccaucuacuggaccaucgucaagcccggcgacauccuccucaucaacuccaccggcaaccucaucgccccccgcggcuacuucaagauccgcuccggcaaguccuccaucaugcgcuccgacgcccccaucggcaagugcaaguccgagugcaucacccccaacggcuccauccccaacgacaagcccuuccagaacgucaaccgcaucaccuacggcgccugcccccgcuacgucaagcaguccacccucaagcucgccaccggcaugcgcaacguccaggagaagcagacccgcggcaucuucggcgccaucgccggcuucaucgagaacggcugggagggcaugaaggacggcugguacggcuuccgccaccagaacuccgagggccgcggccaggccgccgaccucaaguccacccaggccgccaucgaccagaucaacggcaagcucaaccgccucaucggcaagaccaacgagaaguuccaccagaucgagaaggaguucuccgaggucgagggccgcauccaggaccucgagaaguacgucgaggacaccaagaucgaccucugguccuacaacgccgagcuccucgucgcccucgagaaccagcacaccaucgaccucaccgacuccgagaugaacaagcucuucgagaagaccaagaagcagcuccgcgagaacgccgaggacaugggcaacggcugcuucaagaucuaccacaagugcgacaacgccugcaucggcuccauccgcaacggcaccuacgaccacgacgucuaccgcgacgaggcccucaacaaccgcuuccagaucaagggcgucgagcucaaguccggcuacaaggacuggauccucuggaucuccuucgccaucuccugcuuccuccucugcgucgcccuccucggcuucaucaugugggccugccagaagggcaacauccgcugcaacaucugcaucuga

SEQ ID NO: 108099 - RNA, 1701 nt, Artificial Sequence
  derived and/or modified CDS sequence (opt2) from hemagglutinin__InfluenzaA__AHZ13523
augaagaccaucaucgcccucuccuacaucuucugccucgucuucgcccagaagcuccccggcaacgacaacuccaccgccacccucugccucggccaccacgccguccccaacggcacccucgucaagaccaucaccaacgaccagaucgaggucaccaacgccaccgagcucguccaguccuccuccaccggccgcaucugcgacuccccccaccgcauccucgacggcaagaacugcacccucaucgacgcccuccucggcgacccccacugcgacggcuuccagaacgagaagugggaccucuucgucgagcgcuccaaggccuucuccaacugcuaccccuacgacguccccgacuacgccucccuccgcucccucgucgccuccuccggcacccucgaguucaucaacgagggcuucaacuggaccggcgucacccaguccggcggcuccuacgccugcaagcgcggcuccgucaacuccuucuucucccgccucaacuggcucuacaaguccgaguccaaguaccccguccucaacgucaccaugcccaacaacggcaaguucgacaagcucuacaucuggggcguccaccaccccuccaccgacaaggagcagaccaaccucuacguccgcgccuccggccgcgucaccgucuccaccaagcgcucccagcagaccgucauccccaacaucggcucccgccccuggguccgcggccucuccucccgcaucuccaucuacuggaccaucgucaagcccggcgacauccuccucaucaacuccaccggcaaccucaucgccccccgcggcuacuucaagauccgcaccggcaaguccuccaucaugcgcuccgacgcccccaucggcaccugcuccuacgagugcaucacccccaacggcuccauccccaacgacaagcccuuccagaacgucaacaagaucaccuacggcgccugcccccgcuacgucaagcagaacacccucaagcucgccaccggcaugcgcaacguccccgagaagcagacccgcggcaucuucggcgccaucgccggcuucaucgagaacggcugggagggcauggucgacggcugguacggcuuccgccaccagaacuccgagggcaccggccaggccgccgaccucaaguccacccaggccgccaucgaccagaucaacggcaagcucaaccgccucaucgagaagaccaacgagaaguuccaccagaucgagaaggaguucuccgaggucgagggccgcauccaggaccucgagaaguacgucgaggacaccaagaucgaccucugguccuacaacgccgagcuccucgucgcccucgagaaccagcacaccaucgaccucaccgacuccgagaugaacaagcucuucgagaagacccgcaagcagcuccgcgagaacgccgaggacaugggcaacggcugcuucaagaucuaccacaagugcgacaacgccugcaucggcuccauccgcaacggcaccuacaaccacgacgucuaccgcgacgaggcccucaacaaccgcuuccagaucaagggcgucgagcucaaguccggcuacaaggacuggauccucuggaucuccuucgccaucuccugcuuccuccucugcgucguccuccucggcuucaucaugugggccugccagaagggcaacauccgcugcaacaucugcaucuga

SEQ ID NO: 108100 - RNA, 1698 nt, Artificial Sequence; identical to SEQ ID NO: 99652
  derived and/or modified CDS sequence (opt2) from hemagglutinin__InfluenzaA__AHZ13582

SEQ ID NO: 108101 - RNA, 1701 nt, Artificial Sequence
  derived and/or modified CDS sequence (opt2) from hemagglutinin__InfluenzaA__AHZ35584
augaagaccaucaucgcccucuccuacauccucugccucaucuucgcccaggagauccccggcaacgacaacuccaccgccacccucugccucggccaccacgccguccccaacggcaccaucgucaagaccaucaccaacgaccagaucgaggucaccaacgccaccgagcucguccaguccuccuccaccggcgagaucugcaacuccccccaccagauccucgacggcgagaacugcacccucaucgacgcccuccucggcgacccccagugcgacgacuuccagaacaagaagugggaccucuucgucgagcgcuccaaggcccacuccaacugcuaccccuacgacguccccgacuacgccucccuccgcucccucgucgccuccuccggcacccucgaguucaacaacgaguccuucaacuggaccggcgucacccagaacggcaccuccuccgccugcauccgccgcuccaacaacuccuucuucucccgccucaacuggcucacccaccucaacuucaaguaccccgcccucaacgucaccaugcccaacaacgagcaguucgacaagcucuacaucuggggcguccaccaccccggcaccgacaaggaccagaucuuccucuacgcccaggccuccggccgcaucaccgucuccaccaagcgcucccagcaggccgucauccccaacaucggcucccgcccccgcguccgcaacauccccucccgcgucuccaucuacuggaccaucgucaagcccggcgacauccuccucaucaacuccaccggcaaccucaucgccccccgcggcuacuucaagauccgcuccggcaaguccuccaucaugcgcuccgacgcccccaucggcaagugcaacuccgccugcaucacccccaacggcuccauccccaacgacaagcccuuccagaacgucaaccgcaucaccuacggcgccugcccccgcuacgucaagcagaacacccucaagcucgccaccggcaugcgcaacguccccgagaagcagacccgcggcaucuucggcgccaucgccggcuucaucgagaacggcugggagggcauggucgacggcugguacggcuuccgccaccagaacuccgagggccgcggccaggccgccgaccucaaguccacccaggccgccaucgaccagaucaacggcaagcucaaccgccucaucggcaagaccaacgagaaguuccaccagaucgagaaggaguucuccgaggucgagggccgcauccaggaccucgagaaguacgucgaggacaccaagaucgaccucugguccuacaacgccgagcuccucgucgcccucgagaaccagcacaccaucgaccucaccgacuccgagaugaacaagcucuucgagaagaccaagaagcagcuccgcgagaacgccgaggacaugggcaacggcugcuucaagaucuaccacaagugcgacaacgccugcaucggcuccauccgcaacggcaccuacgaccacgacgucuaccgcgacgaggcccucaacaaccgcuuccagaucaagggcgucgagcucaaguccggcuacaaggacuggauccucuggaucuccuucgccaucuccugcuuccuccucugcgucgcccuccucggcuucaucaugugggccugccagaagggcaacauccgcugcaacaucugcaucuga

SEQ ID NO: 108102 - RNA, 1701 nt, Artificial Sequence
  derived and/or modified CDS sequence (opt2) from hemagglutinin__InfluenzaA__AHZ35608
augaagaccaucaucgcccucuccuacauccucugccucaucuucgcccaggagauccccggcaacgacaacuccaccgccacccucugccucggccaccacgccguccccaacggcaccaucgucaagaccaucaccaacgaccagaucgaggucaccaacgccaccgagcucguccaguccuccuccaccggcgagaucugcaacuccccccaccagauccucgacggcgagaacugcacccucaucgacgcccuccucggcgacccccagugcgacgacuuccagaacaaggagugggaccucuucgucgagcgcuccaaggcccacuccaacugcuaccccuacgacguccccgacuacgccucccuccgcucccucgucgccuccuccggcacccucgaguucaacaacgaguccuucaacuggaccggcgucacccagaacggcaccuccuccgccugcauccgccgcuccaacaacuccuucuucucccgccucaacuggcucacccaccucaacuucaaguaccccgcccucaacgucaccaugcccaacaacgagcaguucgacaagcucuacaucuggggcguccaccaccccggcaccgacaaggaccagaucuuccucuacgcccaggccuccggccgcaucaccgucuccaccaagcgcucccagcaggccgucauccccaacaucggcucccgcccccgcguccgcaacauccccucccgcgucuccaucuacuggaccaucgucaagcccggcgacauccuccucaucaacuccaccggcaaccucaucgccccccgcggcuacuucaagauccgcuccggcaaguccuccaucaugcgcuccgacgcccccaucggcaagugcaacuccgccugcaucacccccaacggcuccauccccaacgacaagcccuuccagaacgucaaccgcaucaccuacggcaccugcccccgcuacgucaagcagaacacccucaagcucgccaccggcaugcgcaacguccccgagaagcagacccgcggcaucuucggcgccaucgccggcuucaucgagaacggcugggagggcauggucgacggcugguacggcuuccgccaccagaacuccgagggccgcggccaggccgccgaccucaaguccacccaggccgccaucgaccagaucaacggcaagcucaaccgccucaucggcaagaccaacgagaaguuccaccagaucgagaaggaguucuccgaggucgagggccgcauccaggaccucgagaaguacgucgaggacaccaagaucgaccucugguccuacaacgccgagcuccucgucgcccucgagaaccagcacaccaucgaccucaccgacuccgagaugaacaagcucuucgagaagaccaagaagcagcuccgcgagaacgccgaggacaugggcaacggcugcuucaagaucuaccacaagugcgacaacgccugcaucggcuccauccgcaacggcaccuacgaccacgacgucuaccgcgacgaggcccucaacaaccgcuuccagaucaagggcgucgagcucaaguccggcuacaaggacuggauccucuggaucuccuucgccaucuccugcuuccuccucugcgucgcccuccucggcuucaucaugugggccugccagaagggcaacauccgcugcaacaucugcaucuga

SEQ ID NO: 108103 - RNA, 1701 nt, Artificial Sequence; identical to SEQ ID NO: 108101
  derived and/or modified CDS sequence (opt2) from hemagglutinin__InfluenzaA__AHZ35620

SEQ ID NO: 108104 - RNA, 1701 nt, Artificial Sequence; identical to SEQ ID NO: 108101
  derived and/or modified CDS sequence (opt2) from hemagglutinin__InfluenzaA__AHZ35632

SEQ ID NO: 108105 - RNA, 1701 nt, Artificial Sequence; identical to SEQ ID NO: 108101
  derived and/or modified CDS sequence (opt2) from hemagglutinin__InfluenzaA__AHZ35644

SEQ ID NO: 108106 - RNA, 1701 nt, Artificial Sequence; identical to SEQ ID NO: 108101
  derived and/or modified CDS sequence (opt2) from hemagglutinin__InfluenzaA__AHZ35656

SEQ ID NO: 108107 - RNA, 1701 nt, Artificial Sequence; identical to SEQ ID NO: 108101
  derived and/or modified CDS sequence (opt2) from hemagglutinin__InfluenzaA__AHZ35668

SEQ ID NO: 108108 - RNA, 1701 nt, Artificial Sequence; identical to SEQ ID NO: 108102
  derived and/or modified CDS sequence (opt2) from hemagglutinin__InfluenzaA__AHZ35680

SEQ ID NO: 108109 - RNA, 1701 nt, Artificial Sequence; identical to SEQ ID NO: 108101
  derived and/or modified CDS sequence (opt2) from hemagglutinin__InfluenzaA__AHZ35692

SEQ ID NO: 108110 - RNA, 1701 nt, Artificial Sequence; identical to SEQ ID NO: 108101
  derived and/or modified CDS sequence (opt2) from hemagglutinin__InfluenzaA__AHZ35716

SEQ ID NO: 108111 - RNA, 1701 nt, Artificial Sequence; identical to SEQ ID NO: 108102
  derived and/or modified CDS sequence (opt2) from hemagglutinin__InfluenzaA__AHZ35728

SEQ ID NO: 108112 - RNA, 1701 nt, Artificial Sequence; identical to SEQ ID NO: 108101
  derived and/or modified CDS sequence (opt2) from hemagglutinin__InfluenzaA__AHZ35740

SEQ ID NO: 108113 - RNA, 1701 nt, Artificial Sequence; identical to SEQ ID NO: 108101
  derived and/or modified CDS sequence (opt2) from hemagglutinin__InfluenzaA__AHZ35752

SEQ ID NO: 108114 - RNA, 1701 nt, Artificial Sequence; identical to SEQ ID NO: 108101
  derived and/or modified CDS sequence (opt2) from hemagglutinin__InfluenzaA__AHZ35764

SEQ ID NO: 108115 - RNA, 1701 nt, Artificial Sequence; identical to SEQ ID NO: 108101
  derived and/or modified CDS sequence (opt2) from hemagglutinin__InfluenzaA__AHZ35776

SEQ ID NO: 108116 - RNA, 1701 nt, Artificial Sequence
  derived and/or modified CDS sequence (opt2) from hemagglutinin__InfluenzaA__AHZ35823
augaaggccauccucgucguccuccucuacaccuucgccaucgccaacgccgacacccucugcaucggcuaccacgccaacaacuccaccgacaccgucgacaccguccucgagaagaacgucaccgucacccacuccgucaaccuccucgaggacaagcacaacggcaagcucugcaagcuccgcggcgucgccccccuccaccucggcaagugcaacaucgccggcuggauccucggcaaccccgagugcgagucccucuccaccgccuccuccugguccuacaucgucgagaccuccuccuccgacaacggcaccugcuaccccggcgacuucaucaacuacgaggagcuccgcgagcagcucuccuccgucuccuccuucgagcgcuucgagauguuccccaagaccuccuccuggcccaaccacgacuccaacaagggcgucaccgccgccugcccccacgccggcgccaaguccuucuacaagaaccucaucuggcucgucaagaagggcaacuccuaccccaagcucuccaaguccuacaucaacgacaagggcaaggagguccucguccucuggggcauccaccaccccuccaccaccgccgaccagcagucccucuaccagaacgccgacgccuacgucuucgucggcaccucccgcuacuccaagaaguucaagcccgagaucgccauccgccccaagguccgcgaccaggagggccgcaugaacuacuacuggacccucgucgagcccggcgacaagaucaccuucgaggccaccggcaaccucgucgucccccgcuacgccuucgccauggagcgcaacgccggcuccggcaucaucaucuccgacacccccguccacgacugcaacaccaccugccagacccccaagggcgccaucaacaccucccuccccuuccagaacauccaccccaucaccaucggcaagugccccaaguacgucaaguccaccaagcuccgccucgccaccggccuccgcaacguccccuccauccagucccgcggccucuucggcgccaucgccggcuucaucgagggcggcuggaccggcauggucgacggcugguacggcuaccaccaccagaacgagcagggcuccggcuacgccgccgaccucaaguccacccagaacgccaucgacaagaucaccaacaaggucaacuccgucaucgagaagaugaacacccaguucaccgccgucggcaaggaguucaaccaccucgagaagcgcaucgagaaccucaacaagaaggucgacgacggcuuccucgacaucuggaccuacaacgccgagcuccucguccuccucgagaacgagcgcacccucgacuaccacgacuccaacgucaagaaccucuacgagaagguccgcaaccagcucaagaacaacgccaaggagaucggcaacggcugcuucgaguucuaccacaagugcgacaacaccugcauggaguccgucaagaacggcaccuacgacuaccccaaguacuccgaggaggccaagcucaaccgcgaggagaucgacggcgucaagcucgaguccacccgcaucuaccagauccucgccaucuacuccaccgucgccuccucccucguccucgucgucucccucggcgccaucuccuucuggaugugcuccaacggcucccuccagugccgcaucugcaucuga

SEQ ID NO: 108117 - RNA, 1701 nt, Artificial Sequence; identical to SEQ ID NO: 108116
  derived and/or modified CDS sequence (opt2) from hemagglutinin__InfluenzaA__AHZ35834

SEQ ID NO: 108118 - RNA, 1701 nt, Artificial Sequence; identical to SEQ ID NO: 108116
  derived and/or modified CDS sequence (opt2) from hemagglutinin__InfluenzaA__AHZ35845

SEQ ID NO: 108119 - RNA, 1701 nt, Artificial Sequence; identical to SEQ ID NO: 108116
  derived and/or modified CDS sequence (opt2) from hemagglutinin__InfluenzaA__AHZ35856

SEQ ID NO: 108120 - RNA, 1701 nt, Artificial Sequence
  derived and/or modified CDS sequence (opt2) from hemagglutinin__InfluenzaA__AHZ35867
augaagaccaacaucgcccucuccuacauccucugccucgucuccgcccagaagcuccccggcaacgacaacuccaccgccacccucugccucggccaccacgccguccccaacggcaccaucgucaagaccaucaccaacgaccagaucgaggucaccaacgccaccgagcucguccaguccuccuccaccggcgagaucugcaacuccccccaccagauccucgacggcgagaacugcacccucaucgacgcccuccucggcgacccccagugcgacggcuuccagaacaagaagugggaccucuucgucgagcgcuccaaggcccacuccaacugcuaccccuacgacguccccgacuacgccucccuccgcucccucgucgccuccuccggcacccucgaguucaacaacgaguccuucaacuggaccggcgucacccagaacggcaccuccuccgccugcauccgccgcuccaacaacuccuucuucucccgccucaacuggcucacccaccucaacuucaaguaccccgcccucaacgucaccaugcccaacaacgagcaguucgacaagcucuacaucuggggcguccaccaccccggcaccgacaaggaccagaucuuccucuacgcccaggccgccggccgcaucaccgucuccaccaagcgcucccagcaggccgucauccccaacaucggcucccgcccccgcguccgcaacauccccucccgcgucuccaucuacuggaccaucgucaagcccggcgacauccuccucaucaacuccaccggcaaccucaucgccccccgcggcuacuucaagauccgcuccggcaaguccuccaucaugcgcuccgacgcccccaucggcaagugcaacuccgccugcaucacccccaacggcuccauccccaacgacaagcccuuccagaacgucaaccgcaucaccuacggcgccugcccccgcuacgucaagcagaacacccucaagcucgccaccggcaugcgcaacguccccgagaagcagacccgcggcaucuucggcgccaucgccggcuucaucgagaacggcugggagggcauggucgacggcugguacggcuuccgccaccagaacuccgagggccgcggccaggccgccgaccucaaguccacccaggccgccaucgaccagaucaacggcaagcucaaccgccucaucggcaagaccaacgagaaguuccaccagaucgagaaggaguucuccgaggucgagggccgcauccaggaccucgagaaguacgucgaggacaccaagaucgaccucugguccuacaacgccgagcuccucgucguccucgagaaccagcacaccaucgaccucaccgacuccgagaugaacaagcucuucgagaagaccaagaagcagcuccgcgagaacgccgaggacaugggcaacggcugcuucaagaucuaccacaagugcgacaacgccugcaucggcuccauccgcaacggcaccuacgaccacgacgucuaccgcgacgaggcccucaacaaccgcuuccagaucaagggcgucgagcucaaguccggcuacaaggacuggauccucuggaucuccuucgccaucuccugcuuccuccucugcgucgcccuccucggcuucaucaugugggccugccagaagggcaacauccgcugcaacaucugcaucuga

SEQ ID NO: 108121 - RNA, 1701 nt, Artificial Sequence
  derived and/or modified CDS sequence (opt2) from hemagglutinin__InfluenzaA__AHZ35879
augaagaccaacaucgcccucuccuacauccucugccucgucuccgcccagaagcuccccggcaacgacaacuccaccgccacccucugccucggccaccacgccguccccaacggcaccaucgucaagaccaucaccaacgaccagaucgaggucaccaacgccaccgagcucguccaguccuccuccaccggcgagaucugcaacuccccccaccagauccucgacggcgagaacugcacccucaucgacgcccuccucggcgacccccagugcgacggcuuccagaacaagaagugggaccucuucgucgagcgcuccaaggcccacuccaacugcuaccccuacgacguccccgacuacgccucccuccgcucccucgucgccuccuccggcacccucgaguucaacaacgaguccuucaacuggaccggcgucacccagaacggcaccuccuccgccugcauccgccgcuccaacaacuccuucuucucccgccucaacuggcucacccaccucaacuucaaguaccccgcccucaacgucaccaugcccaacaacgagcaguucgacaagcucuacaucuggggcguccaccaccccggcaccgacaaggaccagaucuuccucuacgcccaggccgccggccgcaucaccgucuccaccaagcgcucccagcaggccgucauccccaacaucggcucccgcccccgcguccgcaacauccccucccgcgucuccaucuacuggaccaucgucaagcccggcgacauccuccucaucaacuccaccggcaaccucaucgccccccgcggcuacuucaagauccgcuccggcaaguccuccaucaugcgcuccgacgcccccaucggcaagugcaacuccgccugcaucacccccaacggcuccauccccaacgacaagcccuuccagaacgucaaccgcaucaccuacggcgccugcccccgcuacgucaagcagaacacccucaagcucgccaccggcaugcgcaacguccccgagaagcagacccgcggcaucuucggcgccaucgccggcuucaucgagaacggcugggagggcauggucgacggcugguacggcuuccgccaccagaacuccgagggccgcggccaggccgccgaccucaaguccacccaggccgccaucgaccagaucaacggcaagcucaaccgccucaucggcaagaccaacgagaaguuccaccagaucgagaaggaguucuccgaggucgagggccgcauccaggaccucgagaaguacgucgaggacaccaagaucgaccucugguccuacaacgccgagcuccucgucgcccucgagaaccagcacaccaucgaccucaccgacuccgagaugaacaagcucuucgagaagaccaagaagcagcuccgcgagaacgccgaggacaugggcaacggcugcuucaagaucuaccacaagugcgacaacgccugcaucggcuccauccgcaacggcaccuacgaccacgacgucuaccgcgacgaggcccucaacaaccgcuuccagaucaagggcgucgagcucaaguccggcuacaaggacuggauccucuggaucuccuucgccaucuccugcuuccuccucugcgucgcccuccucggcuucaucaugugggccugccagaagggcaacauccgcugcaacaucugcaucuga

SEQ ID NO: 108122 - RNA, 1701 nt, Artificial Sequence; identical to SEQ ID NO: 108116
  derived and/or modified CDS sequence (opt2) from hemagglutinin__InfluenzaA__AHZ35891

SEQ ID NO: 108123 - RNA, 1701 nt, Artificial Sequence; identical to SEQ ID NO: 108116
  derived and/or modified CDS sequence (opt2) from hemagglutinin__InfluenzaA__AHZ35902

SEQ ID NO: 108124 - RNA, 1710 nt, Artificial Sequence
  derived and/or modified CDS sequence (opt2) from hemagglutinin__InfluenzaA__AHZ35913
augaaggccauccucgucguccuccucuacaccuucgccaucgccaacgccgacacccucugcaucggcuaccacgccaacaacuccaccgacaccgucgacaccguccucgagaagaacgucaccgucacccacuccgucaaccuccucgaggacaagcacaacggcaagcucugcaagcuccgcggcgucgccccccuccaccucggcaagugcaacaucgccggcuggauccucggcaaccccgagugcgagucccucuccaccgccuccuccugguccuacaucgucgagaccuccuccuccgacaacggcaccugcuaccccggcgacuucaucaacuacgaggagcuccgcgagcagcucuccuccgucuccuccuucgagcgcuucgagauguuccccaagaccuccuccuggcccaaccacgacuccaacaagggcgucaccgccgccugcccccacgccggcgccaaguccuucuacaagaaccucaucuggcucgucaagaagggcaacuccuaccccaagcucuccaaguccuacaucaacgacaagggcaaggagguccucguccucuggggcauccaccaccccuccaccaccgccgaccagcagucccucuaccagaacgccgacgccuacgucuucgucggcaccucccgcuacuccaagaaguucaagcccgagaucgccauccgccccaagguccgcgaccaggagggccgcaugaacuacuacuggacccucgucgagcccggcgacaagaucaccuucgaggccaccggcaaccucgucgucccccgcuacgccuucgccauggagcgcaacgccggcuccggcaucaucaucuccgacacccccguccacgacugcaacaccaccugccagacccccaagggcgccaucaacaccucccucaccucccuccccuuccagaacauccaccccaucaccaucggcaagugccccaaguacgucaaguccaccaagcuccgccucgccaccggccuccgcaacguccccuccauccagucccgcggccucuucggcgccaucgccggcuucaucgagggcggcuggaccggcauggucgacggcugguacggcuaccaccaccagaacgagcagggcuccggcuacgccgccgaccucaaguccacccagaacgccaucgacaagaucaccaacaaggucaacuccgucaucgagaagaugaacacccaguucaccgccgucggcaaggaguucaaccaccucgagaagcgcaucgagaaccucaacaagaaggucgacgacggcuuccucgacaucuggaccuacaacgccgagcuccucguccuccucgagaacgagcgcacccucgacuaccacgacuccaacgucaagaaccucuacgagcgcguccgcaaccagcucaagaacaacgccaaggagaucggcaacggcugcuucgaguucuaccacaagugcgacaacaccugcauggaguccgucaagaacggcaccuacgacuaccccaaguacuccgaggaggccaagcucaaccgcgaggagaucgacggcgucaagcucgaguccacccgcaucuaccagauccucgccaucuacuccaccgucgccuccucccucguccucgucgucucccucggcgccaucuccuucuggaugugcuccaacggcucccuccagugccgcaucugcaucuga

SEQ ID NO: 108125 - RNA, 1701 nt, Artificial Sequence
  derived and/or modified CDS sequence (opt2) from hemagglutinin__InfluenzaA__AHZ35924
augaaggccauccucgucguccuccucuacaccuucgccaccgccaacgccgacacccucugcaucggcuaccacgccaacaacuccaccgacaccgucgacaccguccucgagaagaacgucaccgucacccacuccgucaaccuccucgaggacaagcacaacggcaagcucugcaagcuccgcggcgucgccccccuccaccucggcaagugcaacaucgccggcuggauccucggcaaccccgagugcgagucccucuccaccgccuccuccugguccuacaucgucgagaccuccuccuccgacaacggcaccugcuaccccggcgacuucaucaacuacgaggagcuccgcgagcagcucuccuccgucuccuccuucgagcgcuucgagaucuuccccaagaccuccuccuggcccaaccacgacuccaacaagggcgucaccgccgccugcccccaggccggcgccaaguccuucuacaagaaccucaucuggcucgucaagaagggcaacuccuaccccaagcucuccaaguccuacaucaacgacaagggcaaggagguccucguccucuggggcauccaccaccccuccaccuccgccgaccagcagucccucuaccagaacgccgacgccuacgucuucgucggcaccuccaaguacuccaagaaguucaagcccgagaucgccguccgccccaagguccgcgaccaggagggccgcaugaacuacuacuggacccucgucgagcccggcgacaagaucaccuucgaggccaccggcaaccuccucgucccccgcuacgccuucgccauggagcgcaacgccggcuccggcaucaucaucuccgacacccccguccacgacugcaacaccaccugccagacccccaagggcgccaucaacaccucccuccccuuccagaacauccaccccaucaccaucggcaagugccccaaguacgucaaguccaccaagcuccgccucgccaccggccuccgcaacguccccuccacccagucccgcggccucuucggcgccaucgccggcuucaucgagggcggcuggaccggcauggucgacggcugguacggcuaccaccaccagaacgcccagggcuccggcuacgccgccgaccucaaguccacccagaacgccaucgacaagaucaccaacaaggucaacuccgucaucgagaagaugaacacccaguucaccgccgucggcaaggaguucaaccaccucgagaagcgcaucgagaaccucaacaagaaggucgacgacggcuuccucgacaucuggaccuacaacgccgagcuccucguccuccucgagaacgagcgcacccucgacuaccacgacuccaacgucaagaaccucuacgagaagguccgcucccagcucaagaacaacgccaaggagaucggcaacggcugcuucgaguucuaccacaagugcgacaacaccugcauggaguccgucaagaacggcaccuacgacuaccccaaguacuccgaggaggccaagcucaaccgcgaggagaucgacggcgucaagcucgaguccacccgcaucuaccagauccucgccaucuacuccaccgucgccuccucccucguccucgucgucucccucggcgccaucuccuucuggaugugcuccaacggcucccuccagugccgcaucugcaucuga

SEQ ID NO: 108126 - RNA, 1701 nt, Artificial Sequence
  derived and/or modified CDS sequence (opt2) from hemagglutinin__InfluenzaA__AHZ35935
augaaggccauccucgucguccuccucuacaccuucgccaucgccaacgccgacacccucugcaucggcuaccacgccaacaacuccaccgacaccgucgacaccguccucgagaagaacgucaccgucacccacuccgucaaccuccucgaggacaagcacaacggcaagcucugcaagcuccgcggcgucgccccccuccaccucggcaagugcaacaucgccggcuggauccucggcaaccccgagugcgagucccucuccaccgccuccuccugguccuacaucgucgagaccuccuccuccgacaacggcaccugcuaccccggcgacuucaucaacuacgaggagcuccgcgagcagcucuccuccgucuccuccuucgagcgcuucgagauguuccccaagaccuccuccuggcccaaccacgacuccaacaagggcgucaccgccgccugcccccacgccggcgccaaguccuucuacaagaaccucaucuggcucgucaagaagggcaacuccuaccccaagcucuccaaguccuacaucaacgacaagggcaaggagguccucguccucuggggcauccaccaccccuccaccaccgccgaccagcagucccucuaccagaacgccgacgccuacgucuucgucggcaccucccgcuacuccaagaaguucaagcccgagaucgccauccgccccaagguccgcgaccaggagggccgcaugaacuacuacuggacccucgucgagcccggcgacaagaucaccuucgaggccaccggcaaccucgucgucccccgcuacgccuucgccauggagcgcaacgccggcuccggcaucaucaucuccgacacccccguccacgacugcaacaccaccugccagacccccaagggcgccaucaacaccucccuccccuuccagaacauccaccccaucaccaucggcaagugccccaaguacgucaaguccaccaagcuccgccucgccaccggccuccgcaacauccccuccauccagucccgcggccucuucggcgccaucgccggcuucaucgagggcggcuggaccggcauggucgacggcugguacggcuaccaccaccagaacgagcagggcuccggcuacgccgccgaccucaaguccacccagaacgccaucgacaagaucaccaacaaggucaacuccgucaucgagaagaugaacacccaguucaccgccgucggcaaggaguucaaccaccucgagaagcgcaucgagaaccucaacaagaaggucgacgacggcuuccucgacaucuggaccuacaacgccgagcuccucguccuccucgagaacgagcgcacccucgacuaccacgacuccaacgucaagaaccucuacgagaagguccgcaaccagcucaagaacaacgccaaggagaucggcaacggcugcuucgaguucuaccacaagugcgacaacaccugcauggaguccgucaagaacggcaccuacgacuaccccaaguacuccgaggaggccaagcucaaccgcgaggagaucgacggcgucaagcucgaguccacccgcaucuaccagauccucgccaucuacuccaccgucgccuccucccucguccucgucgucucccucggcgccaucuccuucuggaugugcuccaacggcucccuccagugccgcaucugcaucuga

SEQ ID NO: 108127 - RNA, 1701 nt, Artificial Sequence; identical to SEQ ID NO: 108121
  derived and/or modified CDS sequence (opt2) from hemagglutinin__InfluenzaA__AHZ35946

SEQ ID NO: 108128 - RNA, 1701 nt, Artificial Sequence; identical to SEQ ID NO: 108116
  derived and/or modified CDS sequence (opt2) from hemagglutinin__InfluenzaA__AHZ35958

SEQ ID NO: 108129 - RNA, 1701 nt, Artificial Sequence; identical to SEQ ID NO: 108116
  derived and/or modified CDS sequence (opt2) from hemagglutinin__InfluenzaA__AHZ35980

SEQ ID NO: 108130 - RNA, 1701 nt, Artificial Sequence; identical to SEQ ID NO: 108116
  derived and/or modified CDS sequence (opt2) from hemagglutinin__InfluenzaA__AHZ35991

SEQ ID NO: 108131 - RNA, 1701 nt, Artificial Sequence; identical to SEQ ID NO: 108116
  derived and/or modified CDS sequence (opt2) from hemagglutinin__InfluenzaA__AHZ36002

SEQ ID NO: 108132 - RNA, 1701 nt, Artificial Sequence
  derived and/or modified CDS sequence (opt2) from hemagglutinin__InfluenzaA__AHZ36013
augaaggccauccucgucguccuccucuacaccuucgccaucgccaacgccgacacccucugcaucggcuaccacgccaacaacuccaccgacaccgucgacaccguccucgagaagaacgucaccgucacccacuccgucaaccuccucgaggacaagcacaaccgcaagcucugcaagcuccgcggcgucgccccccuccaccucggcaagugcaacaucgccggcuggauccucggcaaccccgagugcgagucccucuccaccgccuccuccugguccuacaucgucgagaccuccuccuccgacaacggcaccugcuaccccggcgacuucaucaacuacgaggagcuccgcgagcagcucuccuccgucuccuccuucgagcgcuucgagauguuccccaagaccuccuccuggcccaaccacgacuccaacaagggcgucaccgccgccugcccccacgccggcgccaaguccuucuacaagaaccucaucuggcucgucaagaagggcaacuccuaccccaagcucuccaaguccuacaucaacgacaagggcaaggagguccucguccucuggggcauccaccaccccuccaccaccgccgaccagcagucccucuaccagaacgccgacgccuacgucuucgucggcaccucccgcuacuccaagaaguucaagcccgagaucgccauccgccccaagguccgcgaccaggagggccgcaugaacuacuacuggacccucgucgagcccggcgacaagaucaccuucgaggccaccggcaaccucgucgucccccgcuacgccuucgccauggagcgcaacgccggcuccggcaucaucaucuccgacacccccguccacgacugcaacaccaccugccagacccccaagggcgccaucaacaccucccuccccuuccagaacauccaccccaucaccaucggcaagugccccaaguacgucaaguccaccaagcuccgccucgccaccggccuccgcaacguccccuccauccagucccgcggccucuucggcgccaucgccggcuucaucgagggcggcuggaccggcauggucgacggcugguacggcuaccaccaccagaacgagcagggcuccggcuacgccgccgaccucaaguccacccagaacgccaucgacaagaucaccaacaaggucaacuccgucaucgagaagaugaacacccaguucaccgccgucggcaaggaguucaaccaccucgagaagcgcaucgagaaccucaacaagaaggucgacgacggcuuccucgacaucuggaccuacaacgccgagcuccucguccuccucgagaacgagcgcacccucgacuaccacgacuccaacgucaagaaccucuacgagaagguccgcaaccagcucaagaacaacgccaaggagaucggcaacggcugcuucgaguucuaccacaagugcgacaacaccugcauggaguccgucaagaacggcaccuacgacuaccccaaguacuccgaggaggccaagcucaaccgcgaggagaucgacggcgucaagcucgaguccacccgcaucuaccagauccucgccaucuacuccaccgucgccuccucccucguccucgucgucucccucggcgccaucuccuucuggaugugcuccaacggcucccuccagugccgcaucugcaucuga

SEQ ID NO: 108133 - RNA, 1701 nt, Artificial Sequence
  derived and/or modified CDS sequence (opt2) from hemagglutinin__InfluenzaA__AHZ36024
augaaggccauccucgucguccuccucuacaccuucgccaccgccaacgccgacacccucugcaucggcuaccacgccaacaacuccaccgacaccgucgacaccguccucgagaagaacgucaccgucacccacuccgucaaccuccucgaggacaagcacaacggcaagcucugcaagcuccgcggcgucgccccccuccaccucggcaagugcaacaucgccggcuggauccucggcaaccccgagugcgagucccucuccaccgccuccuccugguccuacaucgucgagaccuccuccuccgacaacggcaccugcuaccccggcgacuucaucaacuacgaggagcuccgcgagcagcucuccuccgucuccuccuucgagcgcuucgagaucuuccccaagaccuccuccuggcccaaccacgacuccaacaagggcgucaccgccgccugcccccacgccggcgccaaguccuucuacaagaaccucaucuggcucgucaagaagggcaacuccuaccccaagcucuccaaguccuacaucaacgacaagggcaaggagguccucguccucuggggcauccaccaccccuccaccaccgccgaccagcagucccucuaccagaacgccgacgccuacgucuucgucggcaccucccgcuacuccaagaaguucaagcccgagaucgccauccgccccaagguccgcgaccaggagggccgcaugaacuacuacuggacccucgucgagcccggcgacaagaucaccuucgaggccaccggcaaccucgucgucccccgcuacgccuucgccauggagcgcaacgccggcuccggcaucaucaucuccgacacccccguccacgacugcaacaccaccugccagacccccaagggcgccaucaacaccucccuccccuuccagaacauccaccccaucaccaucggcaagugccccaaguacgucaaguccaccaagcuccgccucgccaccggccuccgcaacguccccuccauccagucccgcggccucuucggcgccaucgccggcuucaucgagggcggcuggaccggcauggucgacggcugguacggcuaccaccaccagaacgagcagggcuccggcuacgccgccgaccucaaguccacccagaacgccaucgacaagaucaccaacaaggucaacuccgucaucgagaagaugaacacccaguucaccgccgucggcaaggaguucaaccaccucgagaagcgcaucgagaaccucaacaagaaggucgacgacggcuuccucgacaucuggaccuacaacgccgagcuccucguccuccucgagaacgagcgcacccucgacuaccacgacuccaacgucaagaaccucuacgagaagguccgcaaccagcucaagaacaacgccaaggagaucggcaacggcugcuucgaguucuaccacaagugcgacaacaccugcauggaguccgucaagaacggcaccuacgacuaccccaaguacuccgaggaggccaagcucaaccgcgaggagaucgacggcgucaagcucgaguccacccgcaccuaccagauccucgccaucuacuccaccgucgccuccucccucguccucgucgucucccucggcgccaucuccuucuggaugugcuccaacggcucccuccagugccgcaucugcaucuga

SEQ ID NO: 108134 - RNA, 1701 nt, Artificial Sequence
  derived and/or modified CDS sequence (opt2) from hemagglutinin__InfluenzaA__AHZ36035
augaagaccaucaucgcccucuccuacauccucugccucgucuucgcccagaagcuccccggcaacgacaacuccaccgccacccucugccucggccaccacgccguccccaacggcaccaucgucaagaccaucaccaacgaccagaucgaggucaccaacgccaccgagcucauccaguccuccuccaccggcgagaucugcaacuccccccaccagauccucgacggcgagaacugcacccucaucgacgcccuccucggcgacccccagugcgacggcuuccagaacaagaagugggaccucuucgucgagcgcuccaaggcccacuccaacugcuaccccuacgacguccccgacuacgccucccuccgcucccucgucgccuccuccggcacccucgaguucaacaacgaguccuucaacuggaccggcgucacccagaacggcaccuccuccgccugcauccgccgcuccaacaacuccuucuucucccgccucaacuggcucacccaccucaacuucaaguaccccgcccucaacgucaccaugcccaacaacgagcaguucgacaagcucuacaucuggggcguccaccaccccggcaccgacaaggaccagaucuuccucuacgcccaggccgccggccgcaucaccgucuccaccaagcgcucccagcaggccgucauccccaacaucggcucccgcccccgcguccgcaacauccccucccgcgucuccaucuacuggaccaucgucaagcccggcgacauccuccucaucaacuccaccggcaaccucaucgccccccgcggcuacuucaagauccgcuccggcaaguccuccaucaugcgcuccgacgcccccaucggcaagugcaacuccgccugcaucacccccaacggcuccauccccaacgacaagcccuuccagaacgucaaccgcaucaccuacggcgccugcccccgcuacgucaagcagaacacccucaagcucgccaccggcaugcgcaacguccccgagaagcagacccgcggcaucuucggcgccaucgccggcuucaucgagaacggcugggagggcauggucgacggcugguacggcuuccgccaccagaacuccgagggccgcggccaggccgccgaccucaaguccacccaggccgccaucgaccagaucaacggcaagcucaaccgccucaucggcaagaccaacgagaaguuccaccagaucgagaaggaguucuccgaggucgagggccgcauccaggaccucgagaaguacgucgaggacaccaagaucgaccucugguccuacaacgccgagcuccucgucgcccucgagaaccagcacaccaucgaccucaccgacuccgagaugaacaagcucuucgagaagaccaagaagcagcuccgcgagaacgccgaggacaugggcaacggcugcuucaagaucuaccacaagugcgacaacgccugcaucggcuccauccgcaacggcaccuacgaccacgacgucuaccgcgacgaggcccucaacaaccgcuuccagaucaagggcgucgagcucaaguccggcuacaaggacuggauccucuggaucuccuucgccaucuccugcuuccuccucugcgucgcccuccucggcuucaucaugugggccugccagaagggcaacauccgcugcaacaucugcaucuga

SEQ ID NO: 108135 - RNA, 1701 nt, Artificial Sequence; identical to SEQ ID NO: 102891
  derived and/or modified CDS sequence (opt2) from hemagglutinin__InfluenzaA__AHZ36047

SEQ ID NO: 108136 - RNA, 1701 nt, Artificial Sequence; identical to SEQ ID NO: 108116
  derived and/or modified CDS sequence (opt2) from hemagglutinin__InfluenzaA__AHZ36059

SEQ ID NO: 108137 - RNA, 1701 nt, Artificial Sequence; identical to SEQ ID NO: 108133
  derived and/or modified CDS sequence (opt2) from hemagglutinin__InfluenzaA__AHZ36070

SEQ ID NO: 108138 - RNA, 1701 nt, Artificial Sequence; identical to SEQ ID NO: 108132
  derived and/or modified CDS sequence (opt2) from hemagglutinin__InfluenzaA__AHZ36081

SEQ ID NO: 108139 - RNA, 1701 nt, Artificial Sequence; identical to SEQ ID NO: 108133
  derived and/or modified CDS sequence (opt2) from hemagglutinin__InfluenzaA__AHZ36092

SEQ ID NO: 108140 - RNA, 1701 nt, Artificial Sequence; identical to SEQ ID NO: 108116
  derived and/or modified CDS sequence (opt2) from hemagglutinin__InfluenzaA__AHZ36103

SEQ ID NO: 108141 - RNA, 1701 nt, Artificial Sequence; identical to SEQ ID NO: 108133
  derived and/or modified CDS sequence (opt2) from hemagglutinin__InfluenzaA__AHZ36114

SEQ ID NO: 108142 - RNA, 1701 nt, Artificial Sequence; identical to SEQ ID NO: 108116
  derived and/or modified CDS sequence (opt2) from hemagglutinin__InfluenzaA__AHZ36125

SEQ ID NO: 108143 - RNA, 1701 nt, Artificial Sequence; identical to SEQ ID NO: 108116
  derived and/or modified CDS sequence (opt2) from hemagglutinin__InfluenzaA__AHZ36136

SEQ ID NO: 108144 - RNA, 1701 nt, Artificial Sequence; identical to SEQ ID NO: 102891
  derived and/or modified CDS sequence (opt2) from hemagglutinin__InfluenzaA__AHZ36147

SEQ ID NO: 108145 - RNA, 1701 nt, Artificial Sequence
  derived and/or modified CDS sequence (opt2) from hemagglutinin__InfluenzaA__AHZ36158
augaaggccauccucgucguccuccucuacaccuucgccaucgccaacgccgacacccucugcaucggcuaccacgccaacaacuccaccgacaccgucgacaccguccucgagaagaacgucaccgucacccacuccgucaaccuccucgaggacaagcacaacggcaagcucugcaagcuccgcggcgucgccccccuccaccucggcaagugcaacaucgccggcuggauccucggcaaccccgagugcgagucccucuccaccgccuccuccugguccuacaucgucgagaccuccuccuccgacaacggcaccugcuaccccggcgacuucaucaacuacgaggagcuccgcgagcagcucuccuccgucuccuccuucgagcgcuucgagauguuccccaagaccuccuccuggcccaaccacgacuccaacaagggcgucaccgccgccugcccccacgccggcgccaaguccuucuacaagaaccucaucuggcucgucaagaagggcaacuccuaccccaagcucuccaaguccuacaucaacgacaagggcaaggagguccucguccucuggggcauccaccaccccuccaccaccgccgaccagcagucccucuaccagaacgccgacgccuacgucuucgucggcaccucccgcuacuccaagaaguucaagcccgagaucgccacccgccccaagguccgcgaccaggagggccgcaugaacuacuacuggacccucgucgagcccggcgacaagaucaccuucgaggccaccggcaaccucgucgucccccgcuacgccuucgccauggagcgcaacgccggcuccggcaucaucaucuccgacacccccguccacgacugcaacaccaccugccagacccccaagggcgccaucaacaccucccuccccuuccagaacauccaccccaucaccaucggcaagugccccaaguacgucaaguccaccaagcuccgccucgccaccggccuccgcaacguccccuccauccagucccgcggccucuucggcgccaucgccggcuucaucgagggcggcuggaccggcauggucgacggcugguacggcuaccaccaccagaacgagcagggcuccggcuacgccgccgaccucaaguccacccagaacgccaucgacaagaucaccaacaaggucaacuccgucaucgagaagaugaacacccaguucaccgccgucggcaaggaguucaaccaccucgagaagcgcaucgagaaccucaacaagaaggucgacgacggcuuccucgacaucuggaccuacaacgccgagcuccucguccuccucgagaacgagcgcacccucgacuaccacgacuccaacgucaagaaccucuacgagaagguccgcaaccagcucaagaacaacgccaaggagaucggcaacggcugcuucgaguucuaccacaagugcgacaacaccugcauggaguccgucaagaacggcaccuacgacuaccccaaguacuccgaggaggccaagcucaaccgcgaggagaucgacggcgucaagcucgaguccacccgcaucuaccagauccucgccaucuacuccaccgucgccuccucccucguccucgucgucucccucggcgccaucuccuucuggaugugcuccaacggcucccuccagugccgcaucugcaucuga

SEQ ID NO: 108146 - RNA, 1701 nt, Artificial Sequence; identical to SEQ ID NO: 108116
  derived and/or modified CDS sequence (opt2) from hemagglutinin__InfluenzaA__AHZ36169

SEQ ID NO: 108147 - RNA, 1701 nt, Artificial Sequence
  derived and/or modified CDS sequence (opt2) from hemagglutinin__InfluenzaA__AHZ36180
augaaggccauccucgucguccuccucuacaccuucgccaucgccaacgccgacacccucugcaucggcuaccacgccaacaacuccaccgacaccgucgacaccguccucgagaagaacgucaccgucacccacuccgucaaccuccucgaggacaagcacaacggcaagcucugcaagcuccgcggcgucgccccccuccaccucggcaagugcaacaucgccggcuggauccucggcaaccccgagugcgagucccucuccaccgccuccuccugguccuacaucgucgagaccuccuccuccgacaacggcaccugcuaccccggcgacuucaucaacuacgaggagcuccgcgagcagcucuccuccgucuccuccuucgagcgcuucgagauguuccccaagaccuccuccuggcccaaccacgacuccaacaagggcgucaccgccgccugcccccacgccggcgccaaguccuucuacaagaaccucaucuggcucgucaagaagggcaacuccuaccccaagcucuccaaguccuacaucaacgacaagggcaaggagguccucguccucuggggcauccaccaccccuccaccaccgccgaccagcagucccucuaccagaacgccgacgccuacgucuucgucggcaccucccgcuacuccaagaaguucaagcccgagaucgccauccgccccaagguccgcgaccaggagggccgcaugaacuacuacuggacccucgucgagcccggcgacaagaucaccuucgaggccaccggcaaccucgucgucccccgcuacgccuucgccauggagcgcaacgccggcuccggcaucaucaucuccgacacccccauccacgacugcaacaccaccugccagacccccaagggcgccaucaacaccucccuccccuuccagaacauccaccccaucaccaucggcaagugccccaaguacgucaaguccaccaagcuccgccucgccaccggccuccgcaacguccccuccauccagucccgcggccucuucggcgccaucgccggcuucaucgagggcggcuggaccggcauggucgacggcugguacggcuaccaccaccagaacgagcagggcuccggcuacgccgccgaccucaaguccacccagaacgccaucgacaagaucaccaacaaggucaacuccgucaucgagaagaugaacacccaguucaccgccgucggcaaggaguucaaccaccucgagaagcgcaucgagaaccucaacaagaaggucgacgacggcuuccucgacaucuggaccuacaacgccgagcuccucguccuccucgagaacgagcgcacccucgacuaccacgacuccaacgucaagaaccucuacgagaagguccgcaaccagcucaagaacaacgccaaggagaucggcaacggcugcuucgaguucuaccacaagugcgacaacaccugcauggaguccgucaagaacggcaccuacgacuaccccaaguacuccgaggaggccaagcucaaccgcgaggagaucgacggcgucaagcucgaguccacccgcaucuaccagauccucgccaucuacuccaccgucgccuccucccucguccucgucgucucccucggcgccaucuccuucuggaugugcuccaacggcucccuccagugccgcaucugcaucuga

SEQ ID NO: 108148 - RNA, 1701 nt, Artificial Sequence; identical to SEQ ID NO: 108121
  derived and/or modified CDS sequence (opt2) from hemagglutinin__InfluenzaA__AHZ36191

SEQ ID NO: 108149 - RNA, 1701 nt, Artificial Sequence; identical to SEQ ID NO: 102891
  derived and/or modified CDS sequence (opt2) from hemagglutinin__InfluenzaA__AHZ36203

SEQ ID NO: 108150 - RNA, 1701 nt, Artificial Sequence; identical to SEQ ID NO: 108116
  derived and/or modified CDS sequence (opt2) from hemagglutinin__InfluenzaA__AHZ36215

SEQ ID NO: 108151 - RNA, 1701 nt, Artificial Sequence; identical to SEQ ID NO: 102891
  derived and/or modified CDS sequence (opt2) from hemagglutinin__InfluenzaA__AHZ36226

SEQ ID NO: 108152 - RNA, 1701 nt, Artificial Sequence; identical to SEQ ID NO: 108116
  derived and/or modified CDS sequence (opt2) from hemagglutinin__InfluenzaA__AHZ36238

SEQ ID NO: 108153 - RNA, 1701 nt, Artificial Sequence; identical to SEQ ID NO: 108116
  derived and/or modified CDS sequence (opt2) from hemagglutinin__InfluenzaA__AHZ36249

SEQ ID NO: 108154 - RNA, 1701 nt, Artificial Sequence
  derived and/or modified CDS sequence (opt2) from hemagglutinin__InfluenzaA__AHZ36260
augaaggccauccucgucguccuccucuacaccuucgccaucgccaacgccgacacccucugcaucggcuaccacgccaacaacuccaccgacaccgucgacaccguccucgagaagaacgucaccgucacccacuccgucaaccuccucgaggacaagcacaacggcaagcucugcaagcuccgcggcgucgccccccuccaccucggcaagugcaacaucgccggcuggauccucggcaaccccgagugcgagucccucuccaccgccuccuccugguccuacaucgucgagaccuucuccuccgacaacggcaccugcuaccccggcgacuucaucaacuacgaggagcuccgcgagcagcucuccuccgucuccuccuucgagcgcuucgagauguuccccaagaccuccuccuggcccaaccacgacuccaacaagggcgucaccgccgccugcccccacgccggcgccaaguccuucuacaagaaccucaucuggcucgucaagaagggcaacuccuaccccaagcucuccaaguccuacaucaacgacaagggcaaggagguccucguccucuggggcauccaccaccccuccaccaccgccgaccagcagucccucuaccagaacgccgacgccuacgucuucgucggcaccucccgcuacuccaagaaguucaagcccgagaucgccauccgccccaagguccgcgaccaggagggccgcaugaacuacuacuggacccucgucgagcccggcgacaagaucaccuucgaggccaccggcaaccucgucgucccccgcuacgccuucgccauggagcgcaacgccggcuccggcaucaucaucuccgacacccccguccacgacugcaacaccaccugccagacccccaagggcgccaucaacaccucccuccccuuccagaacauccaccccaucaccaucggcaagugccccaaguacgucaaguccaccaagcuccgccucgccaccggccuccgcaacguccccuccauccagucccgcggccucuucggcgccaucgccggcuucaucgagggcggcuggaccggcauggucgacggcugguacggcuaccaccaccagaacgagcagggcuccggcuacgccgccgaccucaaguccacccagaacgccaucgacaagaucaccaacaaggucaacuccgucaucgagaagaugaacacccaguucaccgccgucggcaaggaguucaaccaccucgagaagcgcaucgagaaccucaacaagaaggucgacgacggcuuccucgacaucuggaccuacaacgccgagcuccucguccuccucgagaacgagcgcacccucgacuaccacgacuccaacgucaagaaccucuacgagaagguccgcaaccagcucaagaacaacgccaaggagaucggcaacggcugcuucgaguucuaccacaagugcgacaacaccugcauggaguccgucaagaacggcaccuacgacuaccccaaguacuccgaggaggccaagcucaaccgcgaggagaucgacggcgucaagcucgaguccacccgcaucuaccagauccucgccaucuacuccaccgucgccuccucccucguccucgucgucucccucggcgccaucuccuucuggaugugcuccaacggcucccuccagugccgcaucugcaucuga

SEQ ID NO: 108155 - RNA, 1701 nt, Artificial Sequence; identical to SEQ ID NO: 108101
  derived and/or modified CDS sequence (opt2) from hemagglutinin__InfluenzaA__AHZ36271

SEQ ID NO: 108156 - RNA, 1701 nt, Artificial Sequence; identical to SEQ ID NO: 108116
  derived and/or modified CDS sequence (opt2) from hemagglutinin__InfluenzaA__AHZ36283

SEQ ID NO: 108157 - RNA, 1701 nt, Artificial Sequence; identical to SEQ ID NO: 108101
  derived and/or modified CDS sequence (opt2) from hemagglutinin__InfluenzaA__AHZ36294

SEQ ID NO: 108158 - RNA, 1701 nt, Artificial Sequence
  derived and/or modified CDS sequence (opt2) from hemagglutinin__InfluenzaA__AHZ36306
augaaggccauccucgucguccuccucuacaccuucgccaucgccaacgccgacacccucugcaucggcuaccacgccaacaacuccaccgacaccgucgacaccguccucgagaagaacgucaccgucacccacuccgucaaccuccucgaggacaagcacaacggcaagcucugcaagcuccgcggcgucgccccccuccaccucggcaagugcaacaucgccggcuggauccucggcaaccccgagugcgagucccucuccaccgccuccuccugguccuacaucgucgagaccuccuccuccgacaacggcaccugcuaccccggcgacuucaucaacuacgaggagcuccgcgagcagcucuccuccgucuccuccuucgagcgcuucgagauguuccccaagaccuccuccuggcccaaccacgacuccaacaagggcgucaccgccgccugcccccacgccggcgccaaguccuucuacaagaaccucaucuggcucgucaagaagggcaacuccuaccccaagcucuccaaguccuacaucaacgacaagggcaaggagguccucguccucuggggcauccaccaccccuccaccaccgccgaccagcagucccucuaccagaacgccgacgccuacgucuucgucggcaccucccgcuacuccaagaaguucaagcccgagaucgccauccgccccaagguccgcgaccaggagggccgcaugaacuacuacuggacccucgucgagcccggcgacaagaucaccuucgaggccaccggcaaccucgucgucccccgcuacgccuucgccauggagcgcaacgccggcuccggcaucaucaucuccgacacccccguccacgacugcaacaccaccugccagacccccaagggcgccaucaacaccucccuccccuuccagaacauccaccccaucaccaucggcaagugccccaaguacgucaaguccaagaagcuccgccucgccaccggccuccgcaacguccccuccauccagucccgcggccucuucggcgccaucgccggcuucaucgagggcggcuggaccggcauggucgacggcugguacggcuaccaccaccagaacgagcagggcuccggcuacgccgccgaccucaaguccacccagaacgccaucgacaagaucaccaacaaggucaacuccgucaucgagaagaugaacacccaguucaccgccgucggcaaggaguucaaccaccucgagaagcgcaucgagaaccucaacaagaaggucgacgacggcuuccucgacaucuggaccuacaacgccgagcuccucguccuccucgagaacgagcgcacccucgacuaccacgacuccaacgucaagaaccucuacgagaagguccgcaaccagcucaagaacaacgccaaggagaucggcaacggcugcuucgaguucuaccacaagugcgacaacaccugcauggaguccgucaagaacggcaccuacgacuaccccaaguacuccgaggaggccaagcucaaccgcgaggagaucgacggcgucaagcucgaguccacccgcaucuaccagauccucgccaucuacuccaccgucgccuccucccucguccucgucgucucccucggcgccaucuccuucuggaugugcuccaacggcucccuccagugccgcaucugcaucuga

SEQ ID NO: 108159 - RNA, 1701 nt, Artificial Sequence; identical to SEQ ID NO: 108116
  derived and/or modified CDS sequence (opt2) from hemagglutinin__InfluenzaA__AHZ36317

SEQ ID NO: 108160 - RNA, 1701 nt, Artificial Sequence; identical to SEQ ID NO: 108116
  derived and/or modified CDS sequence (opt2) from hemagglutinin__InfluenzaA__AHZ36328

SEQ ID NO: 108161 - RNA, 1701 nt, Artificial Sequence
  derived and/or modified CDS sequence (opt2) from hemagglutinin__InfluenzaA__AHZ36339
augaaggccauccucgucguccuccucuacaccuucgccaucgccaacgccgacacccucugcaucggcuaccacgccaacaacuccaccgacaccgucgacaccguccucgagaagaacgucaccgucacccacuccgucaaccuccucgaggacaagcacaacggcaagcucugcaagcuccgcggcgucgccccccuccaccucggcaagugcaacaucgccggcuggauccucggcaaccccgagugcgagucccucuccaccgccuccuccugguccuacaucgucgagaccuccuccuccgacaacggcaccugcuaccccggcgacuucaucaacuacgaggagcuccgcgagcagcucuccuccgucuccuccuucgagcgcuucgagauguuccccaagaccuccuccuggcccaaccacgacuccaacaagggcgucaccgccgccugcccccacgccggcgccaaguccuucuacaagaaccucaucuggcucgucaagaagggcaacuccuaccccaagcucuccaaguccuacaucaacgacaagggcaaggagguccucguccucuggggcauccaccaccccuccaccaccgccgaccagcagucccucuaccagaacgccgacgccuacgucuucgucggcaccucccgcuacuccaagaaguucaagcccgagaucgccauccgccccaagguccgcgaccaggagggccgcaugaacuacuacuggacccucgucgagcccggcgacaagaucaccuucgaggccaccggcaaccucgucgucccccgcuacgccuucgccauggagcgcaacgccggcuccggcaucaucaucuccgacacccccguccacgacugcaacaccaccugccagacccccaagggcgccgucaacaccucccuccccuuccagaacauccaccccaucaccaucggcaagugccccaaguacgucaaguccaccaagcuccgccucgccaccggccuccgcaacguccccuccauccagucccgcggccucuucggcgccaucgccggcuucaucgagggcggcuggaccggcauggucgacggcugguacggcuaccaccaccagaacgagcagggcuccggcuacgccgccgaccucaaguccacccagaacgccaucgacaagaucaccaacaaggucaacuccgucaucgagaagaugaacacccaguucaccgccgucggcaaggaguucaaccaccucgagcgccgcaucgagaaccucaacaagaaggucgacgacggcuuccucgacaucuggaccuacaacgccgagcuccucguccuccucgagaacgagcgcacccucgacuaccacgacuccaacgucaagaaccucuacgagaagguccgcaaccagcucaagaacaacgccaaggagaucggcaacggcugcuucgaguucuaccacaagugcgacaacaccugcauggaguccgucaagaacggcaccuacgacuaccccaaguacuccgaggaggccaagcucaaccgcgaggagaucgacggcgucaagcucgaguccacccgcaucuaccagauccucgccaucuacuccaccgucgccuccucccucguccucgucgucucccucggcgccaucuccuucuggaugugcuccaacggcucccuccagugccgcaucugcaucuga

SEQ ID NO: 108162 - RNA, 1701 nt, Artificial Sequence
  derived and/or modified CDS sequence (opt2) from hemagglutinin__InfluenzaA__AHZ36362
augaaggccauccucgucguccuccucuacaccuucgccaucgccaacgccgacacccucugcaucggcuaccacgccaacaacuccaccgacaccgucgacaccguccucgagaagaacgucaccgucacccacuccaucaaccuccucgaggacaagcacaacggcaagcucugcaagcuccgcggcgucgccccccuccaccucggcaagugcaacaucgccggcuggauccucggcaaccccgagugcgagucccucuccaccgccuccuccugguccuacaucgucgagaccuccuccuccgacaacggcaccugcuaccccggcgacuucaucaacuacgaggagcuccgcgagcagcucuccuccgucuccuccuucgagcgcuucgagauguuccccaagaccuccuccuggcccaaccacgacuccaacaagggcgucaccgccgccugcccccacgccggcgccaaguccuucuacaagaaccucaucuggcucgucaagaagggcaacuccuaccccaagcucuccaaguccuacaucaacgacaagggcaaggagguccucguccucuggggcauccaccaccccuccaccaccgccgaccagcagucccucuaccagaacgccgacgccuacgucuucgucggcaccucccgcuacuccaagaaguucaagcccgagaucgccauccgccccaagguccgcgaccaggagggccgcaugaacuacuacuggacccucgucgagcccggcgacaagaucaccuucgaggccaccggcaaccucgucgucccccgcuacgccuucgccauggagcgcaacgccggcuccggcaucaucaucuccgacacccccguccacgacugcaacaccaccugccagacccccaagggcgccgucaacaccucccuccccuuccagaacauccaccccaucaccaucggcaagugccccaaguacgucaaguccaccaagcuccgccucgccaccggccuccgcaacguccccuccauccagucccgcggccucuucggcgccaucgccggcuucaucgagggcggcuggaccggcauggucgacggcugguacggcuaccaccaccagaacgagcagggcuccggcuacgccgccgaccucaaguccacccagaacgccaucgacaagaucaccaacaaggucaacuccgucaucgagaagaugaacacccaguucaccgccgucggcaaggaguucaaccaccucgagcgccgcaucgagaaccucaacaagaaggucgacgacggcuuccucgacaucuggaccuacaacgccgagcuccucguccuccucgagaacgagcgcacccucgacuaccacgacuccaacgucaagaaccucuacgagaagguccgcaaccagcucaagaacaacgccaaggagaucggcaacggcugcuucgaguucuaccacaagugcgacaacaccugcauggaguccgucaagaacggcaccuacgacuaccccaaguacuccgaggaggccaagcucaaccgcgaggagaucgacggcgucaagcucgaguccacccgcaucuaccagauccucgccaucuacuccaccgucgccuccucccucguccucgucgucucccucggcgccaucuccuucuggaugugcuccaacggcucccuccagugccgcaucugcaucuga

SEQ ID NO: 108163 - RNA, 1701 nt, Artificial Sequence
  derived and/or modified CDS sequence (opt2) from hemagglutinin__InfluenzaA__AHZ36385
augaagaccaucaucgcccucuccuacauccucugccucaucuucgcccaggagauccccggcaacgacaacuccaccgccacccucugccucggccaccacgccguccccaacggcaccaucgucaagaccaucaccaacgaccagaucgaggucaccaacgccaccgagcucguccaguccuccuccaccggcgagaucugcaacuccccccaccagauccucgacggcgagaacugcacccucaucgacgcccuccucggcgacccccagugcgacgacuuccagaacaagaagugggaccucuucgucgagcgcuccaaggcccacuccaacugcuaccccuacgacguccccgacuacgccucccuccgcucccucgucgccuccuccggcacccucgaguucaacaacgaguccuucaacuggaccggcgucacccagaacggcaccuccuccgccugcauccgccgcuccaacaacuccuucuucucccgccucaacuggcucacccaccucaacuucaaguaccccgcccucaacgucaccaugcccaacaacgagcaguucgacaagcucuacaucuggggcguccaccaccccggcaccgacaaggaccagaucuuccucuacgcccaggccuccggccgcaucaccgucuccaccaagcgcucccagcaggccgucauccccaacaucggcucccgcccccgcguccgcaacauccccucccgcgucuccaucuacuggaccaucgucaagcccggcgacauccuccucaucaacuccaccggcaaccucaucgccccccgcggcuacuucaagauccgcuccggcaaguccuccaucaugcgcuccgacgcccccaucggcaagugcaacuccgccugcaucacccccaacggcuccauccccaacgacaagcccuuccagaacgucaaccgcaucaccuacggcgccugcccccgcuacgucaagcagaacacccucaagcucgccaccggcaugcgcaacguccccgagaagcagacccgcggcaucuucggcgccaucgccggcuucaucgagaacggcugggagggcauggucgacggcugguacggcuuccgccaccagaacuccgagggccgcggccaggccgccgaccucaaguccacccaggccgccaucgaccagaucaacggcaagcucaaccgccucaucggcaagaccaacgagaaguuccaccagaucgagaaggaguucuccgaggucgagggccgcauccaggaccucgagaaguacgucgaggacaccaagaucgaccucugguccuacaacgccgagcuccucgucgcccucgagaaccagcacaccaucgaccucaccgacuccgagaugaacaagcucuucgagaagaccaagaagcagcuccgcgagaacgccgaggacaugggcaacggcugcuucaagaucuaccacaagugcgacaacgccugcaucggcuccauccgcaacggcaccuacgaccacgacgucuaccgcgacgaggcccucaacaaccgcuucaagaucaagggcgucgagcucaaguccggcuacaaggacuggauccucuggaucuccuucgccaucuccugcuuccuccucugcgucgcccuccucggcuucaucaugugggccugccagaagggcaacauccgcugcaacaucugcaucuga

SEQ ID NO: 108164 - RNA, 1701 nt, Artificial Sequence
  derived and/or modified CDS sequence (opt2) from hemagglutinin__InfluenzaA__AHZ36397
augaagaccaucaucgcccucuccuacauccucugccucaucuucgcccaggagauccccggcaacgacaacuccaccgccacccucugccucggccaccacgccguccccaacggcaccaucgucaagaccaucaccaacgaccagaucgaggucaccaacgccaccgagcucguccaguccuccuccaccggcgagaucugcaacuccccccaccagauccucgacggcgagaacugcacccucaucgacgcccuccucggcgacccccagugcgacgacuuccagaacaagaagugggaccucuucgucgagcgcuccaaggcccacuccaacugcuaccccuacgacguccccgacuacgccucccuccgcucccucgucgccuccuccggcacccucgaguucaacaacgaguccuucaacuggaccggcgucacccagaacggcaccuccuccgccugcauccgccgcuccaacaacuccuucuucucccgccucaacuggcucacccaccucaacuucaaguaccccgcccucaacgucaccaugcccaacaacgagcaguucgacaagcucuacaucuggggcguccaccaccccggcaccgacaaggaccagaucuuccucuacgcccaggccuccggccgcaucaccgucuccaccaagcgcucccagcaggccgucauccccaacaucggcucccgcccccgcguccgcaacauccccucccgcgucuccaucuacuggaccaucgucaagcccggcgacauccuccucaucaacuccaccggcaaccucaucgccccccgcggcuacuucaagauccgcuccggcaaguccuccaucaugcgcuccgacgcccccaucggcaagugcaacuccgccugcaucacccccaacggcuccauccccaacgacaagcccuuccagaacgucaaccgcaucaccuacggcgccugcccccgcuacgucaagcagaacacccucaagcucgccaccggcaugcgcaacguccccgagaagcagacccgcggcaucuucggcgccaucgccggcuucaucgagaacggcugggagggcauggucgacggcugguacggcuuccgccaccagaacuccgagggccgcggccaggccgccgaccucaaguccacccaggccgccaucgaccagaucaacggcaagcucaaccgccucaucggcaagaccaacgagaaguuccaccagaucgagaaggaguucuccgaggucgagggccgcauccaggaccucgagaaguacgucgaggacaccaagaucgaccucugguccuacaacgccgagcuccucgucgcccucgagaaccagcacaccaucgaccucaccgacuccgagaugaacaagcucuucgagaagaccaagaagcagcuccgcgagaacgccgaggacaugggcaacggcugcuucaagaucuaccacaagugcgacaacgccugcaucggcuccauccgcaacggcaccuacgaccacaacgucuaccgcgacgaggcccucaacaaccgcuucaagaucaagggcgucgagcucaaguccggcuacaaggacuggauccucuggaucuccuucgccaucuccugcuuccuccucugcgucgcccuccucggcuucaucaugugggccugccagaagggcaacauccgcugcaacaucugcaucuga

SEQ ID NO: 108165 - RNA, 1701 nt, Artificial Sequence; identical to SEQ ID NO: 108101
  derived and/or modified CDS sequence (opt2) from hemagglutinin__InfluenzaA__AHZ36409

SEQ ID NO: 108166 - RNA, 1701 nt, Artificial Sequence; identical to SEQ ID NO: 108102
  derived and/or modified CDS sequence (opt2) from hemagglutinin__InfluenzaA__AHZ36433

SEQ ID NO: 108167 - RNA, 1701 nt, Artificial Sequence
  derived and/or modified CDS sequence (opt2) from hemagglutinin__InfluenzaA__AHZ36445
augaagaccaucaucgcccucuccuacauccucugccucaucuucgcccaggagauccccggcaacgacaacuccaccgccacccucugccucggccaccacgccguccccaacggcaccaucgucaagaccaucaccaacgaccagaucgaggucaccaacgccaccgagcucguccaguccuccuccaccggcgagaucugcaacuccccccaccagauccucgacggcgagaacugcacccucaucgacgcccuccucggcgacccccagugcgacgacuuccagaacaagaagugggaccucuucgucgagcgcuccaaggcccacuccaacugcuaccccuacgacguccccgacuacgccucccuccgcucccucgucgccuccuccggcacccucgaguucaacaacgaguccuucaacuggaccggcgucacccagaacggcaccuccuccgccugcauccgccgcuccaacaacuccuucuucucccgccucaacuggcucacccaccucaacuucaaguaccccgcccucaacgucaccaugcccaacaacgagcaguucgacaagcucuacaucuggggcguccaccaccccggcaccgacaaggaccagaucuuccucuacgcccaggccuccggccgcaucaccgucuccaccaagcgcucccagcaggccgucauccccaacaucggcucccgcccccgcguccgcaacauccccucccgcgucuccaucuacuggaccaucgucaagcccggcgacauccuccucaucaacuccaccggcaaccucaucgccccccgcggcuacuucaagauccgcuccggcaaguccuccaucaugcgcuccgacgcccccaucggcaagugcaacuccgccugcaucacccccaacggcuccauccccaacgacaagcccuuccagaacgucaaccgcaucaccuacggcgccugcccccgcuacgucaagcagaacacccucaagcucgccaccggcaugcgcaacguccccgagaagcagacccgcggcaucuucggcgccaucgccggcuucaucgagaacggcugggagggcauggucgacggcugguacggcuuccgccaccagaacuccgagggccgcggccaggccgccgaccucaaguccacccaggccgccaucgaccagaucaacggcaagcucaaccgccucaucggcaagaccaacgagaaguuccaccagaucgagaaggaguucuccgaggucgagggccgcauccaggaccucgagaaguacgucgaggacaccaagaucgaccucugguccuacaacgccgagcuccucgucgcccucgagaaccagcacaccaucgaccucaccgacuccgagaugaacaagcucuucgagaagaccaagaagcagcuccgcgagaacgccgaggacaugggcaacggcugcuucaagaucuaccacaagugcgacgacgccugcaucggcuccauccgcaacggcaccuacgaccacgacgucuaccgcgacgaggcccucaacaaccgcuuccagaucaagggcgucgagcucaaguccggcuacaaggacuggauccucuggaucuccuucgccaucuccugcuuccuccucugcgucgcccuccucggcuucaucaugugggccugccagaagggcaacauccgcugcaacaucugcaucuga

SEQ ID NO: 108168 - RNA, 1701 nt, Artificial Sequence; identical to SEQ ID NO: 108101
  derived and/or modified CDS sequence (opt2) from hemagglutinin__InfluenzaA__AHZ36457

SEQ ID NO: 108169 - RNA, 1701 nt, Artificial Sequence; identical to SEQ ID NO: 108101
  derived and/or modified CDS sequence (opt2) from hemagglutinin__InfluenzaA__AHZ36469

SEQ ID NO: 108170 - RNA, 1701 nt, Artificial Sequence
  derived and/or modified CDS sequence (opt2) from hemagglutinin__InfluenzaA__AHZ36481
augaagaccaucaucgcccucuccuacauccucugccucaucuucgcccaggagauccccggcaacgacaacuccaccgccacccucugccucggccaccacgccguccccaacggcaccaucgucaagaccaucaccaacgaccagaucgaggucaccaacgccaccgagcucguccaguccuccuccaccggcgagaucugcaacuccccccaccagauccucgacggcgagaacugcacccucaucgacgcccuccucggcgacccccagugcgacgacuuccagaacaagaagugggaccucuucgucgagcgcuccaaggcccacuccaacugcuaccccuacgacguccccgacuacgccucccuccgcucccucgucgccuccuccggcacccucgaguucaacaacgaguccuucaacuggaccggcgucacccagaacggcaccuccuccgccugcauccgccgcuccaacaacuccuucuucucccgccucaacuggcucacccaccucaacuucaaguaccccgcccucaacgucaccaugcccaacaacgagcaguucgacaagcucuacaucuggggcguccaccaccccggcaccgacaaggaccagaucuuccucuacgcccaggccuccggccgcaucaccgucuccaccaagcgcucccagcaggccgucauccccaacaucggcucccgcccccgcguccgcaacauccccucccgcgucuccaucuacuggaccaucgucaagcccggcgacauccuccucaucaacuccaccggcaaccucaucgccccccgcggcuacuucaagauccgcaacggcaaguccuccaucaugcgcuccgacgcccccaucggcaagugcaacuccgccugcaucacccccaacggcuccauccccaacgacaagcccuuccagaacgucaaccgcaucaccuacggcgccugcccccgcuacgucaagcagaacacccucaagcucgccaccggcaugcgcaacguccccgagaagcagacccgcggcaucuucggcgccaucgccggcuucaucgagaacggcugggagggcauggucgacggcugguacggcuuccgccaccagaacuccgagggccgcggccaggccgccgaccucaaguccacccaggccgccaucgaccagaucaacggcaagcucaaccgccucaucggcaagaccaacgagaaguuccaccagaucgagaaggaguucuccgaggucgagggccgcauccaggaccucgagaaguacgucgaggacaccaagaucgaccucugguccuacaacgccgagcuccucgucgcccucgagaaccagcacaccaucgaccucaccgacuccgagaugaacaagcucuucgagaagaccaagaagcagcuccgcgagaacgccgaggacaugggcaacggcugcuucaagaucuaccacaagugcgacaacgccugcaucggcuccauccgcaacggcaccuacgaccacgacgucuaccgcgacgaggcccucaacaaccgcuuccagaucaagggcgucgagcucaaguccggcuacaaggacuggauccucuggaucuccuucgccaucuccugcuuccuccucugcgucgcccuccucggcuucaucaugugggccugccagaagggcaacauccgcugcaacaucugcaucuga

SEQ ID NO: 108171 - RNA, 1701 nt, Artificial Sequence; identical to SEQ ID NO: 108102
  derived and/or modified CDS sequence (opt2) from hemagglutinin__InfluenzaA__AHZ36493

SEQ ID NO: 108172 - RNA, 1701 nt, Artificial Sequence; identical to SEQ ID NO: 108102
  derived and/or modified CDS sequence (opt2) from hemagglutinin__InfluenzaA__AHZ36505

SEQ ID NO: 108173 - RNA, 1701 nt, Artificial Sequence; identical to SEQ ID NO: 108102
  derived and/or modified CDS sequence (opt2) from hemagglutinin__InfluenzaA__AHZ36517

SEQ ID NO: 108174 - RNA, 1701 nt, Artificial Sequence
  derived and/or modified CDS sequence (opt2) from hemagglutinin__InfluenzaA__AHZ36529
augaagaccaucaucgcccucuccuacauccucugccucaucuucgcccaggagauccccggcaacgacaacuccaccgccacccucugccucggccaccacgccguccccaacggcaccaucgucaagaccaucaccaacgaccagaucgaggucaccaacgccaccgagcucguccaguccuccuccaccggcgagaucugcaacuccccccaccagauccucgacggcgagaacugcacccucaucgacgcccuccucggcgacccccagugcgacgacuuccagaacaagaagugggaccucuucgucgagcgcuccaaggcccacuccaacugcuaccccuacgacguccccgacuacgccucccuccgcucccucgucgccuccuccggcacccucgaguucaacaacgaguccuucaacuggaccggcgucacccagaacggcaccuccuccgccugcauccgccgcuccaacaacuccuucuucucccgccucaacuggcucacccaccucaacuucaaguaccccgcccucaacgucaccaugcccaacaacgagcaguucgacaagcucuacaucuggggcguccaccaccccggcaccgacaaggaccagaucuuccucuacgcccaggccuccggccgcaucaccgucuccaccaagcgcucccagcaggccgucauccccaacaucggcucccgcccccgcguccgcaacauccccucccgcgucuccaucuacuggaccaucgucaagcccggcgacauccuccucaucaacuccaccggcaaccucaucgccccccgcggcuacuucaagauccgcuccggcaaguccuccaucaugcgcuccgacgcccccaucggcaagugcaacuccuccugcaucacccccaacggcuccauccccaacgacaagcccuuccagaacgucaaccgcaucaccuacggcgccugcccccgcuacgucaagcagaacacccucaagcucgccaccggcaugcgcaacguccccgagaagcagacccgcggcaucuucggcgccaucgccggcuucaucgagaacggcugggagggcauggucgacggcugguacggcuuccgccaccagaacuccgagggccgcggccaggccgccgaccucaaguccacccaggccgccaucgaccagaucaacggcaagcucaaccgccucaucggcaagaccaacgagaaguuccaccagaucgagaaggaguucuccgaggucgagggccgcauccaggaccucgagaaguacgucgaggacaccaagaucgaccucugguccuacaacgccgagcuccucgucgcccucgagaaccagcacaccaucgaccucaccgacuccgagaugaacaagcucuucgagaagaccaagaagcagcuccgcgagaacgccgaggacaugggcaacggcugcuucaagaucuaccacaagugcgacaacgccugcaucggcuccauccgcaacggcaccuacgaccacgacgucuaccgcgacgaggcccucaacaaccgcuuccagaucaagggcgucgagcucaaguccggcuacaaggacuggauccucuggaucuccuucgccaucuccugcuuccuccucugcgucgcccuccucggcuucaucaugugggccugccagaagggcaacauccgcugcaacaucugcaucuga

SEQ ID NO: 108175 - RNA, 1701 nt, Artificial Sequence; identical to SEQ ID NO: 108101
  derived and/or modified CDS sequence (opt2) from hemagglutinin__InfluenzaA__AHZ36541

SEQ ID NO: 108176 - RNA, 1701 nt, Artificial Sequence
  derived and/or modified CDS sequence (opt2) from hemagglutinin__InfluenzaA__AHZ36553
augaagaccaucaucgcccucuccuacauccucugccucaucuucgcccaggagauccccggcaacgacaacuccaccgccacccucugccucggccaccacgccguccccaacggcaccaucgucaagaccaucaccaacgaccagaucgaggucaccaacgccaccgagcucguccaguccuccuccaccggcgagaucugcaacuccccccaccagauccucgacggcgagaacugcacccucaucgacgcccuccucggcgacccccagugcgacgacuuccagaacaaggagugggaccucuucgucgagcgcuccaaggcccacuccaacugcuaccccuacgacguccccgacuacgccucccuccgcucccucgucgccuccuccggcacccucgaguucaagaacgaguccuucaacuggaccggcgucacccagaacggcaccuccuccgccugcauccgccgcuccaacaacuccuucuucucccgccucaacuggcucacccaccucaacuucaaguaccccgcccucaacgucaccaugcccaacaacgagcaguucgacaagcucuacaucuggggcguccaccaccccggcaccgacaaggaccagaucuuccucuacgcccaggccuccggccgcaucaccgucuccaccaagcgcucccagcaggccgucauccccaacaucggcucccgcccccgcguccgcaacauccccucccgcgucuccaucuacuggaccaucgucaagcccggcgacauccuccucaucaacuccaccggcaaccucaucgccccccgcggcuacuucaagauccgcuccggcaaguccuccaucaugcgcuccgacgcccccaucggcaagugcaacuccgccugcaucacccccaacggcuccauccccaacgacaagcccuuccagaacgucaaccgcaucaccuacggcaccugcccccgcuacgucaagcagaacacccucaagcucgccaccggcaugcgcaacguccccgagaagcagacccgcggcaucuucggcgccaucgccggcuucaucgagaacggcugggagggcauggucgacggcugguacggcuuccgccaccagaacuccgagggccgcggccaggccgccgaccucaaguccacccaggccgccaucgaccagaucaacggcaagcucaaccgccucaucggcaagaccaacgagaaguuccaccagaucgagaaggaguucuccgaggucgagggccgcauccaggaccucgagaaguacgucgaggacaccaagaucgaccucugguccuacaacgccgagcuccucgucgcccucgagaaccagcacaccaucgaccucaccgacuccgagaugaacaagcucuucgagaagaccaagaagcagcuccgcgagaacgccgaggacaugggcaacggcugcuucaagaucuaccacaagugcgacaacgccugcaucggcuccauccgcaacggcaccuacgaccacgacgucuaccgcgacgaggcccucaacaaccgcuuccagaucaagggcgucgagcucaaguccggcuacaaggacuggauccucuggaucuccuucgccaucuccugcuuccuccucugcgucgcccuccucggcuucaucaugugggccugccagaagggcaacauccgcugcaacaucugcaucuga

SEQ ID NO: 108177 - RNA, 1701 nt, Artificial Sequence; identical to SEQ ID NO: 108101
  derived and/or modified CDS sequence (opt2) from hemagglutinin__InfluenzaA__AHZ36565

SEQ ID NO: 108178 - RNA, 1701 nt, Artificial Sequence; identical to SEQ ID NO: 108101
  derived and/or modified CDS sequence (opt2) from hemagglutinin__InfluenzaA__AHZ36577

SEQ ID NO: 108179 - RNA, 1701 nt, Artificial Sequence; identical to SEQ ID NO: 108101
  derived and/or modified CDS sequence (opt2) from hemagglutinin__InfluenzaA__AHZ36589

SEQ ID NO: 108180 - RNA, 1701 nt, Artificial Sequence; identical to SEQ ID NO: 108176
  derived and/or modified CDS sequence (opt2) from hemagglutinin__InfluenzaA__AHZ36601

SEQ ID NO: 108181 - RNA, 1701 nt, Artificial Sequence
  derived and/or modified CDS sequence (opt2) from hemagglutinin__InfluenzaA__AHZ36613
augaagaccaucaucgcccucuccuacauccucugccucaucuucgcccaggagauccccggcaacgacaacuccaccgccacccucugccucggccaccacgccguccccaacggcaccaucgucaagaccaucaccaacgaccagaucgaggucaccaacgccaccgagcucguccaguccuccuccaccggcgagaucugcaacuccccccaccagauccucgacggcgagaacugcacccucaucgacgcccuccucggcgacccccagugcgacgacuuccagaacaaggagugggaccucuucgucgagcgcuccaaggcccacuccaacugcuaccccuacgacguccccgacuacgccucccuccgcucccucgucgccuccuccggcacccucgaguucaacaacgaguccuucaacuggaccggcgucacccagaacggcaccuccuccgccugcauccgccgcuccaacaacuccuucuucucccgccucaacuggcucacccaccucaacuucaaguaccccgcccucaacgucaccaugcccaacaacgagcaguucgacaagcucuacaucuggggcguccaccaccccggcaccgacaaggaccagaucuuccucuacgcccaggccuccggccgcaucaccgucuccaccaagcgcucccagcaggccgucauccccaacaucggcucccgcccccgcguccgcaacauccccucccgcgucuccaucuacuggaccaucgucaagcccggcgacauccuccucaucaacuccaccggcaaccucaucgccccccgcggcuacuucaagauccgcuccggcaaguccuccaucaugcgcuccgacgcccccaucggcaagugcaacuccgccugcaucacccccaacggcuccauccccaacgacaagcccuuccagaacgucaaccgcaucaccuacggcaccugcccccgcuacgucaagcagaacacccucaagcucgccaccggcaugcgcaacguccccgagaagcagacccgcggcaucuucggcgccaucgccggcuucaucgagaacggcugggagggcauggucgacggcugguacggcuuccgccaccagaacuccgagggccgcggccaggccgccgaccucaaguccacccaggccgccaucgaccagaucaacggcaagcucaaccgccucaucggcaagaccaacgagaaguuccaccagaucgagaaggaguucuccgaggucgagggccgcauccaggaccucgagaaguacgucgaggacaccaagaucgaccucugguccuacaacgccgagcuccucgucgcccucgagaaccagcacaccaucgaccucaccgacuccgagaugaacaagcucuucgagaagaccaagaagcagcuccgcgagaacgccgaggacaugggcaacggcugcuucaagaucuaccacaagugcgacaacgccugcaucggcuccauccgcaacggcaccuacgaccacgacgucuaccgcgacgaggcccucaacaaccgcuuccagaucaagggcgucgagcucaaguccggcuacaaggacuggauccucuggaucuccuucgccaccuccugcuuccuccucugcgucgcccuccucggcuucaucaugugggccugccagaagggcaacauccgcugcaacaucugcaucuga

SEQ ID NO: 108182 - RNA, 1701 nt, Artificial Sequence; identical to SEQ ID NO: 108101
  derived and/or modified CDS sequence (opt2) from hemagglutinin__InfluenzaA__AHZ36625

SEQ ID NO: 108183 - RNA, 1701 nt, Artificial Sequence; identical to SEQ ID NO: 108102
  derived and/or modified CDS sequence (opt2) from hemagglutinin__InfluenzaA__AHZ36637

SEQ ID NO: 108184 - RNA, 1701 nt, Artificial Sequence; identical to SEQ ID NO: 108102
  derived and/or modified CDS sequence (opt2) from hemagglutinin__InfluenzaA__AHZ36649

SEQ ID NO: 108185 - RNA, 1701 nt, Artificial Sequence; identical to SEQ ID NO: 106030
  derived and/or modified CDS sequence (opt2) from hemagglutinin__InfluenzaA__AHZ36661

SEQ ID NO: 108186 - RNA, 1701 nt, Artificial Sequence; identical to SEQ ID NO: 106030
  derived and/or modified CDS sequence (opt2) from hemagglutinin__InfluenzaA__AHZ36673

SEQ ID NO: 108187 - RNA, 1701 nt, Artificial Sequence
  derived and/or modified CDS sequence (opt2) from hemagglutinin__InfluenzaA__AHZ36685
augaagaccaucaucgcccucuccuacauccucugccucgucuucgcccagaagcuccccggcaacgacaacuccaccgccacccucugccucggccaccacgccguccccaacggcaccaucgucaagaccaucaccaacgaccgcaucgaggucaccaacgccaccgagcucguccagaacuccuccaucggcgagaucugcgacuccccccaccagauccucgacggcgagaacugcacccucaucgacgcccuccucggcgacccccagugcgacggcuuccagaacaagaagugggaccucuucgucgagcgcuccaaggccuacuccaacugcuaccccuacgacguccccgacuacgccucccuccgcucccucgucgccuccuccggcacccucgaguucaacaacgaguccuucaacugggccggcgucacccagaacggcaccuccuccgccugcauccgcggcuccaacuccuccuucuucucccgccucaacuggcucacccaccucaacuucaaguaccccgcccucaacgucaccaugcccaacaacgagcaguucgacaagcucuacaucuggggcguccaccaccccggcaccgacaaggaccagaucuuccucuacgcccaguccuccggccgcaucaccgucuccaccaagcgcucccagcaggccgucauccccaacaucggcucccgcccccgcauccgcaacauccccucccgcaucuccaucuacuggaccaucgucaagcccggcgacauccuccucaucaacuccaccggcaaccucaucgccccccgcggcuacuucaagauccgcuccggcaaguccuccaucaugcgcuccgacgcccccaucggcaagugcaaguccgagugcaucacccccaacggcuccauccccaacgacaagcccuuccagaacgucaaccgcaucaccuacggcgccugcccccgcuacgucaagcaguccacccucaagcucgccaccggcaugcgcaacguccccgagaagcagacccgcggcaucuucggcgccaucgccggcuucaucgagaacggcugggagggcauggucgacggcugguacggcuuccgccaccagaacuccgagggccgcggccaggccgccgaccucaaguccacccaggccgccaucgaccagaucaacggcaagcucaaccgccucaucggcaagaccaacgagaaguuccaccagaucgagaaggaguucuccgaggucgagggccgcauccaggaccucgagaaguacgucgaggacaccaagaucgaccucugguccuacaacgccgagcuccucgucgcccucgagaaccagcacaccaucgaccucaccgacuccgagaugaacaagcucuucgagaagaccaagaagcagcuccgcgagaacgccgaggacaugggcaacggcugcuucaagaucuaccacaagugcgacaacgccugcaucggcuccauccgcaacggcaccuacgaccacgacgucuaccgcgacgaggcccucaacaaccgcuuccagaucaagcgcgucgagcucaaguccggcuacaaggacuggauccucuggaucuccuucgccaucuccugcuuccuccucugcgucgcccuccucggcuucaucaugugggccugccagaagggcaacauccgcugcaacaucugcaucuga

SEQ ID NO: 108188 - RNA, 1683 nt, Artificial Sequence; identical to SEQ ID NO: 106024
  derived and/or modified CDS sequence (opt2) from hemagglutinin__InfluenzaA__AHZ39698

SEQ ID NO: 108189 - RNA, 1683 nt, Artificial Sequence
  derived and/or modified CDS sequence (opt2) from hemagglutinin__InfluenzaA__AHZ39722
augaacacccagauccucgucuucgcccucaucgccaucauccccaccaacgccgacaagaucugccucggccaccacgccgucuccaacggcaccaaggucaacacccucaccgagcgcggcgucgaggucgucaacgccaccgagaccgucgagcgcaccaacaucccccgcaucugcuccaagggcaagcgcaccgucgaccucggccagugcggccuccucggcaccaucaccggccccccccagugcgaccaguuccucgaguucuccgccgaccucaucaucgagcgccgcgagggcuccgacgucugcuaccccggcaaguucgucaacgaggaggcccuccgccagauccuccgcgaguccggcggcaucgacaaggaggccaugggcuucaccuacuccggcauccgcaccgacggcgccaccuccgccugccgccgcuccggcuccuccuucuacgccgagaugaaguggcuccucuccaacaccgacgacgccgccuucccccagaugaccaaguccuacaagaacacccgcaagucccccgcccucaucgucuggggcauccaccacuccgucuccaccgccgagcagaccaagcucuacggcuccggcaacaagcucgucaccgucggcuccuccaacuaccagcaguccuucguccccucccccggcgcccgcccccaggucaacggccucuccggccgcaucgacuuccacuggcucaugcucaaccccaacgacaccgucaccuucuccuucaacggcgccuucaucgcccccgaccgcgccuccuuccuccgcggcaaguccaugggcauccaguccggcguccaggucgacgccaacugcgagggcgacugcuaccacuccggcggcaccaucaucuccaaccuccccuuccagaacaucgacucccgcgccgucggcaagugcccccgcuacgucaagcagcgcucccuccuccucgccaccggcaugaagaacguccccgagauccccaagggccgcggccucuucggcgccaucgccggcuucaucgagaacggcugggagggccucaucgacggcugguacggcuuccgccaccagaacgcccagggcgagggcaccgccgccgacuacaaguccacccaguccgccaucgaccagaucaccggcaagcucaaccgccucaucgagaagaccaaccagcaguucgagcucaucgacaacgaguucaacgaggucgagaagcagaucggcaacgucaucaacuggacccgcgacuccaucaccgaggucugguccuacaacgccgagcuccucgucgccauggagaaccagcacaccaucgaccucgccgacuccgagauggacaagcucuacgagcgcgucaagcgccagcuccgcgagaacgccgaggaggacggcaccggcugcuucgagaucuuccacaagugcgacgacgacugcauggccuccauccgcaacaacaccuacgaccacuccaaguaccgcgaggaggccaugcagaaccgcauccagaucgaccccgucaagcucuccuccggcuacaaggacgucauccucugguucuccuucggcgccuccugcuucauccuccucgccaucgucaugggccucgucuucaucugcgucaagaacggcaacaugcgcugcaccaucugcaucuga

SEQ ID NO: 108190 - RNA, 1683 nt, Artificial Sequence; identical to SEQ ID NO: 108189
  derived and/or modified CDS sequence (opt2) from hemagglutinin__InfluenzaA__AHZ39734

SEQ ID NO: 108191 - RNA, 1683 nt, Artificial Sequence
  derived and/or modified CDS sequence (opt2) from hemagglutinin__InfluenzaA__AHZ39746
augaacacccagauccucgucuucgcccucaucgccaucauccccaccaacgccgacaagaucugccucggccaccacgccgucuccaacggcaccaaggucaacacccucaccgagcgcggcgucgaggucgucaacgccaccgagaccgucgagcgcaccaacaucccccgcaucugcuccaagggcaagcgcaccgucgaccucggccagugcggccuccucggcaccaucaccggccccccccagugcgaccaguuccucgaguucuccgccgaccucaucaucgagcgccgcgagggcuccgacgucugcuaccccggcaaguucgucaacgaggaggcccuccgccagauccuccgcgaguccggcggcaucgacaaggaggccaugggcuucaccuacuccggcauccgcaccaacggcgccaccuccgccugccgccgcuccggcuccuccuucuacgccgagaugaaguggcuccucuccaacaccgacaacgccgccuucccccagaugaccaaguccuacaagaacacccgcaagucccccgcccucaucgucuggggcauccaccacuccgucuccaccgccgagcagaccaagcucuacggcuccggcaacaagcucgucaccgucggcuccuccaacuaccagcaguccuucguccccucccccggcgagcgcccccaggucaacggccucuccggccgcaucgacuuccacuggcucaugcucaaccccaacgacaccgucaccuucuccuucaacggcgccuucaucgcccccgaccgcgccuccuuccuccgcggcaaguccaugggcauccaguccggcguccaggucgacgccaacugcgagggcgacugcuaccacuccggcggcaccaucaucuccaaccuccccuuccagaacaucgacucccgcgccgucggcaagugcccccgcuacgucaagcagcgcucccuccuccucgccaccggcaugaagaacguccccgagauccccaagggccgcggccucuucggcgccaucgccggcuucaucgagaacggcugggagggccucaucgacggcugguacggcuuccgccaccagaacgcccagggcgagggcaccgccgccgacuacaaguccacccaguccgccaucgaccagaucaccggcaagcucaaccgccucaucgagaagaccaaccagcaguucgagcucaucgacaacgaguucaacgaggucgagaagcagaucggcaacgucaucaacuggacccgcgacuccaucaccgaggucugguccuacaacgccgagcuccucgucgccauggagaaccagcacaccaucgaccucgccgacuccgagauggacaagcucuacgagcgcgucaagcgccagcuccgcgagaacgccgaggaggacggcaccggcugcuucgagaucuuccacaagugcgacgacgacugcauggccuccauccgcaacaacaccuacgaccacuccaaguaccgcgaggaggccaugcagaaccgcauccagaucgaccccgucaagcucuccuccggcuacaaggacgucauccucugguucuccuucggcgccuccugcuucauccuccucgccaucgucaugggccucgucuucaucugcgucaagaacggcaacaugcgcugcaccaucugcaucuga

SEQ ID NO: 108192 - RNA, 1683 nt, Artificial Sequence; identical to SEQ ID NO: 108189
  derived and/or modified CDS sequence (opt2) from hemagglutinin__InfluenzaA__AHZ39758

SEQ ID NO: 108193 - RNA, 1683 nt, Artificial Sequence; identical to SEQ ID NO: 108189
  derived and/or modified CDS sequence (opt2) from hemagglutinin__InfluenzaA__AHZ39770

SEQ ID NO: 108194 - RNA, 1683 nt, Artificial Sequence; identical to SEQ ID NO: 108189
  derived and/or modified CDS sequence (opt2) from hemagglutinin__InfluenzaA__AHZ39782

SEQ ID NO: 108195 - RNA, 1701 nt, Artificial Sequence; identical to SEQ ID NO: 105919
  derived and/or modified CDS sequence (opt2) from hemagglutinin__InfluenzaA__AHZ39794

SEQ ID NO: 108196 - RNA, 1701 nt, Artificial Sequence; identical to SEQ ID NO: 106033
  derived and/or modified CDS sequence (opt2) from hemagglutinin__InfluenzaA__AHZ39806

SEQ ID NO: 108197 - RNA, 1701 nt, Artificial Sequence
  derived and/or modified CDS sequence (opt2) from hemagglutinin__InfluenzaA__AHZ39818
augaagaccaucaucgcccucuccuacauccucugccucgucuucgcccagaagcuccccggcaacgacaacuccaccgccacccucugccucggccaccacgccguccccaacggcaccaucgucaagaccaucaccaacgaccagaucgaggucaccaacgccaccgagcucguccaguccuccuccaccggcgagaucugcaacuccccccaccagauccucgacggcgagaacugcacccucaucgacgcccuccucggcgacccccagugcgacggcuuccagaacaagaagugggaccucuucgucgagcgcuccaaggcccacuccaacugcuaccccuacgacguccccgacuacgccucccuccgcucccucgucgccuccuccggcacccucgaguucaacaacgaguccuucaacuggaccggcgucacccagaacggcaccuccuccgccugcauccgccgcuccaacaacuccuucuucucccgccucaacuggcucacccaccucaacuucaaguaccccgcccucaacgucaccaugcccaacaacgagcaguucgacaagcucuacaucuggggcguccaccaccccggcaccgacaaggaccagaccuuccucuacgcccaggccgccggccgcaucaccgucuccaccaagcgcucccagcaggccgucauccccaacaucggcucccgcccccgcguccgcaacauccccucccgcgucuccaucuacuggaccaucgucaagcccggcgacauccuccucaucaacuccaccggcaaccucaucgccccccgcggcuacuucaagauccgcuccggcaaguccuccaucaugcgcuccgacgcccccaucggcaagugcaacuccgccugcaucacccccaacggcuccauccccaacgacaagcccuuccagaacgucaaccgcaucaccuacggcgccugcccccgcuacgucaagcagaacacccucaagcucgccaccggcaugcgcaacguccccgagaagcagacccgcggcaucuucggcgccaucgccggcuucaucgagaacggcugggagggcauggucgacggcugguacggcuuccgccaccagaacuccgagggccgcggccaggccgccgaccucaaguccacccaggccgccaucgaccagaucaacggcaagcucaaccgccucaucggcaagaccaacgagaaguuccaccagaucgagaaggaguucuccgaggucgagggccgcauccaggaccucgagaaguacgucgaggacaccaagaucgaccucugguccuacaacgccgagcucaucgucgcccucgagaaccagcacaccaucgaccucaccgacuccgagaugaacaagcucuucgagaagaccaagaagcagcuccgcgagaacgccgaggacaugggcaacggcugcuucaagaucuaccacaagugcgacaacgccugcaucggcuccauccgcaacggcaccuacgaccacgacgucuaccgcgacgaggcccucaacaaccgcuuccagaucaagggcgucgagcucaaguccggcuacaaggacuggauccucuggaucuccuucgccaucuccugcuuccuccucugcgucguccuccucggcuucaucaugugggccugccagaagggcaacauccgcugcaacaucugcaucuga

SEQ ID NO: 108198 - RNA, 1701 nt, Artificial Sequence; identical to SEQ ID NO: 105919
  derived and/or modified CDS sequence (opt2) from hemagglutinin__InfluenzaA__AHZ39841

SEQ ID NO: 108199 - RNA, 1701 nt, Artificial Sequence; identical to SEQ ID NO: 105939
  derived and/or modified CDS sequence (opt2) from hemagglutinin__InfluenzaA__AHZ39853

SEQ ID NO: 108200 - RNA, 1701 nt, Artificial Sequence; identical to SEQ ID NO: 105919
  derived and/or modified CDS sequence (opt2) from hemagglutinin__InfluenzaA__AHZ39865

SEQ ID NO: 108201 - RNA, 1701 nt, Artificial Sequence
  derived and/or modified CDS sequence (opt2) from hemagglutinin__InfluenzaA__AHZ39877
augaagaccaucaucgcccucuccuacauccucugccucgucuucgcccagaagcuccccggcaacgacaacuccaccgccacccucugccucggccaccacgccguccccaacggcaccaucgucaagaccaucaccaacgaccgcaucgaggucaccaacgccaccgagcucguccagaacuccuccaucggcgagaucugcgacuccccccaccagauccucgacggcgagaacugcacccucaucgacgcccuccucggcgacccccagugcgacggcuuccagaacaagaagugggaccucuucgucgagcgcuccaaggccuacuccaacugcuaccccuacgacguccccgacuacgccucccuccgcucccucgucgccuccuccggcacccucgaguucaacaacgaguccuucaacuggaccggcgucacccagaacggcaccuccuccgccugcauccgccgcuccaacuccuccuucuucucccgccucaacuggcucacccaccucaacuucaaguaccccgcccucaacgucaccaugcccaacaacgagcaguucgacaagcucuacaucuggggcguccaccaccccggcaccgacaaggaccagaucuuccucuacgcccaguccuccggccgcaucaccgucuccaccaagcgcucccagcaggccgucauccccaacaucggcucccgcccccgcauccgcaacauccccucccgcaucuccaucuacuggaccaucgucaagcccggcgacauccuccucaucaacuccaccggcaaccucaucgccccccgcggcuacuucaagauccgcuccggcaaguccuccaucaugcgcuccgacgcccccaucggcaagugcaaguccgagugcaucacccccaacggcuccauccccaacgacaagcccuuccagaacgucaaccgcaucaccuacggcgccugcccccgcuacgucaagcaguccacccucaagcucgccaccggcaugcgcaacguccccgagaagcagacccgcggcaucuucggcgccaucgccggcuucaucgagaacggcugggagggcauggucgacggcugguacggcuuccgccaccagaacuccgagggccgcggccaggccgccgaccucaaguccacccaggccgccaucgaccagaucaacggcaagcucaaccgccucaucggcaagaccaacgagaaguuccaccagaucgagaaggaguucuccgaggucgagggccgcauccaggaccucgagaaguacgucgaggacaccaagaucgaccucugguccuacaacgccgagcuccucgucgcccucgagaaccagcacaccaucgaccucaccgacuccgagaugaacaagcucuucgagaagaccaagaagcagcuccgcgagaacgccgaggacaugggcaacggcugcuucaagaucuaccacaagugcgacaacgccugcaucggcuccauccgcaacggcaccuacgaccacaacgucuaccgcgacgaggcccucaacaaccgcuuccagaucaagggcgucgagcucaaguccggcuacaaggacuggauccucuggaucuccuucgccaccuccugcuuccuccucugcgucgcccuccucggcuucaucaugugggccugccagaagggcaacauccgcugcaacaucugcaucuga

SEQ ID NO: 108202 - RNA, 1701 nt, Artificial Sequence; identical to SEQ ID NO: 105939
  derived and/or modified CDS sequence (opt2) from hemagglutinin__InfluenzaA__AHZ39889

SEQ ID NO: 108203 - RNA, 1701 nt, Artificial Sequence; identical to SEQ ID NO: 105920
  derived and/or modified CDS sequence (opt2) from hemagglutinin__InfluenzaA__AHZ39913

SEQ ID NO: 108204 - RNA, 1701 nt, Artificial Sequence
  derived and/or modified CDS sequence (opt2) from hemagglutinin__InfluenzaA__AHZ39925
augaagaccaucaucgcccucuccuacauccucugccucgucuucgcccagaagcuccccggcaacgacaacuccaccgccacccucugccucggccaccacgccguccccaacggcaccaucgucaagaccaucaccaacgaccgcaucgaggucaccaacgccaccgagcucguccagaacuccuccaucggcgagaucugcgacuccccccaccagauccucgacggcgagaacugcacccucaucgacgcccuccucggcgacccccagugcgacggcuuccagaacaagaagugggaccucuucgucgagcgcuccaaggccuacuccaacugcuaccccuacgacguccccgacuacgccucccuccgcucccucgucgccuccuccggcacccucgaguucaacaacgaguccuucaacuggaccggcgucacccagaacggcaccuccuccgccugcauccgccgcuccaacuccuccuucuucucccgccucaacuggcucacccaccucaacuucaaguaccccgcccucaacgucaccaugcccaacaacgagcaguucgacaagcucuacaucuggggcguccaccaccccggcaccgacaaggaccagaucuuccucuacgcccaguccuccggccgcaucaccgucuccaccaagcgcucccagcaggccgucauccccaacaucggcucccgcccccgcauccgcgacauccccucccgcaucuccaucuacuggaccaucgucaagcccggcgacauccuccucaucaacuccaccggcaaccucaucgccccccgcggcuacuucaagauccgcuccggcaaguccuccaucaugcgcuccgacgcccccaucggcaagugcaaguccgagugcaucacccccaacggcuccauccccaacgacaagcccuuccagaacgucaaccgcaucaccuacggcgccugcccccgcuacgucaagcaguccacccucaagcucgccaccggcaugcgcaacguccccgagaagcagacccgcggcaucuucggcgccaucgccggcuucaucgagaacggcugggagggcauggucgacggcugguacggcuuccgccaccagaacuccgagggccgcggccaggccgccgaccucaaguccacccaggccgccaucgaccagaucaacggcaagcucaaccgccucaucggcaagaccaacgagaaguuccaccagaucgagaaggaguucuccgaggucgagggccgcauccaggaccucgagaaguacgucgaggacaccaagaucgaccucugguccuacaacgccgagcuccucgucgcccucgagaaccagcacaccaucgaccucaccgacuccgagaugaacaagcucuucgagaagaccaagaagcagcuccgcgagaacgccgaggacaugggcaacggcugcuucaagaucuaccacaagugcgacaacgccugcaucggcuccauccgcaacggcaccuacgaccacgacgucuaccgcgacgaggcccucaacaaccgcuuccagaucaagggcgucgagcucaaguccggcuacaaggacuggauccucuggaucuccuucgccaucuccugcuuccuccucugcgucgcccuccucggcuucaucaugugggccugccagaagggcaacauccgcugcaacaucugcaucuga

SEQ ID NO: 108205 - RNA, 1701 nt, Artificial Sequence; identical to SEQ ID NO: 105919
  derived and/or modified CDS sequence (opt2) from hemagglutinin__InfluenzaA__AHZ39937

SEQ ID NO: 108206 - RNA, 1701 nt, Artificial Sequence; identical to SEQ ID NO: 105919
  derived and/or modified CDS sequence (opt2) from hemagglutinin__InfluenzaA__AHZ39949

SEQ ID NO: 108207 - RNA, 1701 nt, Artificial Sequence; identical to SEQ ID NO: 105919
  derived and/or modified CDS sequence (opt2) from hemagglutinin__InfluenzaA__AHZ39961

SEQ ID NO: 108208 - RNA, 1701 nt, Artificial Sequence; identical to SEQ ID NO: 105919
  derived and/or modified CDS sequence (opt2) from hemagglutinin__InfluenzaA__AHZ39973

SEQ ID NO: 108209 - RNA, 1701 nt, Artificial Sequence
  derived and/or modified CDS sequence (opt2) from hemagglutinin__InfluenzaA__AHZ39985
augaagaccaucaucgcccucuccuacauccucugccucgucuucgcccagaagcuccccggcaacgacaacuccaccgccacccucugccucggccaccacgccguccccaacggcaccaucgucaagaccaucaccaacgaccgcaucgaggucaccaacgccaccgagcucguccagaacuccuccaucggcgagaucugcgacuccccccaccagauccucgacggcgagaacugcacccucaucgacgcccuccucggcgacccccagugcgacggcuuccagaacaagaagugggaccucuucgucgagcgcuccaaggccuacuccaacugcuaccccuacgacguccccgacuacgccucccuccgcucccucgucgccuccuccggcacccucgaguucaacaacgaguccuucaacuggaccggcgucacccagaacggcaccuccuccgccugcauccgccgcuccaacuccuccuucuucucccgccucaacuggcucacccaccucaacuucaaguaccccgcccucaacgucaccaugcccaacaacgagcaguucgacaagcucuacaucuggggcguccaccaccccggcaccgacaaggaccagaucuuccucuacgcccaguccuccggccgcaucaccgucuccaccaagcgcucccagcaggccgucauccccaacaucggcucccgcccccgcauccgcaacauccccucccgcaucuccaucuacuggaccaucgucaagcccggcgacauccuccucaucaacuccaccggcaaccucaucgccccccgcggcuacuucaagauccgcuccggcaaguccuccaucaugcgcuccgacgccuccaucggcaagugcaaguccgagugcaucacccccaacggcuccauccccaacgacaagcccuuccagaacgucaaccgcaucaccuacggcgccugcccccgcuacgucaagcaguccacccucaagcucgccaccggcaugcgcaacguccccgagaagcagacccgcggcaucuucggcgccaucgccggcuucaucgagaacggcugggagggcauggucgacggcugguacggcuuccgccaccagaacuccgagggccgcggccaggccgccgaccucaaguccacccaggccgccaucgaccagaucaacggcaagcucaaccgccucaucggcaagaccaacgagaaguuccaccagaucgagaaggaguucuccgaggucgagggccgcauccaggaccucgagaaguacgucgaggacaccaagaucgaccucugguccuacaacgccgagcuccucgucgcccucgagaaccagcacaccaucgaccucaccgacuccgagaugaacaagcucuucgagaagaccaagaagcagcuccgcgagaacgccgaggacaugggcaacggcugcuucaagaucuaccacaagugcgacaacgccugcaucggcuccauccgcaacggcaccuacgaccacaacgucuaccgcgacgaggcccucaacaaccgcuuccagaucaagggcgucgagcucaaguccggcuacaaggacuggauccucuggaucuccuucgccaccuccugcuuccuccucugcgucgcccuccucggcuucaucaugugggccugccagaagggcaacauccgcugcaacaucugcaucuga

SEQ ID NO: 108210 - RNA, 1701 nt, Artificial Sequence; identical to SEQ ID NO: 105919
  derived and/or modified CDS sequence (opt2) from hemagglutinin__InfluenzaA__AHZ39997

SEQ ID NO: 108211 - RNA, 1701 nt, Artificial Sequence
  derived and/or modified CDS sequence (opt2) from hemagglutinin__InfluenzaA__AHZ40009
augaagaccaucaucgcccucuccuacauccucugccucgucuucgcccagaagcuccccggcaacgacaacuccaccgccacccucugccucggccaccacgccguccccaacggcaccaucgucaagaccaucaccaacgaccgcaucgaggucaccaacgccaccgagcucguccagaucuccuccaucggcgagaucugcgacuccccccaccagauccucgacggcgagaacugcacccucaucgacgcccuccucggcgacccccagugcgacggcuuccagaacaagaagugggaccucuucgucgagcgcuccaaggccuacuccaacugcuaccccuacgacguccccgacuacgccucccuccgcucccucgucgccuccuccggcacccucgaguucaacaacgaguccuucaacuggaccggcgucacccagaacggcaccuccuccgccugcauccgcaaguccaacuccuccuucuucucccgccucaacuggcucacccaccucaacuucaaguaccccgcccucaacgucaccaugcccaacaacgagcaguucgacaagcucuacaucuggggcguccaccaccccggcaccgacaaggaccagaucuuccucuacgcccaguccuccggccgcaucaccgucuccaccaagcgcucccagcaggccgucauccccaacaucggcucccgcccccgcauccgcaacauccccucccgcaucuccaucuacuggaccaucgucaagcccggcgacauccuccucaucaacuccaccggcaaccucaucgccccccgcggcuacuucaagauccgcuccggcaaguccuccaucaugcgcuccgacgcccccaucggcaagugcaaguccgagugcaucacccccaacggcuccauccccaacgacaagcccuuccagaacgucaaccgcaucaccuacggcgccugcccccgcuacgucaagcaguccacccucaagcucgccaccggcaugcgcaacguccccgagaagcagacccgcggcaucuucggcgccaucgccggcuucaucgagaacggcugggagggcauggucgacggcugguacggcuuccgccaccagaacuccgagggccgcggccaggccgccgaccucaaguccacccaggccgccaucgaccagaucaacggcaagcucaaccgccucaucggcaagaccaacgagaaguuccaccagaucgagaaggaguucuccgaggucgagggccgcauccaggaccucgagaaguacgucgaggacaccaagaucgaccucugguccuacaacgccgagcuccucgucgcccucgagaaccagcacaccaucgaccucaccgacuccgagaugaacaagcucuucgagaagaccaagaagcagcuccgcgagaacgccgaggacaugggcaacggcugcuucaagaucuaccacaagugcgacaacgccugcaucggcuccauccgcaacggcaccuacgaccacgacgucuaccgcgacgaggcccucaacaaccgcuuccagaucaagggcgucgagcucaaguccggcuacaaggacuggauccucuggaucuccuucgccaucuccugcuuccuccucugcgucgcccuccucggcuucaucaugugggccugccagaagggcaacauccgcugcaacaucugcaucuga

SEQ ID NO: 108212 - RNA, 1701 nt, Artificial Sequence; identical to SEQ ID NO: 105919
  derived and/or modified CDS sequence (opt2) from hemagglutinin__InfluenzaA__AHZ40021

SEQ ID NO: 108213 - RNA, 1701 nt, Artificial Sequence; identical to SEQ ID NO: 105894
  derived and/or modified CDS sequence (opt2) from hemagglutinin__InfluenzaA__AHZ40033

SEQ ID NO: 108214 - RNA, 1701 nt, Artificial Sequence; identical to SEQ ID NO: 105919
  derived and/or modified CDS sequence (opt2) from hemagglutinin__InfluenzaA__AHZ40045

SEQ ID NO: 108215 - RNA, 1701 nt, Artificial Sequence; identical to SEQ ID NO: 105919
  derived and/or modified CDS sequence (opt2) from hemagglutinin__InfluenzaA__AHZ40060

SEQ ID NO: 108216 - RNA, 1701 nt, Artificial Sequence; identical to SEQ ID NO: 105919
  derived and/or modified CDS sequence (opt2) from hemagglutinin__InfluenzaA__AHZ40072

SEQ ID NO: 108217 - RNA, 1701 nt, Artificial Sequence; identical to SEQ ID NO: 105919
  derived and/or modified CDS sequence (opt2) from hemagglutinin__InfluenzaA__AHZ40084

SEQ ID NO: 108218 - RNA, 1701 nt, Artificial Sequence; identical to SEQ ID NO: 105919
  derived and/or modified CDS sequence (opt2) from hemagglutinin__InfluenzaA__AHZ40096

SEQ ID NO: 108219 - RNA, 1701 nt, Artificial Sequence; identical to SEQ ID NO: 105920
  derived and/or modified CDS sequence (opt2) from hemagglutinin__InfluenzaA__AHZ40108

SEQ ID NO: 108220 - RNA, 1701 nt, Artificial Sequence; identical to SEQ ID NO: 106033
  derived and/or modified CDS sequence (opt2) from hemagglutinin__InfluenzaA__AHZ40120

SEQ ID NO: 108221 - RNA, 1701 nt, Artificial Sequence
  derived and/or modified CDS sequence (opt2) from hemagglutinin__InfluenzaA__AHZ40130
augaagaccaucaucgcccucuccuacauccucugccucgucuucgcccagaagcuccccggcaacgacaacuccaccgccacccucugccucggccaccacgccguccccaacggcaccaucgucaagaccaucaccaacgaccgcaucgaggucaccaacgccaccgagcucguccagaacuccuccaucggcgagaucugcgacuccccccaccagauccucgacggcgagaacugcacccucaucgacgcccuccucggcgacccccagugcgacggcuuccagaacaagaagugggaccucuucgucgagcgcuccaaggccuacuccaacugcuaccccuacgacguccccgacuacgccucccuccgcucccucgucgccuccuccggcacccucgaguucaacaacgaguccuucaacuggaccggcgucacccagaacggcaccuccuccgccugcauccgccgcuccaacuccuccuucuucucccgccucaacuggcucacccaccucaacuucaaguaccccgcccucaacgucaccaugcccaacaacgagcaguucgacaagcucuacaucuggggcguccaccaccccggcaccgacaaggaccagaucuuccucuacgcccaguccuccggccgcaucaccgucuccaccaagcgcucccagcaggccgucauccccaacaucggcucccgcccccgcauccgcaacauccccucccgcaucuccaucuacuggaccaucgucaagcccggcgacauccuccucaucaacuccaccggcaaccucaucgccccccgcggcuacuucaagauccgcuccggcaaguccuccaucaugcgcuccgacgcccccaucggcaagugcaaguccgagugcaucacccccaacggcuccauccccaacgacaagcccuuccagaacgucaaccgcaucaccuacggcgccugcccccgcuacgucaagcaguccacccucaagcucgccaccggcaugcgcaacguccccgagaagcagacccgcggcaucuucggcgccaucgccggcuucaucgagaacggcugggagggcauggucgacggcugguacggcuuccgccaccagaacuccgagggccgcggccaggccgccgaccucaaguccacccaggccgccaucgaccagaucaacggcaagcucaaccgccucaucggcaagaccaacgagaaguuccaccagaucgagaaggaguucuccgaggucgagggccgcauccaggaccucgagaaguacgucgaggacaccaagaucgaccucugguccuacaacgccgagcuccucgucgcccucgagaaccagcacaccaucgaccucaccgacuccgagaugaacaagcucuucgagaagaccaagaagcagcuccgcgagaacgccgaggacaugggcaacggcugcuucaagaucuaccacaagugcgacaacgccugcaucggcuccauccgcaacggcaccuacgaccacaacgucuaccgcgacgaggcccucaacaaccgcuuccagaucaagggcgucgagcucaaguccggcuacaagaacuggauccucuggaucuccuucgccaucuccugcuuccuccucugcgucgcccuccucggcuucaucaugugggccugccagaagggcaacauccgcugcaacaucugcaucuga

SEQ ID NO: 108222 - RNA, 1701 nt, Artificial Sequence
  derived and/or modified CDS sequence (opt2) from hemagglutinin__InfluenzaA__AHZ40142
augaagaccaucaucgcccucuccuacauccucugccucgucuucgcccagaagcuccccggcaacgacaacuccaccgccacccucugccucggccaccacgccguccccaacggcaccaucgucaagaccaucaccaacgaccgcaucgaggucaccaacgccaccgagcucguccagaacuccuccaucggcgagaucugcgacuccccccaccagauccucgacggcgagaacugcacccucaucgacgcccuccucggcgacccccagugcgacggcuuccaggacaagaagugggaccucuucgucgagcgcuccaaggccuacuccaacugcuaccccuacgacguccccgacuacgccucccuccgcucccucgucgccuccuccggcacccucgaguucaacaacgagaacuucaacuggaccggcgucacccagaacggcaccuccuccgccugcauccgccgcuccaacuccuccuucuucucccgccucaacuggcucacccaccucaacuucaaguaccccgcccucaacgucaccaugcccaacaacgagcaguucgacaagcucuacaucuggggcguccaccaccccggcaccgacaaggaccagaucuuccucuacgcccaguccuccggccgcaucaccgucuccaccaagcgcucccagcaggccgucauccccaacaucggcucccgcccccgcauccgcaacauccccucccgcaucuccaucuacuggaccaucgucaagcccggcgacauccuccucaucaacuccaccggcaaccucaucgccccccgcggcuacuucaagauccgcuccggcaaguccuccaucaugcgcuccgacgcccccaucggcaagugcaaguccgagugcaucacccccaacggcuccauccccaacgaccgccccuuccagaacgucaaccgcaucaccuacggcgccugcccccgcuacgucaagcaguccacccucaagcucgccaccggcaugcgcaacguccccgagaagcagacccgcggcaucuucggcgccaucgccggcuucaucgagaacggcugggagggcauggucgacggcugguacggcuuccgccaccagaacuccgagggccgcggccaggccgccgaccucaaguccacccaggccgccaucgaccagaucaacggcaagcucaaccgccucaucggcaagaccaacgagaaguuccaccagaucgagaaggaguucuccgaggucgagggccgcauccaggaccucgagaaguacgucgaggacaccaagaucgaccucugguccuacaacgccgagcuccucgucgcccucgagaaccagcacaccaucgaccucaccgacuccgagaugaacaagcucuucgagaagaccaagaagcagcuccgcgagaacgccgaggacaugggcaacggcugcuucaagaucuaccacaagugcgacaacgccugcaucggcuccauccgcaacggcaccuacgaccacgacgucuaccgcgacgaggcccucaacaaccgcuuccagaucaagggcgucgagcucaaguccggcuacaaggacuggauccucuggaucuccuucgccaucuccugcuuccuccucugcgucgcccuccucggcuucaucaugugggccugccagaagggcaacauccgcugcaacaucugcaucuga

SEQ ID NO: 108223 - RNA, 1701 nt, Artificial Sequence
  derived and/or modified CDS sequence (opt2) from hemagglutinin__InfluenzaA__AHZ40154
augaagaccaucaucgcccucuccuacauccucugccucggcuucgcccaggagcuccccggcaacgacaacuccaccgccacccucugccucggccaccacgccguccccaacggcaccaucgucaagaccaucaccaacgaccagaucgaggucaccaacgccaccgagcucguccaguccuccuccaccggcgagaucugcaacuccccccaccagauccucgacggcgagaacugcacccucaucgacgcccuccucggcgacccccagugcgacggcuuccagaacaagaagugggaccucuucgucgagcgcuccaaggcccacuccaacugcuaccccuacgacguccccgacuacgccucccuccgcucccucgucgccuccuccggcacccucgaguucaacaacgaguccuucaacuggaccggcgucacccagaacggcaccuccuccgccugcauccgcggcuccaacaacuccuucuucucccgccucaacuggcucacccaccucaacuucaaguaccccgcccucaacgucaccaugcccaacaacgagcaguucgacaagcucuacaucuggggcguccaccaccccggcaccgacaaggaccagaucuuccucuacgcccaggccuccggccgcaucaccgucuccaccaagcgcucccagcaggccgucauccccaacaucggcucccgcccccgcguccgcaacauccccucccgcgucuccaucuacuggaccaucgucaagcccggcgacaugcuccucaucaacuccaccggcaaccucaucgccccccgcggcuacuucaagauccgcuccggcaaguccuccaucaugcgcuccgacgcccccaucggcaagugcaacuccgccugcaucacccccaacggcuccauccccaacgacaagcccuuccagaacgucaaccgcaucaccuacggcgccugcccccgcuacgucaagcagaacacccucaagcucgccaccggcaugcgcaacguccccgagaagcagacccgcggcaucuucggcgccaucgccggcuucaucgagaacggcugggagggcauggucgacggcugguacggcuuccgccaccagaacuccgagggccgcggccaggccgccgaccucaaguccacccaggccgccaucgaccagaucaacggcaagcucaaccgccucaucggcaagaccaacgagaaguuccaccagaucgagaaggaguucuccgaggucgagggccgcauccaggaccucgagaaguacgucgaggacaccaagaucgaccucugguccuacaacgccgagcuccucgucgcccucgagaaccagcacaccaucgaccucaccgacuccgagaugaacaagcucuucgagaagaccaagaagcagcuccgcgagaacgccgaggacaugggcaacggcugcuucaagaucuaccacaagugcaacaacgccugcaucggcuccauccgcaacggcaccuacgaccacgacgucuaccgcgacgaggcccucaacaaccgcuuccagaucaagggcgucgagcucaaguccggcuacaaggacuggauccucuggaucuccuucgccaucuccugcuuccuccucugcgucgcccuccucggcuucaucaugugggccugccagaagggcaacauccgcugcaacaucugcaucuga

SEQ ID NO: 108224 - RNA, 1701 nt, Artificial Sequence
  derived and/or modified CDS sequence (opt2) from hemagglutinin__InfluenzaA__AHZ40166
augaaggccauccucgucguccuccucuacaccuucgccaccgccaacgccgacacccucugcaucggcuaccacgccaacaacuccaccgacaccgucgacaccguccucgagaagaacgucaccgucacccacuccgucaaccuccucgaggacaagcacaacggcaagcucugcaagcuccgcggcgucgccccccuccaccucggcaagugcaacaucgccggcuggauccucggcaaccccgagugcgagucccucuccaccgccuccuccugguccuacaucgucgagaccuccuccuccgacaacggcaccugcuaccccggcgacuucaucaacuacgaggagcuccgcgagcagcucuccuccgucuccuccuucgagcgcuucgagaucuuccccaagaccuccuccuggcccaaccacgacuccaacaagggcgucaccgccgccugcccccacgccggcgccaaguccuucuacaagaaccucaucuggcucgucaagaagggcaacuccuaccccaagcucuccaaguccuacaucaacgacaagggcaaggagguccucguccucuggggcauccaccaccccuccaccaccgccgaccagcagucccucuaccagaacgccgacgccuacgucuucgucggcaccucccgcuacuccaagaaguucaagcccgagaucgccauccgccccaagguccgcgaccaggagggccgcaugaacuacuacuggacccucaucgagcccggcgacaagaucaccuucgaggccaccggcaaccucgucgucccccgcuacgccuucgccauggagcgcaacgccggcuccggcaucaucaucuccgacacccccguccacgacugcaacaccaccugccagacccccgagggcgccaucaacaccucccuccccuuccagaacauccaccccaucaccaucggccgcugccccaaguacgucaaguccaccaagcuccgccucgccaccggccuccgcaacguccccuccauccagucccgcggccucuucggcgccaucgccggcuucaucgagggcggcuggaccggcauggucgacggcugguacggcuaccaccaccagaacgagcagggcuccggcuacgccgccgaccucaaguccacccagaacgccaucgacaagaucaccaacaaggucaacuccgucaucgagaagaugaacacccaguucaccgccgucggcaaggaguucaaccaccucgagaagcgcaucgagaaccucaacaagaaggucgacgacggcuuccucgacaucuggaccuacaacgccgagcuccucguccuccucgagaacgagcgcacccucgacuaccacgacuccaacgucaagaaccucuacgagaagguccgcaaccagcucaagaacaacgccaaggagaucggcaacggcugcuucgaguucuaccacaagugcgacaacaccugcauggaguccgucaagaacggcaccuacgacuaccccaaguacuccgaggaggccaagcucaaccgcgagaagaucgacggcgucaagcucgaguccacccgcaucuaccagauccucgccaucuacuccaccgucgccuccucccucguccucgucgucucccucggcgccaucuccuucuggaugugcuccaacggcucccuccagugccgcaucugcaucuga

SEQ ID NO: 108225 - RNA, 1701 nt, Artificial Sequence; identical to SEQ ID NO: 105919
  derived and/or modified CDS sequence (opt2) from hemagglutinin__InfluenzaA__AHZ40177

SEQ ID NO: 108226 - RNA, 1701 nt, Artificial Sequence; identical to SEQ ID NO: 105919
  derived and/or modified CDS sequence (opt2) from hemagglutinin__InfluenzaA__AHZ40189

SEQ ID NO: 108227 - RNA, 1701 nt, Artificial Sequence; identical to SEQ ID NO: 105919
  derived and/or modified CDS sequence (opt2) from hemagglutinin__InfluenzaA__AHZ40201

SEQ ID NO: 108228 - RNA, 1701 nt, Artificial Sequence; identical to SEQ ID NO: 105904
  derived and/or modified CDS sequence (opt2) from hemagglutinin__InfluenzaA__AHZ40213

SEQ ID NO: 108229 - RNA, 1701 nt, Artificial Sequence; identical to SEQ ID NO: 105871
  derived and/or modified CDS sequence (opt2) from hemagglutinin__InfluenzaA__AHZ40225

SEQ ID NO: 108230 - RNA, 1701 nt, Artificial Sequence
  derived and/or modified CDS sequence (opt2) from hemagglutinin__InfluenzaA__AHZ40237
augaagaccaucaucgcccucuccuacauccucugccucgucuucgcccagaagcuccccggcaacgacaacuccaccgccacccucugccucggccaccacgccguccccaacggcaccaucgucaagaccaucaccaacgaccagaucgaggucaccaacgccaccgagcucguccagaacuccuccaucggcgagaucugcgacuccccccaccagauccucgacggcgagaacugcacccucaucgacgcccuccucggcgacccccagugcgacggcuuccagaacaagaagugggaccucuucgucgagcgcuccaaggccuacuccaacugcuaccccuacgacguccccgacuacgccucccuccgcucccucgucgccuccuccggcacccucgaguucaacaacgaguccuucaacugggccggcgucacccagaacggcaccuccuccgccugcauccgcggcuccaacuccuccuucuucucccgccucaacuggcucacccaccucaacuucaaguaccccgcccucaacgucaccaugcccaacaacgagcaguucgacaagcucuacaucuggggcguccaccaccccggcaccgacaaggaccagaucuuccucuacgcccaguccuccggccgcaucaccgucuccaccaagcgcucccagcaggccgucauccccaacaucggcucccgcccccgcauccgcaacauccccucccgcaucuccaucuacuggaccaucgucaagcccggcgacauccuccucaucaacuccaccggcaaccucaucgccccccgcggcuacuucaagauccgcuccggcaaguccuccaucaugcgcuccgacgcccccaucggcaagugcaaguccgagugcaucacccccaacggcuccauccccaccgacaagcccuuccagaacgucaaccgcaucaccuacggcgccugcccccgcuacgucaagcaguccacccucaagcucgccaccggcaugcgcaacguccccgagaagcagacccgcggcaucuucggcgccaucgccggcuucaucgagaacggcugggagggcauggucgacggcugguacggcuuccgccaccagaacuccgagggccgcggccaggccgccgaccucaaguccacccaggccgccaucgaccagaucaacggcaagcucaaccgccucaucggcaagaccaacgagaaguuccaccagaucgagaaggaguucuccgaggucgagggccgcauccaggaccucgagaaguacgucgaggacaccaagaucgaccucugguccuacaacgccgagcuccucgucgcccucgagaaccagcacaccaucgaccucaccgacuccgagaugaacaagcucuucgagaagaccaagaagcagcuccgcgagaacgccgaggacaugggcaacggcugcuucaagaucuaccacaagugcgacaacgccugcaucggcuccauccgcaacggcaccuacgaccacgacgucuaccgcgacgaggcccucaacaaccgcuuccagaucaagggcgucgagcucaaguccggcuacaaggacuggauccucuggaucuccuucgccaucuccugcuuccuccucugcgucgcccuccucggcuucaucaugugggccugccagaagggcaacauccgcugcaacaucugcaucuga

SEQ ID NO: 108231 - RNA, 1701 nt, Artificial Sequence; identical to SEQ ID NO: 105927
  derived and/or modified CDS sequence (opt2) from hemagglutinin__InfluenzaA__AHZ40249

SEQ ID NO: 108232 - RNA, 1701 nt, Artificial Sequence; identical to SEQ ID NO: 105894
  derived and/or modified CDS sequence (opt2) from hemagglutinin__InfluenzaA__AHZ40261

SEQ ID NO: 108233 - RNA, 1701 nt, Artificial Sequence; identical to SEQ ID NO: 106033
  derived and/or modified CDS sequence (opt2) from hemagglutinin__InfluenzaA__AHZ40273

SEQ ID NO: 108234 - RNA, 1701 nt, Artificial Sequence
  derived and/or modified CDS sequence (opt2) from hemagglutinin__InfluenzaA__AHZ40285
augaagaccaucaucgcccucuccuacauccucugccucgucuucgcccagaagcuccccggcaacgacaacuccaccgccacccucugccucggccaccacgccguccccaacggcaccaucgucaagaccaucaccaacgaccagaucgaggucaccaacgccaccgagcucguccaguccuccuccaccggcgagaucugcgacuccccccaccagauccucgacggcgagaacugcacccucaucgacgcccuccucggcgacccccagugcgacggcuuccagaacaagaagugggaccucuucgucgagcgcuccaaggccuacuccaacugcuaccccuacgacguccccgacuacgccucccuccgcucccucgucgccuccuccggcacccucgaguucaacaacgaguccuucaacuggaccggcgucacccagaacggcaccuccuccgccugcauccgccgcuccgacuccuccuucuucucccgccucaacuggcucacccaccucaacuucaaguaccccgcccucaacgucaccaugcccaacaacgagcaguucgacaagcucuacaucuggggcguccaccaccccggcaccgacaaggaccagaucuuccucuacgcccaggccuccggccgcaucaccgucuccaccaagcgcucccagcaguccgucauccccaacaucggcucccgcccccgcauccgcaacauccccucccgcaucuccaucuacuggaccaucgucaagcccggcgacauccuccucaucaacuccaccggcaaccucaucgccccccgcggcuacuucaagauccaguccggcaaguccuccaucaugcgcuccgacacccccaucggcaagugcaacuccgagugcaucacccccaacggcuccauccccaacgacaagcccuuccagaacgucaaccgcaucaccuacggcgccugcccccgcuacgucaagcagaacacccucaagcucgccaccggcaugcgcaacguccccgagaagcagacccgcggcaucuucggcgccaucgccggcuucaucgagaacggcugggagggcauggucgacggcugguacggcuuccgccaccagaacuccgagggccgcggccaggccgccgaccucaaguccacccaggccgccaucgaccagaucaacggcaagcucaaccgccucaucggcaagaccaacgagaaguuccaccagaucgagaaggaguucuccgaggucgagggccgcauccaggaccucgagaaguacgucgaggacaccaagaucgaccucugguccuacaacgccgagcuccucgucgcccucgagaaccagcacaccaucgaccucaccgacuccgagaugaacaagcucuucgagaagaccaagaagcagcuccgcgagaacgccgaggacaugggcaacggcugcuucaagaucuaccacaagugcgacaacgccugcaucggcuccauccgcaacggcaccuacaaccacgacgucuaccgcgacgaggcccucaacaaccgcuuccagaucaagggcgucgagcucaaguccggcuacaaggacuggauccucuggaucuccuucgccaucuccugcuuccuccucugcgucgcccuccucggcuucaucaugugggccugccagaagggcaacauccgcugcaacaucugcaucuga

SEQ ID NO: 108235 - RNA, 1701 nt, Artificial Sequence; identical to SEQ ID NO: 106030
  derived and/or modified CDS sequence (opt2) from hemagglutinin__InfluenzaA__AHZ40297

SEQ ID NO: 108236 - RNA, 1701 nt, Artificial Sequence
  derived and/or modified CDS sequence (opt2) from hemagglutinin__InfluenzaA__AHZ40309
augaagaccaucaucgcccucuccuacauccucugccucgucuucgcccagaagcuccccggcaacgacaacuccaccgccacccucugccucggccaccacgccguccccaacggcaccaucgucaagaccaucaccaacgaccgcaucgaggucaccaacgccaccgagcucguccagaacuccuccaucggcgagaucugcgacuccccccaccagauccucgacggcgagaacugcacccucaucgacgcccuccucggcgacccccagugcgacggcuuccagaacaagaagugggaccucuucgucgagcgcuccaaggccuacuccaacugcuaccccuacgacguccccgacuacgccucccuccgcucccucgucgccuccuccggcacccucgaguucaacaacgaguccuucaacuggaccggcgucacccagaacggcaccuccuccgccugcauccgccgcuccaacaacuccuucuucucccgccucaacuggcucacccaccucaacuucaaguaccccgcccucaacgucaccaugcccaacaacgagcaguucgacaagcucuacaucuggggcguccaccaccccggcaccgacaaggaccagaucuuccucuacgcccaguccuccggccgcaucaccgucuccaccaagcgcucccagcaggccgucauccccaacaucggcucccgcccccgcauccgcaacauccccucccgcaucuccaucuacuggaccaucgucaagcccggcgacauccuccucaucaacuccaccggcaaccucaucgccccccgcggcuacuucaagauccgcaacggcaaguccuccaucaugcgcuccgacgcccccaucggcaagugcaaguccgagugcaucacccccaacggcuccauccccaacgacaagcccuuccagaacgucaaccgcaucaccuacggcgccugcccccgcuacgucaagcaguccacccucaagcucgccaccggcaugcgcaacguccccgagaagcagacccgcggcaucuucggcgccaucgccggcuucaucgagaacggcugggagggcauggucgacggcugguacggcuuccgccaccagaacuccgagggccgcggccaggccgccgaccucaaguccacccaggccgccaucgaccagaucaacggcaagcucaaccgccucaucggcaagaccaacgagaaguuccaccagaucgagaaggaguucuccgaggucgagggccgcauccaggaccucgagaaguacgucgaggacaccaagaucgaccucugguccuacaacgccgagcuccucgucgcccucgagaaccagcacaccaucgaccucaccgacuccgagaugaacaagcucuucgagaagaccaagaagcagcuccgcgagaacgccgaggacaugggcaacggcugcuucaagaucuaccacaagugcgacaacgccugcaucggcuccauccgcaacggcaccuacgaccacgacgucuaccgcgacgaggcccucaacaaccgcuuccagaucaagggcgucgagcucaaguccggcuacaaggacuggauccucuggaucuccuucgccaucuccugcuuccuccucugcgucguccuccucggcuucaucaugugggccugccagaagggcaacauccgcugcaacaucugcaucuga

SEQ ID NO: 108237 - RNA, 1701 nt, Artificial Sequence; identical to SEQ ID NO: 105919
  derived and/or modified CDS sequence (opt2) from hemagglutinin__InfluenzaA__AHZ40321

SEQ ID NO: 108238 - RNA, 1701 nt, Artificial Sequence; identical to SEQ ID NO: 105919
  derived and/or modified CDS sequence (opt2) from hemagglutinin__InfluenzaA__AHZ40333

SEQ ID NO: 108239 - RNA, 1701 nt, Artificial Sequence
  derived and/or modified CDS sequence (opt2) from hemagglutinin__InfluenzaA__AHZ40345
augaagaccaucaucgcccucuccuacauccucugccucgucuucgcccagaagcuccccggcaacgacaacuccaccgccacccucugccucggccaccacgccguccccaacggcaccaucgucaagaccaucaccaacgaccgcaucgaggucaccaacgccaccgagcucguccagaacuccuccaucggcgagaucugcgacuccccccaccagauccucgacggcgagaacugcacccucaucgacgcccuccucggcgacccccagugcgacggcuuccagaacaagaagugggaccucuucgucgagcgcuccaaggccuacuccaacugcuaccccuacgacguccccgacuacgccucccuccgcucccucgucgccuccuccggcacccucgaguucaacaacgaguccuucaacuggaccggcgucacccagaacggcaccuccuccgccugcauccgccgcuccaacuccuccuucuucucccgccucaacuggcucacccaccucaacuucaaguaccccgcccucaacgucaccaugcccaacaacgagcaguucgacaagcucuacaucuggggcguccaccaccccggcaccgacaaggaccagaucuuccucuacgcccaguccuccggccgcaucaccgucuccaccaagcgcucccagcaggccgucauccccaacaucggcucccgcccccgcauccgcaacauccccucccgcaucuccaucuacuggaccaucgucaagcccggcgacauccuccucaucaacuccaccggcaaccucaucgccccccgcggcuacuucaagauccgcuccggcaaguccuccaucaugcgcuccgacgcccccaucggcaagugcaaguccgagugcaucacccccaacggcuccauccccuccgacaagcccuuccagaacgucaaccgcaucaccuacggcgccugcccccgcuacgucaagcaguccacccucaagcucgccaccggcaugcgcaacguccccgagaagcagacccgcggcaucuucggcgccaucgccggcuucaucgagaacggcugggagggcauggucgacggcugguacggcuuccgccaccagaacuccgagggccgcggccaggccgccgaccucaaguccacccaggccgccaucgaccagaucaacggcaagcucaaccgccucaucggcaagaccaacgagaaguuccaccagaucgagaaggaguucuccgaggucgagggccgcauccaggaccucgagaaguacgucgaggacaccaagaucgaccucugguccuacaacgccgagcuccucgucgcccucgagaaccagcacaccaucgaccucaccgacuccgagaugaacaagcucuucgagaagaccaagaagcagcuccgcgagaacgccgaggacaugggcaacggcugcuucaagaucuaccacaagugcgacaacgccugcaucggcuccauccgcaacggcaccuacgaccacgacgucuaccgcgacgaggcccucaacaaccgcuuccagaucaagggcgucgagcucaaguccggcuacaaggacuggauccucuggaucuccuucgccaucuccugcuuccuccucugcgucgcccuccucggcuucaucaugugggccugccagaagggcaacauccgcugcaacaucugcaucuga

SEQ ID NO: 108240 - RNA, 1701 nt, Artificial Sequence; identical to SEQ ID NO: 105920
  derived and/or modified CDS sequence (opt2) from hemagglutinin__InfluenzaA__AHZ40357

SEQ ID NO: 108241 - RNA, 1701 nt, Artificial Sequence
  derived and/or modified CDS sequence (opt2) from hemagglutinin__InfluenzaA__AHZ40369
augaagaccaucaucgcccucuccuacauccucugccucgucuucgcccagaagcuccccggcaacgacaacuccaccgccacccucugccucggccaccacgccguccccaacggcaccaucgucaagaccaucaccaacgaccgcaucgaggucaccaacgccaccgagcucguccagaacuccuccaucggcgagaucugcgacuccccccaccagauccucgacggcgagaacugcacccucaucgacgcccuccucggcgacccccagugcgacggcuuccagaacaagaagugggaccucuucgucgagcgcuccaaggccuacuccaacugcuaccccuacgacguccccgacuacgccucccuccgcucccucgucgccuccuccggcacccucgaguucaacaacgaguccuucaacuggaccggcgucacccagaacggcaccuccuccgccugcauccgccgcuccaacuccuccuucuucucccgccucaacuggcucacccaccucaacuucaaguaccccgcccucaacgucaccaugcccaacaacgagcaguucgacaagcucuacaucuggggcguccaccaccccggcaccgacaaggaccagaucuuccucuacgcccaguccuccggccgcaucaccgucuccaccaagcgcucccagcaggccgucauccccaacaucggcucccgcccccgcauccgcaacauccccucccgcaucuccaucuacuggaccaucgucaagcccggcgacauccuccucaucaacuccaccggcaaccucaucgccccccgcggcuacuucaagauccgcuccggccgcuccuccaucaugcgcuccgacgcccccaucggcaagugcaaguccgagugcaucacccccaacggcuccauccccaacgacaagcccuuccagaacgucaaccgcaucaccuacggcgccugcccccgcuacgucaagcaguccacccucaagcucgccaccggcaugcgcaacguccccgagaagcagacccgcggcaucuucggcgccaucgccggcuucaucgagaacggcugggagggcauggucgacggcugguacggcuuccgccaccagaacuccgagggccgcggccaggccgccgaccucaaguccacccaggccgccaucgaccagaucaacggcaagcucaaccgccucaucggcaagaccaacgagaaguuccaccagaucgagaaggaguucuccgaggucgagggccgcauccaggaccucgagaaguacgucgaggacaccaagaucgaccucugguccuacaacgccgagcuccucgucgcccucgagaaccagcacaccaucgaccucaccgacuccgagaugaacaagcucuucgagaagaccaagaagcagcuccgcgagaacgccgaggacaugggcaacggcugcuucaagaucuaccacaagugcgacaacgccugcaucggcuccauccgcaacggcaccuacgaccacgacgucuaccgcgacgaggcccucaacaaccgcuuccagaucaagggcgucgagcucaaguccggcuacaaggacuggauccucuggaucuccuucgccaucuccugcuuccuccucugcgucgcccuccucggcuucaucaugugggccugccagaagggcaacauccgcugcaacaucugcaucuga

SEQ ID NO: 108242 - RNA, 1701 nt, Artificial Sequence; identical to SEQ ID NO: 106030
  derived and/or modified CDS sequence (opt2) from hemagglutinin__InfluenzaA__AHZ40381

SEQ ID NO: 108243 - RNA, 1701 nt, Artificial Sequence; identical to SEQ ID NO: 105919
  derived and/or modified CDS sequence (opt2) from hemagglutinin__InfluenzaA__AHZ40393

SEQ ID NO: 108244 - RNA, 1701 nt, Artificial Sequence; identical to SEQ ID NO: 105919
  derived and/or modified CDS sequence (opt2) from hemagglutinin__InfluenzaA__AHZ40405

SEQ ID NO: 108245 - RNA, 1701 nt, Artificial Sequence; identical to SEQ ID NO: 105919
  derived and/or modified CDS sequence (opt2) from hemagglutinin__InfluenzaA__AHZ40417

SEQ ID NO: 108246 - RNA, 1701 nt, Artificial Sequence
  derived and/or modified CDS sequence (opt2) from hemagglutinin__InfluenzaA__AHZ40429
augaagaccaucaucgcccucuccuacauccucugccucgucuucgcccaggagcuccccggcaacgacgacuccaccgccacccucugccucggccaccacgccguccccaacggcaccaucgucaagaccaucaccaacgaccagaucgaggucaccaacgccaccgagcucguccaguccuccuccaccggcgagaucugcaacuccccccaccagauccucgacggcgagaacugcacccucaucgacgcccuccucggcgacccccagugcgacggcuuccagaacaagaagugggaccucuucgucgagcgcuccaaggcccacuccaacugcuaccccuacgacguccccgacuacgccucccuccgcucccucgucgccuccuccggcacccucgaguucaagaacgaguccuucaacuggaccggcgucacccagaacggcaccuccuccgccugcauccgccgcuccaacaacuccuucuucucccgccucaacuggcucacccaccucaacuucaaguaccccgcccucaacgucaccaugcccaacaacgagcaguucgacaagcucuacaucuggggcguccaccaccccggcaccgacaaggaccagaucuuccucuacgcccaggccuccggccgcaucaccgucuccaccaagcgcucccagcaggccgucauccccaacaucggcucccgcccccgcguccgcaacauccccucccgcgucuccaucuacuggaccaucgucaagcccggcgacauccuccucaucaacuccaccggcaaccucaucgccccccgcggcuacuucaagauccgcuccggcaaguccuccaucaugcgcuccgacgcccccaucggcaagugcaacuccgccugcaucacccccaacggcuccauccccaacgacaagcccuuccagaacgucaaccgcaucaccuacggcgccugcccccgcuacgucaagcagaacacccucaagcucgccaccggcaugcgcaacguccccgagaagcagacccgcggcaucuucggcgccaucgccggcuucaucgagaacggcugggagggcauggucgacggcugguacggcuuccgccaccagaacuccgagggccgcggccaggccgccgaccucaaguccacccaggccgccaucgaccagaucaacggcaagcucaaccgccucaucggcaagaccaacgagaaguuccaccagaucgagaaggaguucuccgaggucgagggccgcauccaggaccucgagaaguacgucgaggacaccaagaucgaccucugguccuacaacgccgagcuccucgucgcccucgagaaccagcacaccaucgaccucaccgacuccgagaugaacaagcucuucgagaagaccaagaagcagcuccgcgagaacgccgaggacaugggcaacggcugcuucaagaucuaccacaagugcgacaacgccugcaucggcuccauccgcaacggcaccuacgaccacgacgucuaccgcgacgaggcccucaacaaccgcuuccagaucaagggcgucgagcucaaguccggcuacaaggacuggauccucuggaucuccuucgccaucuccugcuuccuccucugcgucgcccuccucggcuucaucaugugggccugccagaagggcaacauccgcugcaacaucugcaucuga

SEQ ID NO: 108247 - RNA, 1701 nt, Artificial Sequence; identical to SEQ ID NO: 105919
  derived and/or modified CDS sequence (opt2) from hemagglutinin__InfluenzaA__AHZ40441

SEQ ID NO: 108248 - RNA, 1701 nt, Artificial Sequence; identical to SEQ ID NO: 106062
  derived and/or modified CDS sequence (opt2) from hemagglutinin__InfluenzaA__AHZ40453

SEQ ID NO: 108249 - RNA, 1701 nt, Artificial Sequence
  derived and/or modified CDS sequence (opt2) from hemagglutinin__InfluenzaA__AHZ40465
augaagaccaucaucgcccucuccuacauccucugccucgucuucgcccagaagcuccccggcaacgacaacuccaccgccacccucugccucggccaccacgccguccccaacggcaccaucgucaagaccaucaccaacgaccgcaucgaggucaccaacgccaccgagcucguccagaacuccuccaucggcgagaucugcgacuccccccaccagauccucgacggcgagaacugcacccucaucgacgcccuccucggcgacccccagugcgacggcuuccagaacaagaagugggaccucuucgucgagcgcuccaaggccuacuccaacugcuaccccuacgacaugcccgacuacgccucccuccgcucccucgucgccuccuccggcacccucgaguucaacaacgaguccuucaacuggaccggcgucacccagaacggcaccuccuccgccugcauccgccgcuccaacuccuccuucuucucccgccucaacuggcucacccaccucaacuucaaguaccccgcccucaacgucaccaugcccaacaacgagcgcuucgacaagcucuacaucuggggcguccaccaccccggcaccgacaaggaccagaucuuccucuacgcccaguccuccggccgcaucaccgucuccaccaagcgcucccagcaggccgucauccccaacaucggcucccgcccccgcauccgcaacauccccucccgcaucuccaucuacuggaccaucgucaagcccggcgacauccuccucaucaacuccaccggcaaccucaucgccccccgcggcuacuucaagauccgcuccggcaaguccuccaucaugcgcuccgacgcccccaucggcaagugcaaguccgagugcaucacccccaacggcuccauccccaacgacaagcccuuccagaacgucaaccgcaucaccuacggcgccugcccccgcuacgucaagcaguccacccucaagcucgccaccggcaugcgcaacguccccgagaagcagacccgcggcaucuucggcgccaucgccggcuucaucgagaacggcugggagggcauggucgacggcugguacggcuuccgccaccagaacuccgagggccgcggccaggccgccgaccucaaguccacccaggccgccaucgaccagaucaacggcaagcucaaccgccucaucggcaagaccaacgagaaguuccaccagaucgagaaggaguucuccgaggucgagggccgcauccaggaccucgagaaguacgucgaggacaccaagaucgaccucugguccuacaacgccgagcuccucgucgcccucgagaaccagcacaccaucgaccucaccgacuccgagaugaacaagcucuucgagaagaccaagaagcagcuccgcgagaacgccgaggacaugggcaacggcugcuucaagaucuaccacaagugcgacaacgccugcaucggcuccauccgcaacggcaccuacgaccacaacgucuaccgcgacgaggcccucaacaaccgcuuccagaucaagggcgucgagcucaaguccggcuacaaggacuggauccucuggaucuccuucgccaucuccugcuuccuccucugcgucgcccuccucggcuucaucaugugggccugccagaagggcaacauccgcugcaacaucugcaucuga

SEQ ID NO: 108250 - RNA, 1701 nt, Artificial Sequence; identical to SEQ ID NO: 105920
  derived and/or modified CDS sequence (opt2) from hemagglutinin__InfluenzaA__AHZ40477

SEQ ID NO: 108251 - RNA, 1701 nt, Artificial Sequence; identical to SEQ ID NO: 106096
  derived and/or modified CDS sequence (opt2) from hemagglutinin__InfluenzaA__AHZ40489

SEQ ID NO: 108252 - RNA, 1701 nt, Artificial Sequence; identical to SEQ ID NO: 105919
  derived and/or modified CDS sequence (opt2) from hemagglutinin__InfluenzaA__AHZ40500

SEQ ID NO: 108253 - RNA, 1701 nt, Artificial Sequence; identical to SEQ ID NO: 105919
  derived and/or modified CDS sequence (opt2) from hemagglutinin__InfluenzaA__AHZ40512

SEQ ID NO: 108254 - RNA, 1701 nt, Artificial Sequence
  derived and/or modified CDS sequence (opt2) from hemagglutinin__InfluenzaA__AHZ40524
augaagaccaucaucgcccucuccuacauccucugccucgucuucgcccagaagcuccccggcaacgacaacuccaccgccacccucugccucggccaccacgccguccccaacggcaccaucgucaagaccaucaccaacgaccgcaucgaggucaccaacgccaccgagcucguccagaacuccuccaucggcgagaucugcgacuccccccaccagauccucgacggcgagaacugcacccucaucgacgcccuccucggcgacccccagugcgacggcuuccagaacaagaagugggaccucuucgucgagcgcuccaaggccuacuccaacugcuaccccuacgacguccccgacuacgccucccuccgcucccucgucgccuccuccggcacccucgaguucaacaacgaguccuucaacugggccggcgucacccagaacggcaccuccuccgccugcauccgcggcuccaacuccuccuucuucucccgccucaacuggcucacccaccucaacuucaaguaccccgcccucaacgucaccaugcccaacaacgagcaguucgacaagcucuacaucuggggcguccaccaccccggcaccgacaaggaccagaucuuccucuacgcccaguccuccggccgcaucaccgucuccaccaagcgcucccagcaggccgucauccccaacaucggcucccgcccccgcauccgcaacauccccucccgcaucuccaucuacuggaccaucgucaagcccggcgacauccuccucaucaacuccaccggcaaccucaucgccccccgcggcuacuucaagauccgcuccggcaaguccuccaucaugcgcuccgacgcccccaucggcaagugcaaguccgagugcaucacccccaacggcuccauccccaacgacaagcccuuccagaacgucaaccgcaucaccuacggcgccugcccccgcuacgucaagcaguccacccucaagcucgccaccggcaugcgcaacguccccgagcgccagacccgcggcaucuucggcgccaucgccggcuucaucgagaacggcugggagggcauggucgacggcugguacggcuuccgccaccagaacuccgagggccgcggccaggccgccgaccucaaguccacccaggccgccaucgaccagaucaacggcaagcucaaccgccucaucggcaagaccaacgagaaguuccaccagaucgagaaggaguucuccgaggucgagggccgcauccaggaccucgagaaguacgucgaggacaccaagaucgaccucugguccuacaacgccgagcuccucgucgcccucgagaaccagcacaccaucgaccucaccgacuccgagaugaacaagcucuucgagaagaccaagaagcagcuccgcgagaacgccgaggacaugggcaacggcugcuucaagaucuaccacaagugcgacaacgccugcaucggcuccauccgcaacggcaccuacgaccacgacgucuaccgcgacgaggcccucaacaaccgcuuccagaucaagggcgucgagcucaaguccggcuacaaggacuggauccucuggaucuccuucgccaucuccugcuuccuccucugcgucgcccuccucggcuucaucaugugggccugccagaagggcaacauccgcugcaacaucugcaucuga

SEQ ID NO: 108255 - RNA, 1701 nt, Artificial Sequence; identical to SEQ ID NO: 107806
  derived and/or modified CDS sequence (opt2) from hemagglutinin__InfluenzaA__AHZ40536

SEQ ID NO: 108256 - RNA, 1701 nt, Artificial Sequence; identical to SEQ ID NO: 105919
  derived and/or modified CDS sequence (opt2) from hemagglutinin__InfluenzaA__AHZ40548

SEQ ID NO: 108257 - RNA, 1701 nt, Artificial Sequence; identical to SEQ ID NO: 105894
  derived and/or modified CDS sequence (opt2) from hemagglutinin__InfluenzaA__AHZ40572

SEQ ID NO: 108258 - RNA, 1701 nt, Artificial Sequence; identical to SEQ ID NO: 105894
  derived and/or modified CDS sequence (opt2) from hemagglutinin__InfluenzaA__AHZ40583

SEQ ID NO: 108259 - RNA, 1701 nt, Artificial Sequence
  derived and/or modified CDS sequence (opt2) from hemagglutinin__InfluenzaA__AHZ40595
augaaggccauccucgucgucaugcucuacaccuucgccaccgccaacgccgacacccucugcaucggcuaccacgccaacaacuccaccgacaccgucgacaccguccucgagaagaacgucaccgucacccacuccgucaaccuccucgaggacaagcacgacggcaagcucugcaagcuccgcggcgucgccccccuccaccucggcaagugcaacaucgccggcuggauccucggcaaccccgagugcgagucccucuccaccgccuccuccugguccuacaucgucgagaccuccggcuccgacaacggcaccugcuaccccggcgacuucaucgacuacgaggagcuccgcgagcagcucuccuccgucuccuccuucgagcgcuucgagaucuuccccaagaccuccuccuggcccaaccacgacuccaacaagggcgucaccgccgccugcccccacgccggcgccaagggcuucuacaagaaccucaucuggcucgucaagaagggcaacuccuaccccaagcucuccaucuccuacaucaacgacaagggcaaggagguccucguccucuggggcauccaccaccccuccaccaccgccgaccagcagucccucuaccagaacgccgacaccuacgucuucgucggcaccucccgcuacuccaagaaguucaagcccgagaucgccauccgccccaagguccgcgaccaggagggccgcaugaacuacuacuggacccucgucgagcccggcgacaagaucaccuucgaggccaccggcaaccucgucgucccccgcuacgccuucgccaugaagcgcaacgccggcuccggcaucaucaucuccgacacccccguccacgacugcaacaccaccugccagacccccaagggcgccaucaacaccucccuccccuuccagaacauccaccccaucaccaucggcaagugccccaaguacgucaaguccaccaagcuccgccucgccaccggccuccgcaacguccccuccauccagucccgcggccucuucggcgccaucgccggcuucaucgagggcggcuggaccggcauggucgacggcugguacggcuaccaccaccagaacgagcagggcuccggcuacgccgccgaccucaaguccacccagaacgccaucgacaagaucaccaacaaggucaacuccgucaucgagaagaugaacacccaguucaccgccgucggcaaggaguucaaccaccucgagaagcgcaucgagaaccucaacaagaaggucgacgacggcuuccucgacaucuggaccuacaacgccgagcuccucguccuccucgagaacgagcgcacccucgacuaccacgacuccaacgucaagaaccucuacgagaagguccgcaaccagcucaagaacaacgccaaggagaucggcaacggcugcuucgaguucuaccacaagugcgacaacaccugcauggaguccgucaagaacggcaccuacgacuaccccaaguacuccgaggaggccaagcucaaccgcgagaagaucgacggcgucaagcucgaguccacccgcaucuaccagauccucgccaucuacuccaccgccgccuccucccucguccucgucgucucccucggcgccaucuccuucuggaugugcuccaacggcucccuccagugccgcaucugcaucuga

SEQ ID NO: 108260 - RNA, 1701 nt, Artificial Sequence
  derived and/or modified CDS sequence (opt2) from hemagglutinin__InfluenzaA__AHZ40606
augaagaccaucaucgcccucuccuacauccucugccucgucuucgcccagaagcuccccggcaacgacaacuccaccgccacccucugccucggccaccacgccguccccaacggcaccaucgucaagaccaucaccaacgaccgcaucgaggucaccaacgccaccgagcucguccagaacuccuccaucggcgagaucugcgacuccccccaccagauccucgacggcgagaacugcacccucaucgacgcccuccucggcgacccccagugcgacggcuuccagaacaagaagugggaccucuucgucgagcgcuccaaggccuacuccaacugcuaccccuacgacguccccgacuacgccucccuccgcucccucgucgccuccuccggcacccucgaguucaacaacgaguccuucaacuggaccggcgucacccagaacggcaccuccuccgccugcauccgccgcuccaacuccuccuucuucucccgccucaacuggcucacccaccucaacuucaaguaccccgcccucaacgucaccaugcccaacaacgagcaguucgacaagcucuacaucuggggcguccaccaccccggcaccgacaaggaccagaucuuccucuacgcccaguccuccggccgcaucaccgucuccaccaagcgcucccagcaggccgucauccccaacaucggcucccgcccccgcauccgcaacauccccucccgcaucuccaucuacuggaccaucgucaagcccggcgacauccuccucaucaacuccaccggcaaccucaucgccccccgcggcuacuucaagauccgcuccggcaaguccuccaucaugcgcuccgacgcccccaucggcaagugcaaguccgagugcaucacccccaacggcuccauccccaacgacaagcccuuccagaacgucaaccgcaucaccuacggcgccugcccccgcuacgucaagcaguccacccucaagcucgccaccggcaugcgcaacguccccgagaagcagacccgcggcaucuucggcgccaucgccggcuucaucgagaacggcugggagggcaugauggacggcugguacggcuuccgccaccagaacuccgagggccgcggccaggccgccgaccucaaguccacccaggccgccaucgaccagaucaacggcaagcucaaccgccucaucggcaagaccaacgagaaguuccaccagaucgagaaggaguucuccgaggucgagggccgcauccaggaccucgagaaguacgucgaggacaccaagaucgaccucugguccuacaacgccgagcuccucgucgcccucgagaaccagcacaccaucgaccucaccgacuccgagaugaacaagcucuucgagaagaccaagaagcagcuccgcgagaacgccgaggacaugggcaacggcugcuucaagaucuaccacaagugcgacaacgccugcaucggcuccauccgcaacggcaccuacgaccacgacgucuaccgcgacgaggcccucaacaaccgcuuccagaucaagggcgucgagcucaaguccggcuacaaggacuggauccucuggaucuccuucgccaucuccugcuuccuccucugcgucgcccuccucggcuucaucaugugggccugccagaagggcaacauccgcugcaacaucugcaucuga

SEQ ID NO: 108261 - RNA, 1701 nt, Artificial Sequence; identical to SEQ ID NO: 105919
  derived and/or modified CDS sequence (opt2) from hemagglutinin__InfluenzaA__AHZ40618

SEQ ID NO: 108262 - RNA, 1701 nt, Artificial Sequence; identical to SEQ ID NO: 105958
  derived and/or modified CDS sequence (opt2) from hemagglutinin__InfluenzaA__AHZ40626

SEQ ID NO: 108263 - RNA, 1701 nt, Artificial Sequence; identical to SEQ ID NO: 105919
  derived and/or modified CDS sequence (opt2) from hemagglutinin__InfluenzaA__AHZ40638

SEQ ID NO: 108264 - RNA, 1701 nt, Artificial Sequence; identical to SEQ ID NO: 105894
  derived and/or modified CDS sequence (opt2) from hemagglutinin__InfluenzaA__AHZ40650

SEQ ID NO: 108265 - RNA, 1701 nt, Artificial Sequence
  derived and/or modified CDS sequence (opt2) from hemagglutinin__InfluenzaA__AHZ40662
augaagaccaucaucgcccucuccuacauccucugccucgucuucgcccaggagcuccccggcaacgacgacuccaccgccacccucugccucggccaccacgccguccccaacggcaccaucgucaagaccaucaccaacgaccgcaucgaggucaccaacgccaccgagcucguccaguccuccuccaccggcgagaucugcaacuccccccaccagauccucgacggcgagaacugcacccucaucgacgcccuccucggcgacccccagugcgacggcuuccagaacaagaagugggaccucuucgucgagcgcuccaaggcccacuccaacugcuaccccuacgacguccccgacuacgccucccuccgcucccucgucgccuccuccggcacccucgaguucaacaacgaguccuucaacuggaccggcgucacccagaacggcaccuccuccgccugcauccgccgcuccaacaacuccuucuucucccgccucaacuggcucacccaccucaacuucaaguaccccgcccucaacgucaccauccccaacaacgagcaguucgacaagcucuacaucuggggcguccaccaccccggcaccgacaaggaccagaucuuccucuacgcccaggccuccggccgcaucaccgucuccaccaagcgcucccagcagaccgucauccccaacaucggcucccgcccccgcguccgcaacauccccucccgcgucuccaucuacuggaccaucgucaagcccggcgacauccuccucaucaacuccaccggcaaccucaucgccccccgcggcuacuucaagauccgcuccggcaaguccuccaucaugcgcuccgacgcccccaucggcaagugcaacuccgccugcaucacccccaacggcuccauccccaacgacaagcccuuccagaacgucaaccgcaucaccuacggcgccugcccccgcuacgucaagcagaacacccucaagcucgccaccggcaugcgcaacguccccgagaagcagacccgcggcaucuucggcgccaucgccggcuucaucgagaacggcugggagggcauggucgacggcugguacggcuuccgccaccagaacuccgagggccgcggccaggccgccgaccucaaguccacccaggccgccaucgaccagaucaacggcaagcucaaccgccucaucggcaagaccaacgagaaguuccaccagaucgagaaggaguucuccgaggucgagggccgcauccaggaccucgagaaguacgucgaggacaccaagaucgaccucugguccuacaacgccgagcuccucgucgcccucgagaaccagcacaccaucgaccucaccgacuccgagaugaacaagcucuucgagaagaccaagaagcagcuccgcgagaacgccgaggacaugggcaacggcugcuucaagaucuaccacaagugcgacaacgccugcaucggcuccauccgcaacggcaccuacgaccacgacgucuaccgcgacgaggcccucaacaaccgcuuccagaucaagggcgucgagcucaaguccggcuacaaggacuggauccucuggaucuccuucgccaucuccugcuuccuccucugcgucgcccuccucggcuucaucaugugggccugccagaagggcaacauccgcugcaacaucugcaucuga

SEQ ID NO: 108266 - RNA, 1701 nt, Artificial Sequence; identical to SEQ ID NO: 105939
  derived and/or modified CDS sequence (opt2) from hemagglutinin__InfluenzaA__AHZ40674

SEQ ID NO: 108267 - RNA, 1701 nt, Artificial Sequence; identical to SEQ ID NO: 105919
  derived and/or modified CDS sequence (opt2) from hemagglutinin__InfluenzaA__AHZ40686

SEQ ID NO: 108268 - RNA, 1701 nt, Artificial Sequence; identical to SEQ ID NO: 105904
  derived and/or modified CDS sequence (opt2) from hemagglutinin__InfluenzaA__AHZ40698

SEQ ID NO: 108269 - RNA, 1701 nt, Artificial Sequence; identical to SEQ ID NO: 105904
  derived and/or modified CDS sequence (opt2) from hemagglutinin__InfluenzaA__AHZ40710

SEQ ID NO: 108270 - RNA, 1701 nt, Artificial Sequence; identical to SEQ ID NO: 106030
  derived and/or modified CDS sequence (opt2) from hemagglutinin__InfluenzaA__AHZ40722

SEQ ID NO: 108271 - RNA, 1701 nt, Artificial Sequence; identical to SEQ ID NO: 105927
  derived and/or modified CDS sequence (opt2) from hemagglutinin__InfluenzaA__AHZ40734

SEQ ID NO: 108272 - RNA, 1701 nt, Artificial Sequence; identical to SEQ ID NO: 106030
  derived and/or modified CDS sequence (opt2) from hemagglutinin__InfluenzaA__AHZ40746

SEQ ID NO: 108273 - RNA, 1701 nt, Artificial Sequence; identical to SEQ ID NO: 108223
  derived and/or modified CDS sequence (opt2) from hemagglutinin__InfluenzaA__AHZ40758

SEQ ID NO: 108274 - RNA, 1701 nt, Artificial Sequence; identical to SEQ ID NO: 98703
  derived and/or modified CDS sequence (opt2) from hemagglutinin__InfluenzaA__AHZ40782

SEQ ID NO: 108275 - RNA, 1701 nt, Artificial Sequence; identical to SEQ ID NO: 98703
  derived and/or modified CDS sequence (opt2) from hemagglutinin__InfluenzaA__AHZ40793

SEQ ID NO: 108276 - RNA, 1701 nt, Artificial Sequence; identical to SEQ ID NO: 98703
  derived and/or modified CDS sequence (opt2) from hemagglutinin__InfluenzaA__AHZ40804

SEQ ID NO: 108277 - RNA, 1701 nt, Artificial Sequence
  derived and/or modified CDS sequence (opt2) from hemagglutinin__InfluenzaA__AHZ40815
augaaggccauccucgucguccuccucuacaccuucgccaccgccaacgccgacacccucugcaucggcuaccacgccaacaacuccaccgacaccgucgacaccguccucgagaagaacgucaccgucacccacuccgucaaccuccucgaggacaagcacaacggcaagcucugcaagcuccgcggcgucgccccccuccaccucggcaagugcaacaucgccggcuggauccucggcaaccccgagugcgagucccucuccaccgccuccuccugguccuacaucgucgagacccccuccuccgacaacggcaccugcuaccccggcgacuucaucgacuacgaggagcuccgcgagcagcucuccuccgucuccuccuucgagcgcuucgagaucuuccccaagaccuccuccuggcccaaccacgacuccaacaagggcgucaccgccgccugcccccacgccggcgccaaguccuucuacaagaaccucaucuggcucgucaagaagggcaacuccuaccccaagcucuccaaguccuacaucaacgacaagggcaaggagguccucguccucuggggcauccaccaccccuccaccuccgccgaccagcagucccucuaccagaacgccgacgccuacgucuucgucggcuccucccgcuacuccaagaaguucaagcccgagaucgccauccgccccaagguccgcgaccgcgagggccgcaugaacuacuacuggacccucgucgagcccggcgacaagaucaccuucgaggccaccggcaaccucgucgucccccgcuacgccuucgccauggagcgcaacgccggcuccggcaucaucaucuccgacacccccguccacgacugcaacaccaccugccagacccccaagggcgccaucaacaccucccuccccuuccagaacauccaccccaucaccaucggcaagugccccaaguacgucaaguccaccaagcuccgccucgccaccggccuccgcaacauccccuccauccagucccgcggccucuucggcgccaucgccggcuucaucgagggcggcuggaccggcauggucgacggcugguacggcuaccaccaccagaacgagcagggcuccggcuacgccgccgaccucaaguccacccagaacgccaucgacgagaucaccaacaaggucaacuccgucaucgagaagaugaacacccaguucaccgccgucggcaaggaguucaaccaccucgagaagcgcaucgagaaccucaacaagaaggucgacgacggcuuccucgacaucuggaccuacaacgccgagcuccucguccuccucgagaacgagcgcacccucgacuaccacgacuccaacgucaagaaccucuacgagaagguccgcucccagcucaagaacaacgccaaggagaucggcaacggcugcuucgaguucuaccacaagugcgacaacaccugcauggaguccgucaagaacggcaccuacgacuaccccaaguacuccgaggaggccaagcucaaccgcgaggagaucgacggcgucaagcucgaguccacccgcaucuaccagauccucgccaucuacuccaccgucgccuccucccucguccucgucgucucccucggcgccaucuccuucuggaugugcuccaacggcucccuccagugccgcaucugcaucuga

SEQ ID NO: 108278 - RNA, 1701 nt, Artificial Sequence
  derived and/or modified CDS sequence (opt2) from hemagglutinin__InfluenzaA__AHZ40826
augaaggccauccucgucguccuccucuacaccuucgccaccgccaacgccgacacccucugcaucggcuaccacgccaacaacuccaccgacaccgucgacaccguccucgagaagaacgucaccgucacccacuccgucaaccuccucgaggacaagcacaacggcaagcucugcaagcuccgcggcgucgccccccuccaccucggcaagugcaacaucgccggcuggauccucggcaaccccgagugcgagucccucuccaccgccuccuccugguccuacaucgucgagacccccuccuccgacaacggcaccugcuaccccggcgacuucaucgacuacgaggagcuccgcgagcagcucuccuccgucuccuccuucgagcgcuucgagaucuuccccaagaccuccuccuggcccaaccacgacuccaacaagggcgucaccgccgccugcccccacgccggcgccaaguccuucuacaagaaccucaucuggcucgucaagaagggcaacuccuaccccaagcucuccaaguccuacaucaacgacaagggcaaggagguccucguccucuggggcauccaccaccccuccaccuccgccgaccagcaguccaucuaccagaacgccgacgccuacgucuucgucggcuccucccgcuacuccaagaaguucaagcccgagaucgccauccgccccaagguccgcgaccaggagggccgcaugaacuacuacuggacccucgucgagcccggcgacaagaucaccuucgaggccaccggcaaccucgucgucccccgcuacgccuucgccauggagcgcaacgccggcuccggcaucaucaucuccgacacccccguccacgacugcaacaccaccugccagacccccaagggcgccaucaacaccucccuccccuuccagaacauccaccccaucaccaucggcaagugccccaaguacgucaaguccaccaagcuccgccucgccaccggccuccgcaacauccccuccauccagucccgcggccucuucggcgccaucgccggcuucaucgagggcggcuggaccggcauggucgacggcugguacggcuaccaccaccagaacgagcagggcuccggcuacgccgccgaccucaaguccacccagaacgccaucgacgagaucaccaacaaggucaacuccgucaucgagaagaugaacacccaguucaccgccgucggcaaggaguucaaccaccucgagaagcgcaucgagaaccucaacaagaaggucgacgacggcuuccucgacaucuggaccuacaacgccgagcuccucguccuccucgagaacgagcgcacccucgacuaccacgacuccaacgucaagaaccucuacgagaagguccgcucccagcucaagaacaacgccaaggagaucggcaacggcugcuucgaguucuaccacaagugcgacaacaccugcauggaguccgucaagaacggcaccuacgacuaccccaaguacuccgaggaggccaagcucaaccgcgaggagaucgacggcgucaagcucgaguccacccgcaucuaccagauccucgccaucuacuccaccgucgccuccucccucguccucgucgucucccucggcgccaucuccuucuggaugugcuccaacggcucccuccagugccgcaucugcaucuga

SEQ ID NO: 108279 - RNA, 1701 nt, Artificial Sequence
  derived and/or modified CDS sequence (opt2) from hemagglutinin__InfluenzaA__AHZ40848
augaaggccauccucgucguccuccucuacaccuucgccaccgccaacgccgacacccucugcaucggcuaccacgccaacaacuccaccgacaccgucgacaccguccucgagaagaacgucaccgucacccacuccgucaaccuccucgaggacaagcacaacggcaagcucugcaagcuccgcggcgucgccccccuccaccucggcaagugcaacaucgccggcuggauccucggcaaccccgagugcgagucccucuccaccgccuccuccugguccuacaucgucgagacccccuccuccgacaacggcaccugcuaccccggcgacuucaucgacuacgaggagcuccgcgagcagcucuccuccgucuccuccuucgagcgcuucgagaucuuccccaagaccuccuccuggcccaaccacgacuccaacaagggcgucaccgccgccugcccccacgccggcgccaaguccuucuacaagaaccucaucuggcucgucaaggagggcaacuccuaccccaagcucuccaaguccuacaucaacgacaagggcaaggagguccucguccucuggggcauccaccaccccuccaccuccgccgagcagcagucccucuaccagaacgccgacgccuacgucuucgucggcuccucccgcuacuccaagaaguucaagcccgagaucgccgcccgccccaagguccgcggccaggccggccgcaugaacuacuacuggacccucgucgagcccggcgacaagaucaccuucgaggccaccggcaaccucgucgucccccgcuacgccuucgccauggagcgcaacgccggcuccggcaucaucaucuccgacacccccguccacgacugcaacaccaccugccagacccccaagggcgccaucaacaccucccuccccuuccagaacauccaccccaucaccaucggcaagugccccaaguacgucaaguccaccaagcuccgccucgccaccggccuccgcaacauccccuccauccagucccgcggccucuucggcgccaucgccggcuucaucgagggcggcuggaccggcauggucgacggcugguacggcuaccaccaccagaacgagcagggcuccggcuacgccgccgaccucaaguccacccagaacgccaucgacgagaucaccaacaaggucaacuccgucaucgagaagaugaacacccaguucaccgccgucggcaaggaguucaaccaccucgagaagcgcaucgagaaccucaacaagaaggucgacgacggcuuccucgacaucuggaccuacaacgccgagcuccucguccuccucgagaacgagcgcacccucgacuaccacgacuccaacgucaagaaccucuacgagaagguccgcucccagcucaagaacaacgccaaggagaucggcaacggcugcuucgaguucuaccacaagugcgacaacaccugcauggaguccgucaagaacggcaccuacgacuaccccaaguacuccgaggaggccaagcucaaccgcgaggagaucgacggcgucaagcucgaguccacccgcaucuaccagauccucgccaucuacuccaccgucgccuccucccucguccucgucgucucccucggcgccaucuccuucuggaugugcuccaacggcucccuccagugccgcaucugcaucuga

SEQ ID NO: 108280 - RNA, 1701 nt, Artificial Sequence
  derived and/or modified CDS sequence (opt2) from hemagglutinin__InfluenzaA__AHZ40881
augaaggccauccucgucguccuccucuacaccuucgccaccgccaacgccgacacccucugcaucggcuaccacgccaacaacuccaccgacaccgucgacaccguccucgagaagaacgucaccgucacccacuccgucaaccuccucgaggacaagcacaacggcaagcucugcaagcuccgcggcgucgccccccuccaccucggcaagugcaacaucgccggcuggauccucggcaaccccgagugcgagucccucuccaccgccuccuccugguccuacaucgucgagacccccuccuccgacaacggcaccugcuaccccggcgacuucaucgacuacgaggagcuccgcgagcagcucuccuccgucuccuccuucgagcgcuucgagaucuuccccaagaccuccuccuggcccaaccacgacuccaacaagggcgucaccgccgccugcccccacgccggcgccaaguccuucuacaagaaccucaucuggcucgucaagaagggcaacuccuaccccaagcucuccaaguccuacaucaacgacaagggcaaggagguccucguccucuggggcauccaccaccccuccaccuccgccgagcagcagucccucuaccagaacgccgacgccuacgucuucgucggcuccucccgcuacuccaagaaguucaagcccgagaucgccgcccgccccaagguccgcggccaggccggccgcaugaacuacuacuggacccucgucgagcccggcgacaagaucaccuucgaggccaccggcaaccucgucgucccccgcuacgccuucgccauggagcgcaacgccggcuccggcaucaucaucuccgacacccccguccacgacugcaacaccaccugccagacccccaagggcgccaucaacaccucccuccccuuccagaacauccaccccaucaccaucggcaagugccccaaguacgucaaguccaccaagcuccgccucgccaccggccuccgcaacauccccuccauccagucccgcggccucuucggcgccaucgccggcuucaucgagggcggcuggaccggcauggucgacggcugguacggcuaccaccaccagaacgagcagggcuccggcuacgccgccgaccucaaguccacccagaacgccaucgacgagaucaccaacaaggucaacuccgucaucgagaagaugaacacccaguucaccgccgucggcaaggaguucaaccaccucgagaagcgcaucgagaaccucaacaagaaggucgacgacggcuuccucgacaucuggaccuacaacgccgagcuccucguccuccucgagaacgagcgcacccucgacuaccacgacuccaacgucaagaaccucuacgagaagguccgcucccagcucaagaacaacgccaaggagaucggcaacggcugcuucgaguucuaccacaagugcgacaacaccugcauggaguccgucaagaacggcaccuacgacuaccccaaguacuccgaggaggccaagcucaaccgcgaggagaucgacggcgucaagcucgaguccacccgcaucuaccagauccucgccaucuacuccaccgucgccuccucccucguccucgucgucucccucggcgccaucuccuucuggaugugcuccaacggcucccuccagugccgcaucugcaucuga

SEQ ID NO: 108281 - RNA, 1701 nt, Artificial Sequence; identical to SEQ ID NO: 108280
  derived and/or modified CDS sequence (opt2) from hemagglutinin__InfluenzaA__AHZ40892

SEQ ID NO: 108282 - RNA, 1701 nt, Artificial Sequence; identical to SEQ ID NO: 108279
  derived and/or modified CDS sequence (opt2) from hemagglutinin__InfluenzaA__AHZ40914

SEQ ID NO: 108283 - RNA, 1701 nt, Artificial Sequence; identical to SEQ ID NO: 108280
  derived and/or modified CDS sequence (opt2) from hemagglutinin__InfluenzaA__AHZ40925

SEQ ID NO: 108284 - RNA, 1701 nt, Artificial Sequence
  derived and/or modified CDS sequence (opt2) from hemagglutinin__InfluenzaA__AHZ40936
augaaggccauccucgucguccuccucuacaccuucgccaccgccaacgccgacacccucugcaucggcuaccacgccaacaacuccaccgacaccgucgacaccguccucgagaagaacgucaccgucacccacuccgucaaccuccucgaggacaagcacaacggcaagcucugcaagcuccgcggcgucgccccccuccaccucggcaagugcaacaucgccggcuggauccucggcaaccccgagugcgagucccucuccaccgccuccuccugguccuacaucgucgagacccccuccuccgacaacggcaccugcuaccccggcgacuucaucgacuacgaggagcuccgcgagcagcucuccuccgucuccuccuucgagcgcuucgagaucuuccccaagaccuccuccuggcccaaccacgacuccaacaagggcgucaccgccgccugcccccacgccggcgccaaguccuucuacaagaaccucaucuggcucgucaagaagggcaacuccuaccccaagcucuccaaguccuacaucaacgacaagggcaaggagguccucguccucuggggcauccaccaccccuccaccuccgccgagcagcagucccucuaccagaacgccgacgccuacgucuucgucggcuccucccgcuacuccaagaaguucaagcccgagaucgccgcccgccccaagguccgcgaccaggccggccgcaugaacuacuacuggacccucgucgagcccggcgacaagaucaccuucgaggccaccggcaaccucgucgucccccgcuacgccuucgccauggagcgcaacgccggcuccggcaucaucaucuccgacacccccguccacgacugcaacaccaccugccagacccccaagggcgccaucaacaccucccuccccuuccagaacauccaccccaucaccaucggcaagugccccaaguacgucaaguccaccaagcuccgccucgccaccggccuccgcaacauccccuccauccagucccgcggccucuucggcgccaucgccggcuucaucgagggcggcuggaccggcauggucgacggcugguacggcuaccaccaccagaacgagcagggcuccggcuacgccgccgaccucaaguccacccagaacgccaucgacgagaucaccaacaaggucaacuccgucaucgagaagaugaacacccaguucaccgccgucggcaaggaguucaaccaccucgagaagcgcaucgagaaccucaacaagaaggucgacgacggcuuccucgacaucuggaccuacaacgccgagcuccucguccuccucgagaacgagcgcacccucgacuaccacgacuccaacgucaagaaccucuacgagaagguccgcucccagcucaagaacaacgccaaggagaucggcaacggcugcuucgaguucuaccacaagugcgacaacaccugcauggaguccgucaagaacggcaccuacgacuaccccaaguacuccgaggaggccaagcucaaccgcgaggagaucgacggcgucaagcucgaguccacccgcaucuaccagauccucgccaucuacuccaccgucgccuccucccucguccucgucgucucccucggcgccaucuccuucuggaugugcuccaacggcucccuccagugccgcaucugcaucuga

SEQ ID NO: 108285 - RNA, 1701 nt, Artificial Sequence; identical to SEQ ID NO: 108279
  derived and/or modified CDS sequence (opt2) from hemagglutinin__InfluenzaA__AHZ40947

SEQ ID NO: 108286 - RNA, 1701 nt, Artificial Sequence; identical to SEQ ID NO: 108280
  derived and/or modified CDS sequence (opt2) from hemagglutinin__InfluenzaA__AHZ40958

SEQ ID NO: 108287 - RNA, 1701 nt, Artificial Sequence; identical to SEQ ID NO: 108284
  derived and/or modified CDS sequence (opt2) from hemagglutinin__InfluenzaA__AHZ40969

SEQ ID NO: 108288 - RNA, 1701 nt, Artificial Sequence; identical to SEQ ID NO: 108284
  derived and/or modified CDS sequence (opt2) from hemagglutinin__InfluenzaA__AHZ40980

SEQ ID NO: 108289 - RNA, 1701 nt, Artificial Sequence; identical to SEQ ID NO: 108284
  derived and/or modified CDS sequence (opt2) from hemagglutinin__InfluenzaA__AHZ40991

SEQ ID NO: 108290 - RNA, 1701 nt, Artificial Sequence; identical to SEQ ID NO: 108284
  derived and/or modified CDS sequence (opt2) from hemagglutinin__InfluenzaA__AHZ41002

SEQ ID NO: 108291 - RNA, 1701 nt, Artificial Sequence; identical to SEQ ID NO: 108284
  derived and/or modified CDS sequence (opt2) from hemagglutinin__InfluenzaA__AHZ41013

SEQ ID NO: 108292 - RNA, 1701 nt, Artificial Sequence; identical to SEQ ID NO: 108280
  derived and/or modified CDS sequence (opt2) from hemagglutinin__InfluenzaA__AHZ41024

SEQ ID NO: 108293 - RNA, 1701 nt, Artificial Sequence; identical to SEQ ID NO: 108280
  derived and/or modified CDS sequence (opt2) from hemagglutinin__InfluenzaA__AHZ41035

SEQ ID NO: 108294 - RNA, 1701 nt, Artificial Sequence; identical to SEQ ID NO: 108280
  derived and/or modified CDS sequence (opt2) from hemagglutinin__InfluenzaA__AHZ41046

SEQ ID NO: 108295 - RNA, 1701 nt, Artificial Sequence; identical to SEQ ID NO: 108280
  derived and/or modified CDS sequence (opt2) from hemagglutinin__InfluenzaA__AHZ41057

SEQ ID NO: 108296 - RNA, 1701 nt, Artificial Sequence; identical to SEQ ID NO: 108280
  derived and/or modified CDS sequence (opt2) from hemagglutinin__InfluenzaA__AHZ41068

SEQ ID NO: 108297 - RNA, 1701 nt, Artificial Sequence; identical to SEQ ID NO: 108284
  derived and/or modified CDS sequence (opt2) from hemagglutinin__InfluenzaA__AHZ41079

SEQ ID NO: 108298 - RNA, 1701 nt, Artificial Sequence; identical to SEQ ID NO: 108280
  derived and/or modified CDS sequence (opt2) from hemagglutinin__InfluenzaA__AHZ41090

SEQ ID NO: 108299 - RNA, 1701 nt, Artificial Sequence; identical to SEQ ID NO: 108284
  derived and/or modified CDS sequence (opt2) from hemagglutinin__InfluenzaA__AHZ41101

SEQ ID NO: 108300 - RNA, 1701 nt, Artificial Sequence; identical to SEQ ID NO: 108280
  derived and/or modified CDS sequence (opt2) from hemagglutinin__InfluenzaA__AHZ41112

SEQ ID NO: 108301 - RNA, 1701 nt, Artificial Sequence; identical to SEQ ID NO: 108280
  derived and/or modified CDS sequence (opt2) from hemagglutinin__InfluenzaA__AHZ41123

SEQ ID NO: 108302 - RNA, 1701 nt, Artificial Sequence; identical to SEQ ID NO: 108280
  derived and/or modified CDS sequence (opt2) from hemagglutinin__InfluenzaA__AHZ41134

SEQ ID NO: 108303 - RNA, 1701 nt, Artificial Sequence; identical to SEQ ID NO: 108280
  derived and/or modified CDS sequence (opt2) from hemagglutinin__InfluenzaA__AHZ41145

SEQ ID NO: 108304 - RNA, 1701 nt, Artificial Sequence; identical to SEQ ID NO: 108280
  derived and/or modified CDS sequence (opt2) from hemagglutinin__InfluenzaA__AHZ41156

SEQ ID NO: 108305 - RNA, 1701 nt, Artificial Sequence; identical to SEQ ID NO: 108280
  derived and/or modified CDS sequence (opt2) from hemagglutinin__InfluenzaA__AHZ41167

SEQ ID NO: 108306 - RNA, 1701 nt, Artificial Sequence; identical to SEQ ID NO: 108280
  derived and/or modified CDS sequence (opt2) from hemagglutinin__InfluenzaA__AHZ41178

SEQ ID NO: 108307 - RNA, 1701 nt, Artificial Sequence; identical to SEQ ID NO: 108280
  derived and/or modified CDS sequence (opt2) from hemagglutinin__InfluenzaA__AHZ41189

SEQ ID NO: 108308 - RNA, 1701 nt, Artificial Sequence; identical to SEQ ID NO: 108279
  derived and/or modified CDS sequence (opt2) from hemagglutinin__InfluenzaA__AHZ41246

SEQ ID NO: 108309 - RNA, 1701 nt, Artificial Sequence; identical to SEQ ID NO: 108284
  derived and/or modified CDS sequence (opt2) from hemagglutinin__InfluenzaA__AHZ41263

SEQ ID NO: 108310 - RNA, 1701 nt, Artificial Sequence; identical to SEQ ID NO: 108280
  derived and/or modified CDS sequence (opt2) from hemagglutinin__InfluenzaA__AHZ41281

SEQ ID NO: 108311 - RNA, 1701 nt, Artificial Sequence; identical to SEQ ID NO: 108280
  derived and/or modified CDS sequence (opt2) from hemagglutinin__InfluenzaA__AHZ41292

SEQ ID NO: 108312 - RNA, 1701 nt, Artificial Sequence; identical to SEQ ID NO: 108279
  derived and/or modified CDS sequence (opt2) from hemagglutinin__InfluenzaA__AHZ41303

SEQ ID NO: 108313 - RNA, 1701 nt, Artificial Sequence; identical to SEQ ID NO: 108279
  derived and/or modified CDS sequence (opt2) from hemagglutinin__InfluenzaA__AHZ41314

SEQ ID NO: 108314 - RNA, 1701 nt, Artificial Sequence; identical to SEQ ID NO: 108279
  derived and/or modified CDS sequence (opt2) from hemagglutinin__InfluenzaA__AHZ41325

SEQ ID NO: 108315 - RNA, 1701 nt, Artificial Sequence; identical to SEQ ID NO: 108279
  derived and/or modified CDS sequence (opt2) from hemagglutinin__InfluenzaA__AHZ41336

SEQ ID NO: 108316 - RNA, 1701 nt, Artificial Sequence; identical to SEQ ID NO: 108279
  derived and/or modified CDS sequence (opt2) from hemagglutinin__InfluenzaA__AHZ41347

SEQ ID NO: 108317 - RNA, 1701 nt, Artificial Sequence; identical to SEQ ID NO: 108280
  derived and/or modified CDS sequence (opt2) from hemagglutinin__InfluenzaA__AHZ41358

SEQ ID NO: 108318 - RNA, 1701 nt, Artificial Sequence; identical to SEQ ID NO: 108280
  derived and/or modified CDS sequence (opt2) from hemagglutinin__InfluenzaA__AHZ41366

SEQ ID NO: 108319 - RNA, 1701 nt, Artificial Sequence; identical to SEQ ID NO: 108284
  derived and/or modified CDS sequence (opt2) from hemagglutinin__InfluenzaA__AHZ41377

SEQ ID NO: 108320 - RNA, 1701 nt, Artificial Sequence; identical to SEQ ID NO: 108280
  derived and/or modified CDS sequence (opt2) from hemagglutinin__InfluenzaA__AHZ41388

SEQ ID NO: 108321 - RNA, 1701 nt, Artificial Sequence; identical to SEQ ID NO: 108284
  derived and/or modified CDS sequence (opt2) from hemagglutinin__InfluenzaA__AHZ41410

SEQ ID NO: 108322 - RNA, 1701 nt, Artificial Sequence; identical to SEQ ID NO: 108280
  derived and/or modified CDS sequence (opt2) from hemagglutinin__InfluenzaA__AHZ41432

SEQ ID NO: 108323 - RNA, 1701 nt, Artificial Sequence
  derived and/or modified CDS sequence (opt2) from hemagglutinin__InfluenzaA__AHZ41441
augaaggccauccucgucguccuccucuacaccuucgccaccgccaacgccgacacccucugcaucggcuaccacgccaacaacuccaccgacaccgucgacaccguccucgagaagaacgucaccgucacccacuccgucaaccuccucgaggacaagcacaacggcaagcucugcaagcuccgcggcgucgccccccuccaccucggcaagugcaacaucgccggcuggauccucggcaaccccgagugcgagucccucuccaccgccuccuccugguccuacaucgucgagacccccuccuccgacaacggcaccugcuaccccggcgacuucaucgacuacgaggagcuccgcgagcagcucuccuccgucuccuccuucgagcgcuucgagaucuuccccaagaccuccuccuggcccaaccacgacuccaacaagggcgucaccgccgccugcccccacgccggcgccaaguccuucuacaagaaccucaucuggcucgucaaggagggcaacuccuaccccaagcucuccaaguccuacaucaacgacaagggcaaggagguccucguccucuggggcauccaccaccccuccaccuccgccgagcagcagucccucuaccagaacgccgacgccuacgucuucgucggcuccucccgcuacuccaagaaguucaagcccgagaucgccgcccgccccaagguccgcgaccaggccggccgcaugaacuacuacuggacccucgucgagcccggcgacaagaucaccuucgaggccaccggcaaccucgucgucccccgcuacgccuucgccauggagcgcaacgccggcuccggcaucaucaucuccgacacccccguccacgacugcaacaccaccugccagacccccaagggcgccaucaacaccucccuccccuuccagaacauccaccccaucaccaucggcaagugccccaaguacgucaaguccaccaagcuccgccucgccaccggccuccgcaacauccccuccauccagucccgcggccucuucggcgccaucgccggcuucaucgagggcggcuggaccggcauggucgacggcugguacggcuaccaccaccagaacgagcagggcuccggcuacgccgccgaccucaaguccacccagaacgccaucgacgagaucaccaacaaggucaacuccgucaucgagaagaugaacacccaguucaccgccgucggcaaggaguucaaccaccucgagaagcgcaucgagaaccucaacaagaaggucgacgacggcuuccucgacaucuggaccuacaacgccgagcuccucguccuccucgagaacgagcgcacccucgacuaccacgacuccaacgucaagaaccucuacgagaagguccgcucccagcucaagaacaacgccaaggagaucggcaacggcugcuucgaguucuaccacaagugcgacaacaccugcauggaguccgucaagaacggcaccuacgacuaccccaaguacuccgaggaggccaagcucaaccgcgaggagaucgacggcgucaagcucgaguccacccgcaucuaccagauccucgccaucuacuccaccgucgccuccucccucguccucgucgucucccucggcgccaucuccuucuggaugugcuccaacggcucccuccagugccgcaucugcaucuga

SEQ ID NO: 108324 - RNA, 1701 nt, Artificial Sequence; identical to SEQ ID NO: 108279
  derived and/or modified CDS sequence (opt2) from hemagglutinin__InfluenzaA__AHZ41452

SEQ ID NO: 108325 - RNA, 1701 nt, Artificial Sequence
  derived and/or modified CDS sequence (opt2) from hemagglutinin__InfluenzaA__AHZ41463
augaaggccauccucgucguccuccucuacaccuucgccaccgccaacgccgacacccucugcaucggcuaccacgccaacaacuccaccgacaccgucuacaccguccucgagaagaacgucaccgucacccacuccgucaaccuccucgaggacaagcacaacggcaagcucugcaagcuccgcggcgucgccccccuccaccucggcaagugcaacaucgccggcuggauccucggcaaccccgagugcgagucccucuccaccgccuccuccugguccuacaucgucgagacccccuccuccgacaacggcaccugcuaccccggcgacuucaucgacuacgaggagcuccgcgagcagcucuccuccgucuccuccuucgagcgcuucgagaucuuccccaagaccuccuccuggcccaaccacgacuccaacaagggcgucaccgccgccugcccccacgccggcgccaaguccuucuacaagaaccucaucuggcucgucaagaagggcaacuccuaccccaagcucuccaaguccuacaucaacgacaagggcaaggagguccucguccucuggggcauccaccaccccuccaccuccgccgagcagcagucccucuaccagaacgccgacgccuacgucuucgucggcuccucccgcuacuccaagaaguucaagcccgagaucgccgcccgccccaagguccgcggccaggccggccgcaugaacuacuacuggacccucgucgagcccggcgacaagaucaccuucgaggccaccggcaaccucgucgucccccgcuacgccuucgccauggagcgcaacgccggcuccggcaucaucaucuccgacacccccguccacgacugcaacaccaccugccagacccccaagggcgccaucaacaccucccuccccuuccagaacauccaccccaucaccaucggcaagugccccaaguacgucaaguccaccaagcuccgccucgccaccggccuccgcaacauccccuccauccagucccgcggccucuucggcgccaucgccggcuucaucgagggcggcuggaccggcauggucgacggcugguacggcuaccaccaccagaacgagcagggcuccggcuacgccgccgaccucaaguccacccagaacgccaucgacgagaucaccaacaaggucaacuccgucaucgagaagaugaacacccaguucaccgccgucggcaaggaguucaaccaccucgagaagcgcaucgagaaccucaacaagaaggucgacgacggcuuccucgacaucuggaccuacaacgccgagcuccucguccuccucgagaacgagcgcacccucgacuaccacgacuccaacgucaagaaccucuacgagaagguccgcucccagcucaagaacaacgccaaggagaucggcaacggcugcuucgaguucuaccacaagugcgacaacaccugcauggaguccgucaagaacggcaccuacgacuaccccaaguacuccgaggaggccaagcucaaccgcgaggagaucgacggcgucaagcucgaguccacccgcaucuaccagauccucgccaucuacuccaccgucgccuccucccucguccucgucgucucccucggcgccaucuccuucuggaugugcuccaacggcucccuccagugccgcaucugcaucuga

SEQ ID NO: 108326 - RNA, 1701 nt, Artificial Sequence; identical to SEQ ID NO: 108279
  derived and/or modified CDS sequence (opt2) from hemagglutinin__InfluenzaA__AHZ41473

SEQ ID NO: 108327 - RNA, 1701 nt, Artificial Sequence; identical to SEQ ID NO: 108279
  derived and/or modified CDS sequence (opt2) from hemagglutinin__InfluenzaA__AHZ41484

SEQ ID NO: 108328 - RNA, 1701 nt, Artificial Sequence; identical to SEQ ID NO: 108284
  derived and/or modified CDS sequence (opt2) from hemagglutinin__InfluenzaA__AHZ41495

SEQ ID NO: 108329 - RNA, 1701 nt, Artificial Sequence; identical to SEQ ID NO: 108279
  derived and/or modified CDS sequence (opt2) from hemagglutinin__InfluenzaA__AHZ41506

SEQ ID NO: 108330 - RNA, 1701 nt, Artificial Sequence
  derived and/or modified CDS sequence (opt2) from hemagglutinin__InfluenzaA__AHZ41517
augaaggccauccucgucguccuccucuacaccuucgccaccgccaacgccgacacccucugcaucggcuaccacgccaacaacuccaccgacaccgucgacaccguccucgagaagaacgucaccgucacccacuccgucaaccuccucgaggacaagcacaacggcaagcucugcaagcuccgcggcgucgccccccuccaccucggcaagugcaacaucgccggcuggauccucggcaaccccgagugcgagucccucuccaccgccuccuccugguccuacaucgucgagacccccuccuccgacaacggcaccugcuaccccggcgacuucaucgacuacgaggagcuccgcgagcagcucuccuccgucuccuccuucgagcgcuucgagaucuuccccaagaccuccuccuggcccaaccacgacuccaacaagggcgucaccgccgccugcccccacgccggcgccaaguccuucuacaagaaccucaucuggcucgucaagaagggcaacuccuaccccaagcucuccgaguccuacaucaacgacaagggcaaggagguccucguccucuggggcauccaccaccccuccaccuccgccgagcagcagucccucuaccagaacgccgacgccuacgucuucgucggcuccucccgcuacuccaagaaguucaagcccgagaucgccgcccgccccaagguccgcggccaggccggccgcaugaacuacuacuggacccucgucgagcccggcgacaagaucaccuucgaggccaccggcaaccucgucgucccccgcuacgccuucgccauggagcgcaacgccggcuccggcaucaucaucuccgacacccccguccacgacugcaacaccaccugccagacccccaagggcgccaucaacaccucccuccccuuccagaacauccaccccaucaccaucggcaagugccccaaguacgucaaguccaccaagcuccgccucgccaccggccuccgcaacauccccuccauccagucccgcggccucuucggcgccaucgccggcuucaucgagggcggcuggaccggcauggucgacggcugguacggcuaccaccaccagaacgagcagggcuccggcuacgccgccgaccucaaguccacccagaacgccaucgacgagaucaccaacaaggucaacuccgucaucgagaagaugaacacccaguucaccgccgucggcaaggaguucaaccaccucgagaagcgcaucgagaaccucaacaagaaggucgacgacggcuuccucgacaucuggaccuacaacgccgagcuccucguccuccucgagaacgagcgcacccucgacuaccacgacuccaacgucaagaaccucuacgagaagguccgcucccagcucaagaacaacgccaaggagaucggcaacggcugcuucgaguucuaccacaagugcgacaacaccugcauggaguccgucaagaacggcaccuacgacuaccccaaguacuccgaggaggccaagcucaaccgcgaggagaucgacggcgucaagcucgaguccacccgcaucuaccagauccucgccaucuacuccaccgucgccuccucccucguccucgucgucucccucggcgccaucuccuucuggaugugcuccaacggcucccuccagugccgcaucugcaucuga

SEQ ID NO: 108331 - RNA, 1701 nt, Artificial Sequence
  derived and/or modified CDS sequence (opt2) from hemagglutinin__InfluenzaA__AHZ41528
augaaggccauccucgucguccuccucuacaccuucgccaccgccaacgccgacacccucugcaucggcuaccacgccaacaacuccaccgacaccgucgacaccguccucgagaagaacgucaccgucacccacuccgucaaccuccucgaggacaagcacaacggcaagcucugcaagcuccgcggcgucgccccccuccaccucggcaagugcaacaucgccggcuggauccucggcaaccccgagugcgagucccucuccaccgccuccuccugguccuacaucgucgagacccccuccuccgacaacggcaccugcuaccccggcgacuucaucgacuacgaggagcuccgcgagcagcucuccuccgucuccuccuucgagcgcuucgagaucuuccccaagaccuccuccuggcccaaccacgacuccaacaagggcgucaccgccgccugcccccacgccggcgccaaguccuucuacaagaaccucaucuggcucgucaagaagggcaacuccuaccccaagcucuccgaguccuacaucaacgacaagggcaaggagguccucguccucuggggcauccaccaccccuccaccuccgccgaccagcagucccucuaccagaacgccgacgccuacgucuucgucggcuccucccgcuacuccaagaaguucaagcccgagaucgccgcccgccccaagguccgcggccaggccggccgcaugaacuacuacuggacccucgucgagcccggcgacaagaucaccuucgaggccaccggcaaccucgucgucccccgcuacgccuucgccauggagcgcaacgccggcuccggcaucaucaucuccgacacccccguccacgacugcaacaccaccugccagacccccaagggcgccaucaacaccucccuccccuuccagaacauccaccccaucaccaucggcaagugccccaaguacgucaaguccaccaagcuccgccucgccaccggccuccgcaacauccccuccauccagucccgcggccucuucggcgccaucgccggcuucaucgagggcggcuggaccggcauggucgacggcugguacggcuaccaccaccagaacgagcagggcuccggcuacgccgccgaccucaaguccacccagaacgccaucgacgagaucaccaacaaggucaacuccgucaucgagaagaugaacacccaguucaccgccgucggcaaggaguucaaccaccucgagaagcgcaucgagaaccucaacaagaaggucgacgacggcuuccucgacaucuggaccuacaacgccgagcuccucguccuccucgagaacgagcgcacccucgacuaccacgacuccaacgucaagaaccucuacgagaagguccgcucccagcucaagaacaacgccaaggagaucggcaacggcugcuucgaguucuaccacaagugcgacaacaccugcauggaguccgucaagaacggcaccuacgacuaccccaaguacuccgaggaggccaagcucaaccgcgaggagaucgacggcgucaagcucgaguccacccgcaucuaccagauccucgccaucuacuccaccgucgccuccucccucguccucgucgucucccucggcgccaucuccuucuggaugugcuccaacggcucccuccagugccgcaucugcaucuga

SEQ ID NO: 108332 - RNA, 1701 nt, Artificial Sequence; identical to SEQ ID NO: 108284
  derived and/or modified CDS sequence (opt2) from hemagglutinin__InfluenzaA__AHZ41539

SEQ ID NO: 108333 - RNA, 1701 nt, Artificial Sequence; identical to SEQ ID NO: 108279
  derived and/or modified CDS sequence (opt2) from hemagglutinin__InfluenzaA__AHZ41550

SEQ ID NO: 108334 - RNA, 1701 nt, Artificial Sequence; identical to SEQ ID NO: 108280
  derived and/or modified CDS sequence (opt2) from hemagglutinin__InfluenzaA__AHZ41561

SEQ ID NO: 108335 - RNA, 1701 nt, Artificial Sequence
  derived and/or modified CDS sequence (opt2) from hemagglutinin__InfluenzaA__AHZ41572
augaaggccauccucgucguccuccucuacaccuucgccaccgccaacgccgacacccucugcaucggcuaccacgccaacaacuccaccgacaccgucgacaccguccucgagaagaacgucaccgucacccacuccgucaaccuccucgaggacaagcacaacggcaagcucugcaagcuccgcggcgucgccccccuccaccucggcaagugcaacaucgccggcuggauccucggcaaccccgagugcgagucccucuccaccgccuccuccugguccuacaucgucgagacccccuccuccgacaacggcaccugcuaccccggcgacuucaucgacuacgaggagcuccgcgagcagcucuccuccgucuccuccuucgagcgcuucgagaucuuccccaagaccuccuccuggcccaaccacgacuccaacaagggcgucaccgccgccugcccccacgccggcgccaaguccuucuacaagaaccucaucuggcucgucaagaagggcaacuccuaccccaagcucuccaaguccuacaucaacgacaagggcaaggagguccucguccucuggggcauccaccaccccuccaccuccgccgagcagcagucccucuaccagaacgccgacgccuacgucuucgucggcuccucccgcuacuccaagaaguucaagcccgagaucgccgcccgccccaagguccgcggccaggccggccgcaugaacuacuacuggacccucgucgagcccggcgacgagaucaccuucgaggccaccggcaaccucgucgucccccgcuacgccuucgccauggagcgcaacgccggcuccggcaucaucaucuccgacacccccguccacgacugcaacaccaccugccagacccccaagggcgccaucaacaccucccuccccuuccagaacauccaccccaucaccaucggcaagugccccaaguacgucaaguccaccaagcuccgccucgccaccggccuccgcaacauccccuccauccagucccgcggccucuucggcgccaucgccggcuucaucgagggcggcuggaccggcauggucgacggcugguacggcuaccaccaccagaacgagcagggcuccggcuacgccgccgaccucaaguccacccagaacgccaucgacgagaucaccaacaaggucaacuccgucaucgagaagaugaacacccaguucaccgccgucggcaaggaguucaaccaccucgagaagcgcaucgagaaccucaacaagaaggucgacgacggcuuccucgacaucuggaccuacaacgccgagcuccucguccuccucgagaacgagcgcacccucgacuaccacgacuccaacgucaagaaccucuacgagaagguccgcucccagcucaagaacaacgccaaggagaucggcaacggcugcuucgaguucuaccacaagugcgacaacaccugcauggaguccgucaagaacggcaccuacgacuaccccaaguacuccgaggaggccaagcucaaccgcgaggagaucgacggcgucaagcucgaguccacccgcaucuaccagauccucgccaucuacuccaccgucgccuccucccucguccucgucgucucccucggcgccaucuccuucuggaugugcuccaacggcucccuccagugccgcaucugcaucuga

SEQ ID NO: 108336 - RNA, 1701 nt, Artificial Sequence; identical to SEQ ID NO: 108284
  derived and/or modified CDS sequence (opt2) from hemagglutinin__InfluenzaA__AHZ41583

SEQ ID NO: 108337 - RNA, 1701 nt, Artificial Sequence; identical to SEQ ID NO: 108279
  derived and/or modified CDS sequence (opt2) from hemagglutinin__InfluenzaA__AHZ41594

SEQ ID NO: 108338 - RNA, 1701 nt, Artificial Sequence
  derived and/or modified CDS sequence (opt2) from hemagglutinin__InfluenzaA__AHZ41605
augaaggccauccucgucguccuccucuacaccuucgccaccgccaacgccgacacccucugcaucggcuaccacgccaacaacuccaccgacaccgucgacaccguccucgagaagaacgucaccgucacccacuccgucaaccuccucgaggacaagcacaacggcaagcucugcaagcuccgcggcgucgccccccuccaccucggcaagugcaacaucgccggcuggauccucggcaaccccgagugcgagucccucuccaccgccuccuccugguccuacaucgucgagacccccuccuccgacaacggcaccugcuaccccggcgacuucaucgacuacgaggagcuccgcgagcagcucuccuccgucuccuccuucgagcgcuucgagaucuuccccaacaccuccuccuggcccaaccacgacuccaacaagggcgucaccgccgccugcccccacgccggcgccaaguccuucuacaagaaccucaucuggcucgucaagaagggcaacuccuaccccaagcucuccaaguccuacaucaacgacaagggcaaggagguccucguccucuggggcauccaccaccccuccaccuccgccgagcagcagucccucuaccagaacgccgacgccuacgucuucgucggcuccucccgcuacuccaagaaguucaagcccgagaucgccgcccgccccaaggucaugggccaggccggccgcaugaacuacuacuggacccucgucgagcccggcgacaagaucaccuucgaggccaccggcaaccucgucgucccccgcuacgccuucgccauggagcgcaacgccggcuccggcaucaucaucuccgacacccccguccacgacugcaacaccaccugccagacccccaagggcgccaucaacaccucccuccccuuccagaacauccaccccaucaccaucggcaagugccccaaguacgucaaguccaccaagcuccgccucgccaccggccuccgcaacauccccuccauccagucccgcggccucuucggcgccaucgccggcuucaucgagggcggcuggaccggcauggucgacggcugguacggcuaccaccaccagaacgagcagggcuccggcuacgccgccgaccucaaguccacccagaacgccaucgacgagaucaccaacaaggucaacuccgucaucgagaagaugaacacccaguucaccgccgucggcaaggaguucaaccaccucgagaagcgcaucgagaaccucaacaagaaggucgacgacggcuuccucgacaucuggaccuacaacgccgagcuccucguccuccucgagaacgagcgcacccucgacuaccacgacuccaacgucaagaaccucuacgagaagguccgcucccagcucaagaacaacgccaaggagaucggcaacggcugcuucgaguucuaccacaagugcgacaacaccugcauggaguccgucaagaacggcaccuacgacuaccccaaguacuccgaggaggccaagcucaaccgcgaggagaucgacggcgucaagcucgaguccacccgcaucuaccagauccucgccaucuacuccaccgucgccuccucccucguccucgucgucucccucggcgccaucuccuucuggaugugcuccaacggcucccuccagugccgcaucugcaucuga

SEQ ID NO: 108339 - RNA, 1701 nt, Artificial Sequence; identical to SEQ ID NO: 108279
  derived and/or modified CDS sequence (opt2) from hemagglutinin__InfluenzaA__AHZ41616

SEQ ID NO: 108340 - RNA, 1701 nt, Artificial Sequence; identical to SEQ ID NO: 108284
  derived and/or modified CDS sequence (opt2) from hemagglutinin__InfluenzaA__AHZ41627

SEQ ID NO: 108341 - RNA, 1701 nt, Artificial Sequence; identical to SEQ ID NO: 108284
  derived and/or modified CDS sequence (opt2) from hemagglutinin__InfluenzaA__AHZ41638

SEQ ID NO: 108342 - RNA, 1701 nt, Artificial Sequence; identical to SEQ ID NO: 108280
  derived and/or modified CDS sequence (opt2) from hemagglutinin__InfluenzaA__AHZ41649

SEQ ID NO: 108343 - RNA, 1701 nt, Artificial Sequence; identical to SEQ ID NO: 108280
  derived and/or modified CDS sequence (opt2) from hemagglutinin__InfluenzaA__AHZ41660

SEQ ID NO: 108344 - RNA, 1701 nt, Artificial Sequence; identical to SEQ ID NO: 108284
  derived and/or modified CDS sequence (opt2) from hemagglutinin__InfluenzaA__AHZ41671

SEQ ID NO: 108345 - RNA, 1701 nt, Artificial Sequence; identical to SEQ ID NO: 108284
  derived and/or modified CDS sequence (opt2) from hemagglutinin__InfluenzaA__AHZ41682

SEQ ID NO: 108346 - RNA, 1701 nt, Artificial Sequence; identical to SEQ ID NO: 108284
  derived and/or modified CDS sequence (opt2) from hemagglutinin__InfluenzaA__AHZ41693

SEQ ID NO: 108347 - RNA, 1701 nt, Artificial Sequence; identical to SEQ ID NO: 108284
  derived and/or modified CDS sequence (opt2) from hemagglutinin__InfluenzaA__AHZ41704

SEQ ID NO: 108348 - RNA, 1701 nt, Artificial Sequence; identical to SEQ ID NO: 108284
  derived and/or modified CDS sequence (opt2) from hemagglutinin__InfluenzaA__AHZ41715

SEQ ID NO: 108349 - RNA, 1701 nt, Artificial Sequence; identical to SEQ ID NO: 108284
  derived and/or modified CDS sequence (opt2) from hemagglutinin__InfluenzaA__AHZ41726

SEQ ID NO: 108350 - RNA, 1701 nt, Artificial Sequence; identical to SEQ ID NO: 108284
  derived and/or modified CDS sequence (opt2) from hemagglutinin__InfluenzaA__AHZ41737

SEQ ID NO: 108351 - RNA, 1701 nt, Artificial Sequence; identical to SEQ ID NO: 108284
  derived and/or modified CDS sequence (opt2) from hemagglutinin__InfluenzaA__AHZ41748

SEQ ID NO: 108352 - RNA, 1701 nt, Artificial Sequence; identical to SEQ ID NO: 108284
  derived and/or modified CDS sequence (opt2) from hemagglutinin__InfluenzaA__AHZ41759

SEQ ID NO: 108353 - RNA, 1701 nt, Artificial Sequence; identical to SEQ ID NO: 106111
  derived and/or modified CDS sequence (opt2) from hemagglutinin__InfluenzaA__AHZ42561

SEQ ID NO: 108354 - RNA, 1701 nt, Artificial Sequence
  derived and/or modified CDS sequence (opt2) from hemagglutinin__InfluenzaA__AHZ42572
augaagaccaucaucgcccucuccuacauccucugccucgucuucgcccagaagcuccccggcaacgacaacuccaccgccacccucugccucggccaccacgccguccccaacggcaccaucgucaagaccaucaccaacgaccgcaucgaggucaccaacgccaccgagcucguccagaacuccuccaucggcgagaucugcgacuccccccaccagauccucgacggcgagaacugcacccucaucgacgcccuccucggcgacccccagugcgacggcuuccagaacaagaagugggaccucuucgucgagcgcuccaaggccuacuccaacugcuaccccuacgacguccccgacuacgccucccuccgcucccucgucgccuccuccggcacccucgaguucaacaacgaguccuucaacuggaccggcgucacccagaacggcaccuccuccgccugcauccgccgcuccaacuccuccuucuucucccgccucaacuggcucacccaccucaacuucaaguaccccgcccucaacgucaccaugcccaacaacgagcaguucgacaagcucuacaucuggggcguccaccaccccggcaccgacaaggaccagaucuuccucuacgcccaguccuccggccgcaucaccgucuccaccaagcgcucccagcaggccgucauccccaacaucggcucccgcccccgcauccgcaacauccccucccgcaucuccaucuacuggaccaucgucaagcccggcgacauccuccucaucaacuccaccggcaaccucaucgccccccgcggcuacuucaagauccgcuccggcaaguccuccaucaugcgcuccgacgcccccaucggcaagugcaaguccgagugcaucacccccaacggcuccauccccaacgacaagcccuuccagaacgucaaccgcaucaccuacggcgccugcccccgcuacgucaagcaguccacccucaagcucgccaccggcaugcgcaacguccccgagaagcagacccgcggcaucuucggcgccaucgccggcuucaucgagaacggcugggagggcauggucgacggcugguacggcuuccgccaccagaacuccgagggccgcggccaggccgccgaccucaaguccacccaggccgccaucgaccagaucaacggcaagcucaaccgccucaucggcaagaccaacgagaaguuccaccagaucgagaaggaguucuccgaggucgagggccgcauccaggaccucgagaaguacgucgaggacaccaagaucgaccucugguccuacaacgccgagcuccucgucgcccucgagaaccagcacaccaucgaccucaccgacuccgagauggacaagcucuucgagaagaccaagaagcagcuccgcgagaacgccgaggacaugggcaacggcugcuucaagaucuaccacaagugcgacaacgccugcaucggcuccauccgcaacggcaccuacgaccacgacgucuaccgcgacgaggcccucaacaaccgcuuccagaucaagggcgucgagcucaaguccggcuacaaggacuggauccucuggaucuccuucgccaucuccugcuuccuccucugcgucgcccuccucggcuucaucaugugggccugccagaagggcaacauccgcugcaacaucugcaucuga

SEQ ID NO: 108355 - RNA, 1701 nt, Artificial Sequence; identical to SEQ ID NO: 107822
  derived and/or modified CDS sequence (opt2) from hemagglutinin__InfluenzaA__AHZ42584

SEQ ID NO: 108356 - RNA, 1701 nt, Artificial Sequence; identical to SEQ ID NO: 105919
  derived and/or modified CDS sequence (opt2) from hemagglutinin__InfluenzaA__AHZ42596

SEQ ID NO: 108357 - RNA, 1701 nt, Artificial Sequence; identical to SEQ ID NO: 106096
  derived and/or modified CDS sequence (opt2) from hemagglutinin__InfluenzaA__AHZ42608

SEQ ID NO: 108358 - RNA, 1701 nt, Artificial Sequence; identical to SEQ ID NO: 105919
  derived and/or modified CDS sequence (opt2) from hemagglutinin__InfluenzaA__AHZ42619

SEQ ID NO: 108359 - RNA, 1701 nt, Artificial Sequence
  derived and/or modified CDS sequence (opt2) from hemagglutinin__InfluenzaA__AHZ42631
augaagaccaucaucgcccucuccuacauccucugccucgucuucgcccagaagcuccccggcaacuacaacuccaccgccacccucugccucggccaccacgccguccccaacggcaccaucgucaagaccaucaccaacgaccgcaucgaggucaccaacgccaccgagcucguccagaacuccuccaucggcgagaucugcgacuccccccaccagauccucgacggcgagaacugcacccucaucgacgcccuccucggcgacccccagugcgacggcuuccagaacaagaagugggaccucuucgucgagcgcuccaaggccuacuccaacugcuaccccuacgacguccccgacuacgccucccuccgcucccucgucgccuccuccggcacccucgaguucaacaacgaguccuucaacuggaccggcgucacccagaacggcaccuccuccgccugcauccgccgcuccaacuccuccuucuucucccgccucaacuggcucacccaccucaacuucaaguaccccgcccucaacgucaccaugcccaacaacgagcaguucgacaagcucuacaucuggggcguccaccaccccggcaccgacaaggaccagaucuuccucuacgcccaguccuccggccgcaucaccgucuccaccaagcgcucccagcaggccgucauccccaacaucggcucccgcccccgcauccgcaacauccccucccgcaucuccaucuacuggaccaucgucaagcccggcgacauccuccucaucaacuccaccggcaaccucaucgccccccgcggcuacuucaagauccgcuccggcaaguccuccaucaugcgcuccgacgcccccaucggcaagugcaaguccgagugcaucacccccaacggcuccauccccaacgacaagcccuuccagaacgucaaccgcaucaccuacggcgccugcccccgcuacgucaagcaguccacccucaagcucgccaccggcaugcgcaacguccccgagaagcagacccgcggcaucuucggcgccaucgccggcuucaucgagaacggcugggagggcauggucgacggcugguacggcuuccgccaccagaacuccgagggccgcggccaggccgccgaccucaaguccacccaggccgccaucgaccagaucaacggcaagcucaaccgccucaucggcaagaccaacgagaaguuccaccagaucgagaaggaguucuccgaggucgagggccgcauccaggaccucgagaaguacgucgaggacaccaagaucgaccucugguccuacaacgccgagcuccucgucgcccucgagaaccagcacaccaucgaccucaccgacuccgagaugaacaagcucuucgagaagaccaagaagcagcuccgcgagaacgccgaggacaugggcaacggcugcuucaagaucuaccacaagugcgacaacgccugcaucggcuccauccgcaacggcaccuacgaccacgacgucuaccgcgacgaggcccucaacaaccgcuuccagaucaagggcgucgagcucaaguccggcuacaaggacuggauccucuggaucuccuucgccaucuccugcuuccuccucugcgucgcccuccucggcuucaucaugugggccugccagaagggcaacauccgcugcaacaucugcaucuga

SEQ ID NO: 108360 - RNA, 1701 nt, Artificial Sequence
  derived and/or modified CDS sequence (opt2) from hemagglutinin__InfluenzaA__AHZ42643
augaaggccauccucgucgucaugcucuacaccuucgccaccgccaacgccgacacccucugcaucggcuaccacgccaacaacuccaccgacaccgucgacaccguccucgagaagaacgucaccgucacccacuccgucaaccuccucgaggacaagcacaacggcaagcucugcaagcuccgcggcgucgccccccuccaccucggcaagugcaacaucgccggcuggauccucggcaaccccgagugcgagucccucuccaccgccuccuccugguccuacaucgucgagaccuccggcuccgacaacggcaccugcuaccccggcgacuucaucgacuacgaggagcuccgcgagcagcucuccuccgucuccuccuucgagcgcuucgagaucuuccccaaggccuccuccuggcccaaccacgacuccaacaagggcgucaccgccgccugcccccacgccggcgccaagggcuucuacaagaaccucaucuggcucgucaagaagggcaacuccuaccccaagcucuccaucuccuacaucaacgacaagggcaaggagguccucguccucuggggcauccaccaccccuccaccaccgccgaccagcagucccucuaccagaacgccgacaccuacgucuucgucggcaccucccgcuacuccaagaaguucaagcccgagaucgccauccgccccaagguccgcgaccaggagggccgcaugaacuacuacuggacccucgucgagcccggcgacaagaucaccuucgaggccaccggcaaccucgucgucccccgcuacgccuucgccauggagcgcaacgccggcuccggcaucaucaucuccgacacccccguccacgacugcaacaccaccugccagacccccaagggcgccaucaacaccucccuccccuuccagaacauccaccccaucaccaucggcaagugccccaaguacgucaaguccaccaagcuccgccucgccaccggccuccgcaacguccccuccauccagucccgcggccucuucggcgccaucgccggcuucaucgagggcggcuggaccggcauggucgacggcugguacggcuaccaccaccagaacgagcagggcuccggcuacgccgccgaccucaaguccacccagaacgccaucgacaagaucaccaacaaggucaacuccgucaucgagaagaugaacacccaguucaccgccgucggcaaggaguucaaccaccucgagaagcgcaucgagaaccucaacaagaaggucgacgacggcuuccucgacaucuggaccuacaacgccgagcuccucguccuccucgagaacgagcgcacccucgacuaccacgacuccaacgucaagaaccucuacgagaagguccgcaaccagcucaagaacaacgccaaggagaucggcaacggcugcuucgaguucuaccacaagugcgacaacaccugcauggaguccgucaagaacggcaccuacgacuaccccaaguacuccgaggaggccaagcucaaccgcgagaagaucgacggcgucaagcucgaguccacccgcaucuaccagauccucgccaucuacuccaccgccgccuccucccucguccucgucgucucccucggcgccaucuccuucuggaugugcuccaacggcucccuccagugccgcaucugcaucuga

SEQ ID NO: 108361 - RNA, 1701 nt, Artificial Sequence; identical to SEQ ID NO: 105919
  derived and/or modified CDS sequence (opt2) from hemagglutinin__InfluenzaA__AHZ42654

SEQ ID NO: 108362 - RNA, 1701 nt, Artificial Sequence; identical to SEQ ID NO: 105894
  derived and/or modified CDS sequence (opt2) from hemagglutinin__InfluenzaA__AHZ42666

SEQ ID NO: 108363 - RNA, 1701 nt, Artificial Sequence; identical to SEQ ID NO: 105894
  derived and/or modified CDS sequence (opt2) from hemagglutinin__InfluenzaA__AHZ42678

SEQ ID NO: 108364 - RNA, 1701 nt, Artificial Sequence
  derived and/or modified CDS sequence (opt2) from hemagglutinin__InfluenzaA__AHZ42690
augaaggccauccucgucguccuccucuacaccuacgccaccgccaacgccgacacccucugcaucggcuaccacgccaacaacuccaccgacaccgucgacaccguccucgagaagaacgucaccgucacccacuccgucaaccuccucgaggacaagcacaacggcaagcucugcaagcuccgcggcgucgccccccuccaccucggcaagugcaacaucgccggcuggauccucggcaaccccgagugcgagucccucuccaccgccuccuccugguccuacaucgucgagaccuccuccuccgacaacggcaccugcuaccccggcgacuucaucaacuacgaggagcuccgcgagcagcucuccuccgucuccuccuucgagcgcuucgagaucuuccccaagaccuccuccuggcccaaccacgacuccaacaagggcgucaccgccgccugcccccacgccggcgccaaguccuucuacaagaaccucaucuggcucgucaagaagggcaacuccuaccccaagcucuccaaguccuacaucaacgacaagggcaaggagguccucguccucuggggcauccaccaccccuccaccaccaccgaccagcagucccucuaccagaacgccgacgccuacgucuucgucggcaccucccgcuacuccaagaaguucaagcccgagaucgccauccgccccaagguccgcgaccaggagggccgcaugaacuacuacuggacccucaucgagcccggcgacaagaucaccuucgaggccaccggcaaccucgucgucccccgcuacgccuucgccauggagcgcaacgccggcuccggcaucaucaucuccgacacccccguccacgacugcaacaccaccugccagacccccgagggcgccaucaacaccucccuccccuuccagaacauccaccccaucaccaucggcaagugccccaaguacgucaaguccaccaagcuccgccucgccaccggccuccgcaacguccccuccauccagucccgcggccucuucggcgccaucgccggcuucaucgagggcggcuggaccggcauggucgacggcugguacggcuaccaccaccagaacgagcagggcuccggcuacgccgccgaccucaaguccacccagaacgccaucgacaagaucaccaacaaggucaacuccgucaucgagaagaugaacacccaguucaccgccgucggcaaggaguucaaccaccucgagaagcgcaucgagaaccucaacaagaaggucgacgacggcuuccucgacaucuggaccuacaacgccgagcuccucguccuccucgagaacgagcgcacccucgacuaccacgacuccaacgucaagaaccucuacgagaagguccgcaaccagcucaagaacaacgccaaggagaucggcaacggcugcuucgaguucuaccacaagugcgacaacaccugcauggaguccgucaagaacggcaccuacgacuaccccaaguacuccgaggaggccaagcucaaccgcgagaagaucgacggcgucaagcucgaguccacccgcaucuaccagauccucgccaucuacuccaccgucgccuccucccucguccucgucgucucccucggcgccaucuccuucuggaugugcuccaacggcucccuccagugccgcaucugcaucuga

SEQ ID NO: 108365 - RNA, 1701 nt, Artificial Sequence; identical to SEQ ID NO: 105919
  derived and/or modified CDS sequence (opt2) from hemagglutinin__InfluenzaA__AHZ42701

SEQ ID NO: 108366 - RNA, 1701 nt, Artificial Sequence; identical to SEQ ID NO: 105894
  derived and/or modified CDS sequence (opt2) from hemagglutinin__InfluenzaA__AHZ42713

SEQ ID NO: 108367 - RNA, 1701 nt, Artificial Sequence
  derived and/or modified CDS sequence (opt2) from hemagglutinin__InfluenzaA__AHZ42725
augaagaccaucaucgcccucuccuacauccucugccucgucuucgcccagaagcuccccggcaacgacaacuccaccgccacccucugccucggccaccacgccguccccaacggcaccaucgucaagaccaucaccaacgaccgcaucgaggucaccaacgccaccgagcucguccagaacuccuccaucggcgagaucugcgacuccccccaccagauccucgacggcgagaacugcacccucaucgacgcccuccucggcgacccccagugcgacggcuuccagaacaagaagugggaccucuucgucgagcgcuccaaggccuacuccaacugcuaccccuacgacguccccgacuacgccucccuccgcucccucgucgccuccuccggcacccucgaguucaacaacgaguccuucaacuggaccggcgucacccagaacggcaccuccuccgccugcauccgccgcuccaacuccuccuucuucucccgccucaacuggcucacccaccucaacuucaaguaccccgcccucaacgucaccaugcccaacaacgagcaguucgacaagcucuacaucuggggcguccaccaccccggcaccgacaaggaccagaucuuccucuacgcccaguccuccggccgcaucaccgucuccaccaagcgcucccagcaggccgucauccccaacaucggcucccgcccccgcauccgcaacauccccucccgcaucuccaucuacuggaccaucgucaagcccggcgacauccuccucaucaacuccaccggcaaccucaucgccccccgcggcuacuucaagauccgcaacggcaaguccuccaucaugcgcuccgacgcccccaucggcaagugcaaguccgagugcaucacccccaacggcuccauccccaacgacaagcccuuccagaacgucaaccgcaucaccuacggcgccugcccccgcuacgucaagcaguccacccucaagcucgccaccggcaugcgcaacguccccgagaagcagacccgcggcaucuucggcgccaucgccggcuucaucgagaacggcugggagggcauggucgacggcugguacggcuuccgccaccagaacuccgagggccgcggccaggccgccgaccucaaguccacccaggccgccaucgaccagaucaacggcaagcucaaccgccucaucggcaagaccaacgagaaguuccaccagaucgagaaggaguucuccgaggucgagggccgcauccaggaccucgagaaguacgucgaggacaccaagaucgaccucugguccuacaacgccgagcuccucgucgcccucgagaaccagcacaccaucgaccucaccgacuccgagaugaacaagcucuucgagaagaccaagaagcagcuccgcgagaacgccgaggacaugggcaacggcugcuucaagaucuaccacaagugcgacaacgccugcaucggcuccauccgcaacggcaccuacgaccacgacgucuaccgcgacgaggcccucaacaaccgcuuccagaucaagggcgucgagcucaaguccggcuacaaggacuggauccucuggaucuccuucgccaucuccugcuuccuccucugcgucgcccuccucggcuucaucaugugggccugccagaagggcaacauccgcugcaacaucugcaucuga

SEQ ID NO: 108368 - RNA, 1701 nt, Artificial Sequence
  derived and/or modified CDS sequence (opt2) from hemagglutinin__InfluenzaA__AHZ42737
augaaggccauccucgucguccuccucuacaccuucgccaccgccaacgccgacacccucugcaucggcuaccacgccaacaacuccaccgacaccgucgacaccguccucgagaagaacgucaccgucacccacuccgucaaccuccucgaggacaagcacaacggcaagcucugcaagcuccgcggcgucgccccccuccaccucggcaagugcaacaucgccggcuggauccucggcaaccccgagugcgagucccucuccaccgccuccuccugguccuacaucgucgagaccuccuccuccgacaacggcaccugcuaccccggcgacuucaucaacuacgaggagcuccgcgagcagcucuccuccgucuccuccuucgagcgcuucgagaucuuccccaagaccuccuccuggcccaaccacgacuccaacaagggcgucaccgccgccugcccccacgccggcgccaaguccuucuacaagaaccucaucuggcucgucaagaagggcaacuccuaccccaagcucuccaaguccuacaucaacgacaagggcaaggagguccucguccucuggggcauccaccaccccuccaccaccgccgaccagcagucccucuaccagaacgccgacgccuacgucuucgucggcaccucccgcuacuccaagaaguucaagcccgagaucgccauccgccccaagguccgcgaccaggagggccgcaugaacuacuacuggacccucaucgagcccggcgacaagaucaccuucgaggccaccggcaaccucgucgucccccgcuacgccuucgccauggagcgcaacgccgaguccggcaucaucaucuccgacacccccguccacgacugcaacaccaccugccagacccccgagggcgccaucaacaccucccuccccuuccagaacauccaccccaucaccaucggcaagugccccaaguacgucaaguccaccaagcuccgccucgccaccggccuccgcaacguccccuccauccagucccgcggccucuucggcgccaucgccggcuucaucgagggcggcuggaccggcauggucgacggcugguacggcuaccaccaccagaacgagcagggcuccggcuacgccgccgaccucaaguccacccagaacgccaucgacaagaucaccaacaaggucaacuccgucaucgagaagaugaacacccaguucaccgccgucggcaaggaguucaaccaccucgagaagcgcaucgagaaccucaacaagaaggucgacgacggcuuccucgacaucuggaccuacaacgccgagcuccucguccuccucgagaacgagcgcacccucgacuaccacgacuccaacgucaagaaccucuacgagaagguccgcaaccagcucaagaacaacgccaaggagaucggcaacggcugcuucgaguucuaccacaagugcgacaacaccugcauggaguccgucaagaacggcaccuacgacuaccccaaguacuccgaggaggccaagcucaaccgcgagaagaucgacggcgucaagcucgaguccacccgcaucuaccagauccucgccaucuacuccaccgucgccuccucccucguccucgucgucucccucggcgccaucuccuucuggaugugcuccaacggcucccuccagugccgcaucugcaucuga

SEQ ID NO: 108369 - RNA, 1701 nt, Artificial Sequence; identical to SEQ ID NO: 105919
  derived and/or modified CDS sequence (opt2) from hemagglutinin__InfluenzaA__AHZ42748

SEQ ID NO: 108370 - RNA, 1701 nt, Artificial Sequence; identical to SEQ ID NO: 105939
  derived and/or modified CDS sequence (opt2) from hemagglutinin__InfluenzaA__AHZ42760

SEQ ID NO: 108371 - RNA, 1701 nt, Artificial Sequence
  derived and/or modified CDS sequence (opt2) from hemagglutinin__InfluenzaA__AHZ42772
augaagaccaucaucgcccucuccuacauccucugccucgucuucgcccaggagcuccccggcaacgacgacuccaccgccacccucugccucggccaccacgccguccccaacggcaccaucgucaagaccaucaccaacgaccgcaucgaggucaccaacgccaccgagcucguccaguccuccuccaccggcgagaucugcaacuccccccaccagauccucgacggcgagaacugcacccucaucgacgcccuccucggcgacccccagugcgacggcuuccagaacaagaagugggaccucuucgucgagcgcuccaaggcccacuccaacugcuaccccuacgacguccccgacuacgccucccuccgcucccucgucgccuccuccggcacccucgaguucaacaacgaguccuucaacuggaccggcgucacccagaacggcaccuccuccgccugcauccgccgcuccaacaacuccuucuucucccgccucaacuggcucacccaccucaacuucaaguaccccgcccucaacgucaccaugcccaacaacgagcaguucgacaagcucuacaucuggggcguccaccaccccggcaccgacaaggaccagaucuuccucuacgcccaggccuccggccgcaucaccgucuccaccaagcgcucccagcagaccgucauccccaacaucggcucccgcccccgcguccgcaacauccccucccgcgucuccaucuacuggaccaucgucaagcccggcgacauccuccucaucaacuccaccggcaaccucaucgccccccgcggcuacuucaagauccgcuccggcaaguccuccaucaugcgcuccgacgcccccaucggcaagugcaacuccgccugcaucacccccaacggcuccauccccaacgacaagcccuuccagaacgucaaccgcaucaccuacggcgccugcccccgcuacgucaagcagaacacccucaagcucgccaccggcaugcgcaacguccccgagaagcagacccgcggcaucuucggcgccaucgccggcuucaucgagaacggcugggagggcauggucgacggcugguacggcuuccgccaccagaacuccgagggccgcggccaggccgccgaccucaaguccacccaggccgccaucgaccagaucaacggcaagcucaaccgccucaucggcaagaccaacgagaaguuccaccagaucgagaaggaguucuccgaggucgagggccgcauccaggaccucgagaaguacgucgaggacaccaagaucgaccucugguccuacaacgccgagcuccucgucgcccucgagaaccagcacaccaucgaccucaccgacuccgagaugaacaagcucuucgagaagaccaagaagcagcuccgcgagaacgccgaggacaugggcaacggcugcuucaagaucuaccacaagugcgacaacgccugcaucggcuccauccgcaacggcaccuacgaccacgacgucuaccgcgacgaggcccucaacaaccgcuuccagaucaaggaggucgagcucaaguccggcuacaaggacuggauccucuggaucuccuucgccaucuccugcuuccuccucugcgucgcccuccucggcuucaucaugugggccugccagaagggcaacauccgcugcaacaucugcaucuga

SEQ ID NO: 108372 - RNA, 1701 nt, Artificial Sequence; identical to SEQ ID NO: 105919
  derived and/or modified CDS sequence (opt2) from hemagglutinin__InfluenzaA__AHZ42784

SEQ ID NO: 108373 - RNA, 1701 nt, Artificial Sequence; identical to SEQ ID NO: 105894
  derived and/or modified CDS sequence (opt2) from hemagglutinin__InfluenzaA__AHZ42796

SEQ ID NO: 108374 - RNA, 1701 nt, Artificial Sequence; identical to SEQ ID NO: 105894
  derived and/or modified CDS sequence (opt2) from hemagglutinin__InfluenzaA__AHZ42808

SEQ ID NO: 108375 - RNA, 1701 nt, Artificial Sequence; identical to SEQ ID NO: 108368
  derived and/or modified CDS sequence (opt2) from hemagglutinin__InfluenzaA__AHZ42820

SEQ ID NO: 108376 - RNA, 1701 nt, Artificial Sequence; identical to SEQ ID NO: 106503
  derived and/or modified CDS sequence (opt2) from hemagglutinin__InfluenzaA__AHZ42831

SEQ ID NO: 108377 - RNA, 1701 nt, Artificial Sequence
  derived and/or modified CDS sequence (opt2) from hemagglutinin__InfluenzaA__AHZ42843
augaagaccaucaucgcccucuccuacauccucugccucgucuucgcccagaagcuccccggcaacgacaacuccaccgccacccucugccucggccaccacgccguccccaacggcaccauggucaagaccaucaccaacgaccgcaucgaggucaccaacgccaccgagcucguccagaacuccuccaucggcgagaucugcgacuccccccaccagauccucgacggcgagaacugcacccucaucgacgcccuccucggcgacccccagugcgacggcuuccagaacaagaagugggaccucuucgucgagcgcuccaaggccuacuccaacugcuaccccuacgacguccccgacuacgccucccuccgcucccucgucgccuccuccggcacccucgaguucaacaacgaguccuucaacuggaccggcgucacccagaacggcaccuccuccgccugcauccgccgcuccaacuccuccuucuucucccgccucaacuggcucacccaccucaacuucaaguaccccgcccucaacgucaccaugcccaacaacgagcaguucgacaagcucuacaucuggggcguccaccaccccggcaccgacaaggaccagaucuuccucuacgcccaguccuccggccgcaucaccgucuccaccaagcgcucccagcaggccgucauccccaacaucggcucccgcccccgcauccgcaacauccccucccgcaucuccaucuacuggaccaucgucaagcccggcgacauccuccucaucaacuccaccggcaaccucaucgccccccgcggcuacuucaagauccgcuccggcaaguccuccaucaugcgcuccgacgcccccaucggcaagugcaaguccgagugcaucacccccaacggcuccauccccaacgacaagcccuuccagaacgucaaccgcaucaccuacggcgccugcccccgcuacgucaagcaguccacccucaagcucgccaccggcaugcgcaacguccccgagaagcagacccgcggcaucuucggcgccaucgccggcuucaucgagaacggcugggagggcauggucgacggcugguacggcuuccgccaccagaacuccgagggccgcggccaggccgccgaccucaaguccacccaggccgccaucgaccagaucaacggcaagcucaaccgccucaucggcaagaccaacgagaaguuccaccagaucgagaaggaguucuccgaggucgagggccgcauccaggaccucgagaaguacgucgaggacaccaagaucgaccucugguccuacaacgccgagcuccucgucgcccucgagaaccagcacaccaucgaccucaccgacuccgagaugaacaagcucuucgagaagaccaagaagcagcuccgcgagaacgccgaggacaugggcaacggcugcuucaagaucuaccacaagugcgacaacgccugcaucggcuccauccgcaacggcaccuacgaccacaacgucuaccgcgacgaggcccucaacaaccgcuuccagaucaagggcgucgagcucaaguccggcuacaaggacuggauccucuggaucuccuucgccaucuccugcuuccuccucugcgucgcccuccucggcuucaucaugugggccugccagaagggcaacauccgcugcaacaucugcaucuga

SEQ ID NO: 108378 - RNA, 1701 nt, Artificial Sequence
  derived and/or modified CDS sequence (opt2) from hemagglutinin__InfluenzaA__AHZ42855
augaagaccaucaucgcccucuccuacauccucugccucgucuucgcccagaagcuccccggcaacgacaacuccaccgccacccucugccucggccaccacgccguccccaacggcaccaucgucaagaccaucaccaacgaccgcaucgaggucaccaacgccaccgagcucguccagaacuccuccaucggcgagaucugcgacuccccccaccagauccucgacggcgagaacugcacccucaucgacgcccuccucggcgacccccagugcgacggcuuccagaacaagaagugggaccucuucgucgagcgcuccaaggccuacuccaacugcuaccccuacgacguccccgacuacgccucccuccgcucccucgucgccuccuccggcacccucgaguucaacaacgaguccuucaacuggaccggcgucacccagaacggcaccuccuccgccugcauccgccgcuccaacuccuccuucuucucccgccucaacuggcucacccaccucaacuucaaguaccccgcccucaacaugaccaugcccaacaacgagcaguucgacaagcucuacaucuggggcguccaccaccccggcaccgacaaggaccagaucuuccucuacgcccaguccuccggccgcaucaccgucuccaccaagcgcucccagcaggccgucauccccaacaucggcucccgcccccgcauccgcaacauccccucccgcaucuccaucuacuggaccaucgucaagcccggcgacauccuccucaucaacuccaccggcaaccucaucgccccccgcggcuacuucaagauccgcuccggcaaguccuccaucaugcgcuccgacgcccccaucggcaagugcaaguccgagugcaucacccccaacggcuccauccccaacgacaagcccuuccagaacgucaaccgcaucaccuacggcgccugcccccgcuacgucaagcaguccacccucaagcucgccaccggcaugcgcaacguccccgagaagcagacccgcggcaucuucggcgccaucgccggcuucaucgagaacggcugggagggcauggucgacggcugguacggcuuccgccaccagaacuccgagggccgcggccaggccgccgaccucaaguccacccaggccgccaucgaccagaucaacggcaagcucaaccgccucaucggcaagaccaacgagaaguuccaccagaucgagaaggaguucuccgaggucgagggccgcauccaggaccucgagaaguacgucgaggacaccaagaucgaccucugguccuacaacgccgagcuccucgucgcccucgagaaccagcacaccaucgaccucaccgacuccgagaugaacaagcucuucgagaagaccaagaagcagcuccgcgagaacgccgaggacaugggcaacggcugcuucaagaucuaccacaagugcgacaacgccugcaucggcuccauccgcaacggcaccuacgaccacaacgucuaccgcgacgaggcccucaacaaccgcuuccagaucaagggcgucgagcucaaguccggcuacaaggacuggauccucuggaucuccuucgccaucuccugcuuccuccucugcgucgcccuccucggcuucaucaugugggccugccagaagggcaacauccgcugcaacaucugcaucuga

SEQ ID NO: 108379 - RNA, 1701 nt, Artificial Sequence
  derived and/or modified CDS sequence (opt2) from hemagglutinin__InfluenzaA__AHZ42867
augaagaccaucaucgcccucuccuacauccucugccucgucuucgcccagaagcuccccggcaacgacaacuccaccgccacccucugccucggccaccacgccguccccaacggcaccaucgucaagaccaucaccaacgaccagaucgaggucaccaacgccaccgagcucguccagaacuccuccaucggcgagaucugcgacuccccccaccagauccucgacggcgagaacugcacccucaucgacgcccuccucggcgacccccagugcgacggcuuccagaacaagaagugggaccucuucgucgagcgcuccaaggccuacuccaacugcuaccccuacgacguccccgacuacgccucccuccgcucccucgucgccuccuccggcacccucgaguucaacaacgaguccuucaacugggccggcgucacccagaacggcaccuccuccgccugcauccgcggcuccaacuccuccuucuucucccgccucaacuggcucacccaccucaacuucaaguaccccgcccucaacgucaccaugcccaacaacgagcaguucgacaagcucuacaucuggggcguccaccaccccggcaccgacaaggaccagaucuuccucuacgcccaguccuccggccgcaucaccgucuccaccaagcgcucccagcaggccgucauccccaacaucggcucccgcccccgcauccgcaacauccccucccgcaucuccaucuacuggaccaucgucaagcccggcgacauccuccucaucaacuccaccggcaaccucaucgccccccgcggcuacuucaagauccgcuccggcaaguccuccaucaugcgcuccgacgcccccaucggcaagugcaaguccgagugcaucacccccaacggcuccauccccaacgacaagcccuuccagaacgucaaccgcaucaccuacggcgccugcccccgcuacgucaagcaguccacccucaagcucgccaccggcaugcgcaacguccccgagaagcagacccgcggcaucuucggcgccaucgccggcuucaucgagaacggcugggagggcauggucgacggcugguacggcuuccgccaccagaacuccgagggccgcggccaggccgccgaccucaaguccacccaggccgccaucgaccagaucaacggcaagcucaaccgccucaucggcaagaccaacgagaaguuccaccagaucgagaaggaguucuccgaggucgagggccgcauccaggaccucgagaaguacgucgaggacaccaagaucgaccucugguccuacaacgccgagcuccucgucgcccucgagaaccagcacaccaucgaccucaccgacuccgagaugaacaagcucuucgagaagaccaagaagcagcuccgcgagaacgccgaggacaugggcaacggcugcuucaagaucuaccacaagugcgacaacgccugcaucggcuccauccgcaacggcaccuacgaccacgacgucuaccgcgacgaggcccucaacaaccgcuuccagaucaagggcgucgagcucaaguccgaguacaaggacuggauccucuggaucuccuucgccaucuccugcuuccuccucugcgucgcccuccucggcuucaucaugugggccugccagaagggcaacauccgcugcaacaucugcaucuga

SEQ ID NO: 108380 - RNA, 1701 nt, Artificial Sequence; identical to SEQ ID NO: 105894
  derived and/or modified CDS sequence (opt2) from hemagglutinin__InfluenzaA__AHZ42879

SEQ ID NO: 108381 - RNA, 1701 nt, Artificial Sequence
  derived and/or modified CDS sequence (opt2) from hemagglutinin__InfluenzaA__AHZ42891
augaagaccaucaucgcccucuccuacauccucugccucgucuucgcccagaagcuccccggcaacgacaacuccaccgccacccucugccucggccaccacgccguccccaacggcaccaucgucaagaccaucaccaacgaccgcaucgaggucaccaacgccaccgagcucguccagaacuccuccaucggcgagaucugcgacuccccccaccagauccucgacggcgagaacugcacccucaucgacgcccuccucggcgacccccagugcgacggcuuccagaacaagaagugggaccucuucgucgagcgcuccaaggccuacuccuccugcuaccccuacgacguccccgacuacgccucccuccgcucccucgucgccuccuccggcacccucgaguucaacaacgaguccuucaacugggccggcgucacccagaacggcaccuccuccgccugcauccgccgcuccaacuccuccuucuucucccgccucaacuggcucacccaccucaacuucaaguaccccgcccucaacgucaccaugcccaacaacgagcaguucgacaagcucuacaucuggggcguccaccaccccggcaccgacaaggaccagaucuuccucuacgcccaguccuccggccgcaucaccgucuccaccaagcgcucccagcaggccgucauccccaacaucggcucccgcccccgcauccgcaacauccccucccgcaucuccaucuacuggaccaucgucaagcccggcgacauccuccucaucaacuccaccggcaaccucaucgccccccgcggcuacuucaagauccgcuccggcaaguccuccaucaugcgcuccgacgcccccaucggcaagugcaaguccgagugcaucacccccaacggcuccauccccaacgacaagcccuuccagaacgucaaccgcaucaccuacggcgccugcccccgcuacgucaagcaguccacccucaagcucgccaccggcaugcgcaacguccccgagaagcagacccgcggcaucuucggcgccaucgccggcuucaucgagaacggcugggagggcauggucgacggcugguacggcuuccgccaccagaacuccgagggccgcggccaggccgccgaccucaaguccacccaggccgccaucgaccagaucaacggcaagcucaaccgccucaucggcaagaccaacgagaaguuccaccagaucgagaaggaguucuccgaggucgagggccgcauccaggaccucgagaaguacgucgaggacaccaagaucgaccucugguccuacaacgccgagcuccucgucgcccucgagaaccagcacaccaucgaccucaccgacuccgagaugaacaagcucuucgagaagaccaagaagcagcuccgcgagaacgccgaggacaugggcaacggcugcuucaagaucuaccacaagugcgacaacgccugcaucggcuccauccgcaacggcaccuacgaccacgacgucuaccgcgacgaggcccucaacaaccgcuuccagaucaagggcgucgagcucaaguccggcuacaaggacuggauccucuggaucuccuucgccaucuccugcuuccuccucugcgucgcccuccucggcuucaucaugugggccugccagaagggcaacauccgcugcaacaucugcaucuga

SEQ ID NO: 108382 - RNA, 1701 nt, Artificial Sequence
  derived and/or modified CDS sequence (opt2) from hemagglutinin__InfluenzaA__AHZ42903
augaagaccaucaucgcccucuccuacauccucugccucgucuucgcccagaagauccccggcaacgacaacuccaccgccacccucugccucggccaccacgccguccccaacggcaccaucgucaagaccaucaccaacgaccgcaucgaggucaccaacgccaccgagcucguccagaacuccuccaucggcgagaucugcgacuccccccaccagauccucgacggcgagaacugcacccucaucgacgcccuccucggcgacccccagugcgacggcuuccagaacaagaagugggaccucuucgucgagcgcuccaaggccuacuccaacugcuaccccuacgacguccccgacuacgccucccuccgcucccucgucgccuccuccggcacccucgaguucaacaacgaguccuucaacuggaccggcgucacccagaacggcaccuccuccgccugcauccgccgcuccaacuccuccuucuucucccgccucaacuggcucacccaccucaacuucaaguaccccgcccucaacgucaccaugcccaacaacgagcaguucgacaagcucuacaucuggggcguccaccaccccggcaccgacaaggaccagaucuuccucuacgcccaguccuccggccgcaucaccgucuccaccaagcgcucccagcaggccgucauccccaacaucggcucccgcccccgcauccgcaacauccccucccgcaucuccaucuacuggaccaucgucaagcccggcgacauccuccucaucaacuccaccggcaaccucaucgccccccgcggcuacuucaagauccgcuccggcaaguccuccaucaugcgcuccgacgcccccaucggcaagugcaaguccgagugcaucacccccaacggcuccauccccaacgacaagcccuuccagaacgucaaccgcaucaccuacggcgccugcccccgcuacgucaagcaguccacccucaagcucgccaccggcaugcgcaacguccccgagaagcagacccgcggcaucuucggcgccaucgccggcuucaucgagaacggcugggagggcauggucgacggcugguacggcuuccgccaccagaacuccgagggccgcggccaggccgccgaccucaaguccacccaggccgccaucgaccagaucaacggcaagcucaaccgccucaucggcaagaccaacgagaaguuccaccagaucgagaaggaguucuccgaggucgagggccgcauccaggaccucgagaaguacgucgaggacaccaagaucgaccucugguccuacaacgccgagcuccucgucgcccucgagaaccagcacaccaucgaccucaccgacuccgagaugaacaagcucuucgagaagaccaagaagcagcuccgcgagaacgccgaggacaugggcaacggcugcuucaagaucuaccacaagugcgacaacgccugcaucggcuccauccgcaacggcaccuacgaccacaacgucuaccgcgacgaggcccucaacaaccgcuuccagaucaagggcgucgagcucaaguccggcuacaaggacuggauccucuggaucuccuucgccaucuccugcuuccuccucugcgucgcccuccucggcuucaucaugugggccugccagaagggcaacauccgcugcaacaucugcaucuga

SEQ ID NO: 108383 - RNA, 1701 nt, Artificial Sequence; identical to SEQ ID NO: 105871
  derived and/or modified CDS sequence (opt2) from hemagglutinin__InfluenzaA__AHZ42915

SEQ ID NO: 108384 - RNA, 1683 nt, Artificial Sequence; identical to SEQ ID NO: 106024
  derived and/or modified CDS sequence (opt2) from hemagglutinin__InfluenzaA__AHZ59747

SEQ ID NO: 108385 - RNA, 1683 nt, Artificial Sequence
  derived and/or modified CDS sequence (opt2) from hemagglutinin__InfluenzaA__AHZ59759
augaacacccagauccucgucuucgcccucaucgccaucauccccaccaacgccgacaagaucugccucggccaccacgccgucuccaacggcaccaaggucaacacccucaccgagcgcggcgucgaggucgucaacgccaccgagaccgucgagcgcaccaacaucccccgcaucugcuccaagggcaagcgcaccgucgaccucggccagugcggccuccucggcaccaucaccggccccccccagugcgaccaguuccucgaguucuccgccgaccucaucaucgagcgccgcgagggcuccgacgucugcuaccccggcaaguucgucaacgaggaggcccuccgccagauccuccgcgaguccggcggcaucgacaaggaggccaugggcuucaccuacuccggcauccgcaccaacggcgccaccuccgccugccgccgcuccggcuccuccuucuacgccgagaugaaguggcuccucuccaacaccgacaacgccgccuucccccagaugaccaaguccuacaagaacacccgcaagucccccgcccucaucgucuggggcauccaccacuccgucuccaccgccgagcagaccaagcucuacggcuccggcaacaagcucgucaccgucggcuccuccaacuaccagcaguccuucguccccucccccggcgcccgcccccaggucaacggccucuccggccgcaucgacuuccacuggcucaugcucaaccccaacgacaccgucaccuucuccuucaacggcgccuucaucgcccccgaccgcgccuccuuccuccgcggcaaguccaugggcauccaguccggcguccaggucgacgccaacugcgagggcgacugcuaccacuccggcggcaccaucaucuccaaccuccccuuccagaacaucgacucccgcgccgucggcaagugcccccgcuacgucaagcagcgcucccuccuccucgccaccggcaugaagaacguccccgagauccccaagggccgcggccucuucggcgccaucgccggcuucaucgagaacggcugggagggccucaucgacggcugguacggcuuccgccaccagaacgcccagggcgagggcaccgccgccgacuacaaguccacccaguccgccaucgaccagaucaccggcaagcucaaccgccucaucgagaagaccaaccagcaguucgagcucaucgacaacgaguucaacgaggucgagaagcagaucggcaacgucaucaacuggacccgcgacuccaucaccgaggucugguccuacaacgccgagcuccucgucgccauggagaaccagcacaccaucgaccucgccgacuccgagauggacaagcucuacgagcgcgucaagcgccagcuccgcgagaacgccgaggaggacggcaccggcugcuucgagaucuuccacaagugcgacgacgacugcauggccuccauccgcaacaacaccuacgaccacuccaagucccgcgaggaggccaugcagaaccgcauccagaucgaccccgucaagcucuccuccggcuacaaggacgucauccucugguucuccuucggcgccuccugcuucauccuccucgccaucgucaugggccucgucuucaucugcgucaagaacggcaacaugcgcugcaccaucugcaucuga

SEQ ID NO: 108386 - RNA, 1683 nt, Artificial Sequence
  derived and/or modified CDS sequence (opt2) from hemagglutinin__InfluenzaA__AHZ59771
augaacacccagauccucgucuucgcccucaucgccaucauccccaccaacgccgacaagaucugccucggccaccacgccgucuccaacggcaccaaggucaacacccucaccgagcgcggcgucgaggucgucaacgccaccgagaccgucgagcgcaccaacaucccccgcaucugcuccaagggcaagcgcaccgucgaccucggccagugcggccuccucggcaccaucaccggccccccccagugcgaccaguuccucgaguucuccgccgaccucaucaucgagcgccgcgagggcuccgacgucugcuaccccggcaaguucgucaacgaggaggcccuccgccagauccuccgcgaguccggcggcaucgacaaggaggccaugggcuucaccuacuccggcauccgcaccaacggcgccaccuccgccugccgccgcuccggcuccuccuucuacgccgagaugaaguggcuccucuccaacaccgacaacgccgccuucccccagaugaccaaguccuacaagaacacccgcaagucccccgcccucaucgucuggggcauccaccacuccgucuccaccgccgagcagaccaagcucuacggcuccggcaacaagcucgucaccgucggcuccuccaacuaccagcaguccuucguccccucccccggcgcccgcccccaggucaacggccaguccggccgcaucgacuuccacuggcucaugcucaaccccaacgacaccgucaccuucuccuucaacggcgccuucaucgcccccgaccgcgccuccuuccuccgcggcaaguccaugggcauccaguccggcguccaggucgacgccaacugcgagggcgacugcuaccacuccggcggcaccaucaucuccaaccuccccuuccagaacaucgacucccgcgccgucggcaagugcccccgcuacgucaagcagcgcucccuccuccucgccaccggcaugaagaacguccccgagauccccaagggccgcggccucuucggcgccaucgccggcuucaucgagaacggcugggagggccucaucgacggcugguacggcuuccgccaccagaacgcccagggcgagggcaccgccgccgacuacaaguccacccaguccgccaucgaccagaucaccggcaagcucaaccgccucaucgagaagaccaaccagcaguucgagcucaucgacaacgaguucaacgaggucgagaagcagaucggcaacgucaucaacuggacccgcgacuccaucaccgaggucugguccuacaacgccgagcuccucgucgccauggagaaccagcacaccaucgaccucgccgacuccgagauggacaagcucuacgagcgcgucaagcgccagcuccgcgagaacgccgaggaggacggcaccggcugcuucgagaucuuccacaagugcgacgacgacugcauggccuccauccgcaacaacaccuacgaccacuccaaguaccgcgaggaggccaugcagaaccgcauccagaucgaccccgucaagcucuccuccggcuacaaggacgucauccucugguucuccuucggcgccuccugcuucauccuccucgccaucgucaugggccucgucuucaucugcgucaagaacggcaacaugcgcugcaccaucugcaucuga

SEQ ID NO: 108387 - RNA, 1683 nt, Artificial Sequence
  derived and/or modified CDS sequence (opt2) from hemagglutinin__InfluenzaA__AHZ59795
augaacacccagauccucgucuucgcccucaucgccaucauccccaccaacgccgacaagaucugccucggccaccacgccgucuccaacggcaccaaggucaacacccucaccgagcgcggcgucgaggucgucaacgccaccgagaccgucgagcgcaccaacaucccccgcaucugcuccaagggcaagcgcaccgucgaccucggccagugcggccuccucggcaccaucaccggccccccccagugcgaccaguuccucgaguucuccgccgaccucaucaucgagcgccgcgagggcuccgacgucugcuaccccggcaaguucgucaacgaggaggcccuccgccagauccuccgcgaguccggcggcaucgacaaggaggccaugggcuucaccuacuccggcauccgcaccaacggcaccaccuccgccugccgccgcuccggcuccuccuucuacgccgagaugaaguggcuccucuccaacaccgacaacgccgccuucccccagaugaccaaguccuacaagaacacccgcaagucccccgcccucaucgucuggggcauccaccacuccgucuccaccgccgagcagaccaagcucuacggcuccggcaacaagcucgucaccgucggcuccuccaacuaccagcaguccuucguccccucccccggcgcccgcccccaggucaacggccucuccggccgcaucgacuuccacuggcucaugcucaaccccaacgacaccgucaccuucuccuucaacggcgccuucaucgcccccgaccgcgccuccuuccuccgcggcaaguccaugggcauccaguccggcguccaggucgacgccaacugcgagggcgacugcuaccacuccggcggcaccaucaucuccaaccuccccuuccagaacaucgacucccgcgccgucggcaagugcccccgcuacgucaagcagcgcucccuccuccucgccaccggcaugaagaacguccccgagauccccaagggccgcggccucuucggcgccaucgccggcuucaucgagaacggcugggagggccucaucgacggcugguacggcuuccgccaccagaacgcccagggcgagggcaccgccgccgacuacaaguccacccaguccgccaucgaccagaucaccggcaagcucaaccgccucaucgagaagaccaaccagcaguucgagcucaucgacaacgaguucaacgaggucgagaagcagaucggcaacgucaucaacuggacccgcgacuccaucaccgaggucugguccuacaacgccgagcuccucgucgccauggagaaccagcacaccaucgaccucgccgacuccgagauggacaagcucuacgagcgcgucaagcgccagcuccgcgagaacgccgaggaggacggcaccggcugcuucgagaucuuccacaagugcgacgacgacugcauggccuccauccgcaacaacaccuacgaccacuccaaguaccgcgaggaggccaugcagaaccgcauccagaucgaccccgucaagcucuccuccggcuacaaggacgucauccucugguucuccuucggcgccuccugcuucauccuccucgccaucgucaugggccucgucuucaucugcgucaagaacggcaacaugcgcugcaccaucugcaucuga

SEQ ID NO: 108388 - RNA, 1683 nt, Artificial Sequence; identical to SEQ ID NO: 108387
  derived and/or modified CDS sequence (opt2) from hemagglutinin__InfluenzaA__AHZ59807

SEQ ID NO: 108389 - RNA, 1683 nt, Artificial Sequence; identical to SEQ ID NO: 108387
  derived and/or modified CDS sequence (opt2) from hemagglutinin__InfluenzaA__AHZ59819

SEQ ID NO: 108390 - RNA, 1683 nt, Artificial Sequence; identical to SEQ ID NO: 106024
  derived and/or modified CDS sequence (opt2) from hemagglutinin__InfluenzaA__AHZ59831

SEQ ID NO: 108391 - RNA, 1683 nt, Artificial Sequence; identical to SEQ ID NO: 106024
  derived and/or modified CDS sequence (opt2) from hemagglutinin__InfluenzaA__AHZ59843

SEQ ID NO: 108392 - RNA, 1683 nt, Artificial Sequence; identical to SEQ ID NO: 106024
  derived and/or modified CDS sequence (opt2) from hemagglutinin__InfluenzaA__AHZ59855

SEQ ID NO: 108393 - RNA, 1683 nt, Artificial Sequence; identical to SEQ ID NO: 108386
  derived and/or modified CDS sequence (opt2) from hemagglutinin__InfluenzaA__AHZ59867

SEQ ID NO: 108394 - RNA, 1683 nt, Artificial Sequence; identical to SEQ ID NO: 106024
  derived and/or modified CDS sequence (opt2) from hemagglutinin__InfluenzaA__AHZ59879

SEQ ID NO: 108395 - RNA, 1683 nt, Artificial Sequence; identical to SEQ ID NO: 108386
  derived and/or modified CDS sequence (opt2) from hemagglutinin__InfluenzaA__AHZ59915

SEQ ID NO: 108396 - RNA, 1683 nt, Artificial Sequence; identical to SEQ ID NO: 106024
  derived and/or modified CDS sequence (opt2) from hemagglutinin__InfluenzaA__AHZ59927

SEQ ID NO: 108397 - RNA, 1683 nt, Artificial Sequence; identical to SEQ ID NO: 108386
  derived and/or modified CDS sequence (opt2) from hemagglutinin__InfluenzaA__AHZ59939

SEQ ID NO: 108398 - RNA, 1683 nt, Artificial Sequence; identical to SEQ ID NO: 106024
  derived and/or modified CDS sequence (opt2) from hemagglutinin__InfluenzaA__AHZ59951

SEQ ID NO: 108399 - RNA, 1683 nt, Artificial Sequence; identical to SEQ ID NO: 106024
  derived and/or modified CDS sequence (opt2) from hemagglutinin__InfluenzaA__AHZ59963

SEQ ID NO: 108400 - RNA, 1683 nt, Artificial Sequence; identical to SEQ ID NO: 106024
  derived and/or modified CDS sequence (opt2) from hemagglutinin__InfluenzaA__AHZ59988

SEQ ID NO: 108401 - RNA, 1683 nt, Artificial Sequence; identical to SEQ ID NO: 106024
  derived and/or modified CDS sequence (opt2) from hemagglutinin__InfluenzaA__AHZ60000

SEQ ID NO: 108402 - RNA, 1683 nt, Artificial Sequence; identical to SEQ ID NO: 106024
  derived and/or modified CDS sequence (opt2) from hemagglutinin__InfluenzaA__AHZ60012

SEQ ID NO: 108403 - RNA, 1683 nt, Artificial Sequence; identical to SEQ ID NO: 106024
  derived and/or modified CDS sequence (opt2) from hemagglutinin__InfluenzaA__AHZ60024

SEQ ID NO: 108404 - RNA, 1683 nt, Artificial Sequence; identical to SEQ ID NO: 108387
  derived and/or modified CDS sequence (opt2) from hemagglutinin__InfluenzaA__AHZ60036

SEQ ID NO: 108405 - RNA, 1683 nt, Artificial Sequence; identical to SEQ ID NO: 108387
  derived and/or modified CDS sequence (opt2) from hemagglutinin__InfluenzaA__AHZ60048

SEQ ID NO: 108406 - RNA, 1683 nt, Artificial Sequence; identical to SEQ ID NO: 108387
  derived and/or modified CDS sequence (opt2) from hemagglutinin__InfluenzaA__AHZ60060

SEQ ID NO: 108407 - RNA, 1683 nt, Artificial Sequence; identical to SEQ ID NO: 108387
  derived and/or modified CDS sequence (opt2) from hemagglutinin__InfluenzaA__AHZ60072

SEQ ID NO: 108408 - RNA, 1683 nt, Artificial Sequence; identical to SEQ ID NO: 108387
  derived and/or modified CDS sequence (opt2) from hemagglutinin__InfluenzaA__AHZ60084

SEQ ID NO: 108409 - RNA, 1683 nt, Artificial Sequence
  derived and/or modified CDS sequence (opt2) from hemagglutinin__InfluenzaA__AHZ60096
augaacacccagauccucgucuucgcccucaucgccaucauccccaccaacgccgacaagaucugccucggccaccacgccgucuccaacggcaccaaggucaacacccucaccgagcgcggcgucgaggucgucaacgccaccgagaccgucgagcgcaccaacaucccccgcaucugcuccaagggcaagcgcaccgucgaccucggccagugcggccuccucggcaccaucaccggccccccccagugcgaccaguuccucgaguucuccgccgaccucaucaucgagcgccgcgagggcuccgacgucugcuaccccggcaaguucgucaacgaggaggcccuccgccagauccuccgcgaguccggcggcaucgacaaggaggccaugggcuucaccuacuccggcauccgcaccaacggcgccaccuccgccugccgccgcuccggcuccuccuucuacgccgagaugaaguggcuccucuccaacaccgacgacgccgccuucccccagaugaccaaguccuacaagaacacccgcaagucccccgcccucaucgucuggggcauccaccacuccgucuccaccgccgagcagaccaagcucuacggcuccggcaacaagcucgucaccgucggcuccuccaacuaccagcaguccuucguccccucccccggcgcccgcccccaggucaacggccucuccggccgcaucgacuuccacuggcucaugcucaaccccaacgacaccgucaccuucuccuucaacggcgccuucaucgcccccgaccgcgccuccuuccuccgcggcaaguccaugggcauccaguccggcguccaggucgacgccaacugcgagggcgacugcuaccacuccggcggcaccaucaucuccaaccuccccuuccagaacaucgacucccgcgccgucggcaagugcccccgcuacgucaagcagcgcucccuccuccucgccaccggcaugaagaacguccccgagauccccaagggccgcggccucuucggcgccaucgccggcuucaucgagaacggcugggagggccucaucgacggcugguacggcuuccgccaccagaacgcccagggcgagggcaccgccgccgacuacaaguccacccaguccgccaucgaccagaucaccggcaagcucaaccgccucaucgagaagaccaaccagcaguucgagcucaucgacaacgaguucaacgaggucgagaagcagaucggcaacgucaucaacuggacccgcgacuccaucaccgaggucugguccuacaacgccgagcuccucgucgccauggagaaccagcacaccaucgaccucgccgacuccgagauggacaagcucuacgagcgcgucaagcgccagcuccgcgagaacgccgaggaggacggcaccggcugcuucgagaucuuccacaagugcgacgacgacugcauggccuccauccgcaacaacaccuacgaccacuccaaguaccgcgaggaggccaugcagaaccgcauccagaucgaccccgucaagcucuccuccggcuacaaggacgucauccucugguucuccuucggcgccuccugcuucauccuccucgccaucgucaugggccucgucuucaucugcgucaagaacggcaacaugcgcugcaccaucugcaucuga

SEQ ID NO: 108410 - RNA, 1701 nt, Artificial Sequence
  derived and/or modified CDS sequence (opt2) from hemagglutinin__InfluenzaA__AIC64889
augaaggccauccucgucguccuccucuacaccuucgccaccgccaacgccgacacccucugcaucggcuaccacgccaacaacuccaccgacaccgucgacaccguccucgagaagaacgucaccgucacccacuccgucaacauccucgaggacaagcacaacggcaagcucugcaagcuccgcggcgucgccccccuccaccucggcaagugcaacaucgccggcuggauccucggcaaccccgagugcgagucccucuccaccgccuccuccugguccuacaucgucgagaccuccuccuccgacaacggcaccugcuaccccggcgacuucaucgacuacgaggagcuccgcgagcagcucuccuccgucuccuccuucgagcgcuucgagaucuuccccaagaccuccuccuggcccaaccacgacuccaacaagggcgucaccgccgccugcccccacgccggcgccaaguccuucuacaagaaccucaucuggcucgucaagaaggagaacuccuaccccaagcucuccaaguccuacaucaacgacaagggcaaggagguccucguccucuggggcauccaccaccccuccaccuccgccgaccagcagucccucuaccagaacgccgacgccuacgucuucgucggcuccucccgcuacuccaagaaguucaagcccgagaucgccauccgccccaagguccgcggccaggagggccgcaugaacuacuacuggacccucgucgagcccggcgacaagaucaccuucgaggccaccggcaaccucgucgucccccgcuacgccuucgccauggagcgcaacgccggcuccggcaucaucaucuccgacacccccguccacgacugcaacaccaccugccagacccccaagggcgccaucaacaccucccuccccuuccagaacauccaccccaucaccaucggcaagugccccaaguacgucaaguccaccaagcuccgccucgccaccggccuccgcaacguccccuccauccagucccgcggccucuucggcgccaucgccggcuucaucgagggcggcuggaccggcauggucgacggcugguacggcuaccaccaccagaacgagcagggcuccggcuacgccgccgaccucaaguccacccagaacgccaucgacgagaucaccaacaaggucaacuccgucaucgagaagaugaacacccaguucaccgccgucggcaaggaguucaaccaccucgagaagcgcaucgagaaccucaacaagaaggucgacgacggcuuccucgacaucuggaccuacaacgccgagcuccucguccuccucgagaacgagcgcacccucgacuaccacgacuccaacgucaagaaccucuacgagaagguccgcucccagcucaagaacaacgccaaggagaucggcaacggcugcuucgaguucuaccacaagugcgacaacaccugcauggaguccgucaagaacggcaccuacgacuaccccaaguacuccgaggaggccaagcucaaccgcgaggagaucgacggcgucaagcucgaguccacccgcaucuaccagauccucgccaucuacuccaccgucgccuccucccucguccucgucgucucccucggcgccaucuccuucuggaugugcuccaacggcucccuccagugccgcaucugcaucuga

SEQ ID NO: 108411 - RNA, 1701 nt, Artificial Sequence; identical to SEQ ID NO: 106076
  derived and/or modified CDS sequence (opt2) from hemagglutinin__InfluenzaA__AIC73738

SEQ ID NO: 108412 - RNA, 1701 nt, Artificial Sequence
  derived and/or modified CDS sequence (opt2) from hemagglutinin__InfluenzaA__AIC73739
augaaggccauccucgucguccuccucuacaccuucgccaccgccaacgccgacacccucugcaucggcuaccacgccaacaacuccaccgacaccgucgacaccguccucgagaagaacgucaccgucacccacuccgucaaccuccucgaggacaagcacaacggcaagcucugcaagcuccgcggcgucgccccccuccaccucggcaagugcaacaucgccggcuggauccucggcaaccccgagugcgagucccucuccaccgccuccuccugguccuacaucgucgagaccuccuccuccgacaacggcaccugcuaccccggcgacuucaucaacuacgaggagcuccgcgagcagcucuccuccgucuccuccuucgagcgcuucgagaucuuccccaagaccuccuccuggcccaaccacgacuccaacaagggcgucaccgccgccugcccccacgccggcgccaaguccuucuacaagaaccucaucuggcucgucaagaagggcaacuccuaccccaagcucucccaguccuacaucaacgacaagggcaaggagguccucguccucuggggcauccaccaccccuccaccaccgccgaccagcagucccucuaccagaacgccgacgccuacgucuucgucggcaccucccgcuacuccaagaaguucaagcccgagaucgccauccgccccaagguccgcgaccaggagggccgcaugaacuacuacuggacccucgucgagcccggcgacaagaucaccuucgaggccaccggcaaccucgucgucccccgcuacgccuucaccauggagcgccacgccggcuccggcaucaucaucuccgacacccccguccacgacugcaacaccaccugccagacccccgagggcgccaucaacaccucccuccccuuccagaacauccaccccaucaccaucggcaagugccccaaguacgucaaguccaccaagcuccgccucgccaccggccuccgcaacguccccuccauccagucccgcggccucuucggcgccaucgccggcuucaucgagggcggcuggaccggcauggucgacggcugguacggcuaccaccaccagaacgagcagggcuccggcuacgccgccgaccucaaguccacccagaacgccaucgacaagaucaccaacaaggucaacuccgucaucgagaagaugaacacccaguucaccgccgucggcaaggaguucaaccaccucgagaagcgcaucgagaaccucaacaagaaggucgacgacggcuuccucgacaucuggaccuacaacgccgagcuccucguccuccucgagaacgagcgcacccucgacuaccacgacuccaacgucaagaaccucuacgagaagguccgcaaccagcucaagaacaacgccaaggagaucggcaacggcugcuucgaguucuaccacaagugcgacaacaccugcauggaguccgucaagaacggcaccuacgacuaccccaaguacuccgaggaggccaagcucaaccgcgagaagaucgacggcgucaagcucgaguccacccgcaucuaccagauccucgccaucuacuccaccgucgccuccucccucguccucgucgucucccucggcgccaucuccuucuggaugugcuccaacggcucccuccagugccgcaucugcaucuga

SEQ ID NO: 108413 - RNA, 1701 nt, Artificial Sequence
  derived and/or modified CDS sequence (opt2) from hemagglutinin__InfluenzaA__AIC73740
augaaggccauccucgucguccuccucuacaccuucaccaccgccaacgccgacacccucugcaucggcuaccacgccaacaacuccaccgacaccgucgacaccguccucgagaagaacgucaccgucacccacuccgucaaccuccucgaggacaagcacaacggcaagcucugcaagcuccgcggcgucgccccccuccaccucggcaagugcaacaucgccggcuggauccucggcaaccccgagugcgagucccucuccaccgccuccuccugguccuacaucgucgagaccuccuccuccgacaacggcaccugcuaccccggcgacuucaucaacuacgaggagcuccgcgagcagcucuccuccgucuccuccuucgagcgcuucgagaucuuccccaagaccuccuccuggcccaaccacgacuccaacaagggcgucaccgccgccugcccccacgccggcgccaaguccuucuacaagaaccucaucuggcucgucaagaagggcaacuccuaccccaagcucucccaguccuacaucaacgacaagggcaaggagguccucguccucuggggcauccaccacccccccaccaccgccgaccagcagucccucuaccagaacgccgacgccuacgucuucgucggcaccucccgcuacuccaagaaguucaagcccgagaucgccauccgccccaagguccgcgaccaggagggccgcaugaacuacuacuggacccucgucgagcccggcgacaagaucaccuucgaggccaccggcaaccucgucgucccccgcuacgccuucaccauggagcgcaacgccggcuccggcaucaucaucuccgacacccccguccacgacugcaacaccaccugccagacccccgagggcgccaucaacaccucccuccccuuccagaacauccaccccaucaccaucggcaagugccccaaguacgucaaguccaccaagcuccgccucgccaccggccuccgcaacguccccuccauccagucccgcggccucuucggcgccaucgccggcuucaucgagggcggcuggaccggcauggucgacggcugguacggcuaccaccaccagaacgagcagggcuccggcuacgccgccgaccucaaguccacccagaacgccaucgacaagaucaccaacaaggucaacuccgucaucgagaagaugaacacccaguucaccgccgucggcaaggaguucaaccaccucgagaagcgcaucgagaaccucaacaagaaggucgacgacggcuuccucgacaucuggaccuacaacgccgagcuccucguccuccucgagaacgagcgcacccucgacuaccacgacuccaacgucaagaaccucuacgagaagguccgcaaccagcucaagaacaacgccaaggagaucggcaacggcugcuucgaguucuaccacaagugcgacaacaccugcauggaguccgucaagaacggcaccuacgacuaccccaaguacuccgaggaggccaagcucgaccgcgagaagaucgacggcguccgccucgaguccacccgcaucuaccagauccucgccaucuacuccaccgucgccuccucccucguccucgucgucucccucggcgccaucuccuucuggaugugcuccaacggcucccuccagugccgcaucugcaucuga

SEQ ID NO: 108414 - RNA, 1701 nt, Artificial Sequence
  derived and/or modified CDS sequence (opt2) from hemagglutinin__InfluenzaA__AIC73741
augaagaccaucaucgcccucuccuacauccucugccucgucuucgcccagaagcuccccggcaacgacaacuccaccgccacccucugccucggccaccacgccguccccaacggcaccaucgucaagaccaucaccaacgaccgcaucgaggucaccaacgccaccgagcucguccagaacuccuccaucggcgagaucugcgacuccccccaccagauccucgacggcgagaacugcacccucaucgacgcccuccucggcgacccccacugcgacggcuuccagaacaagaagugggaccucuucgucgagcgcuccaaggccuacuccaacugcuaccccuacgacguccccgacuacgccucccuccgcucccucgucgccuccuccggcacccucgaguucaacaacgaguccuucaacugggccggcgucacccagaacggcaccuccuccgccugcauccgcggcuccaacuccuccuucuucucccgccucaacuggcucacccaccucaacuucaaguaccccgcccucaacgucaccaugcccaacaacgagcaguucgacaagcucuacaucuggggcguccaccaccccggcaccgacaaggaccagaucuuccucuacgcccaguccuccggccgcaucaccgucuccaccaagcgcucccagcaggccgucauccccaacaucggcucccgcccccgcauccgcaacauccccucccgcaucuccaucuacuggaccaucgucaagcccggcgacauccuccucaucaacuccaccggcaaccucaucgccccccgcggcuacuucaagauccgcuccggcaaguccuccaucaugcgcuccgacgcccccaucggcaagugcaaguccgagugcaucacccccaacggcuccauccccaacgacaagcccuuccagaacgucaaccgcaucaccuacggcgccugcccccgcuacgucaagcaguccacccucaagcucgccaccggcaugcgcaacguccccgagaagcagacccgcggcaucuucggcgccaucgccggcuucaucgagaacggcugggagggcaugauggacggcugguacggcuuccgccaccagaacuccgagggccgcggccaggccgccgaccucaaguccacccaggccgccaucgaccagaucaacggcaagcucaaccgccucaucggcaagaccaacgagaaguuccaccagaucgagaaggaguucuccgaggucgagggccgcauccaggaccucgagaaguacgucgaggacaccaagaucgaccucugguccuacaacgccgagcuccucgucgcccucgagaaccagcacaccaucgaccucaccgacuccgagaugaacaagcucuucgagaagaccaagaagcagcuccgcgagaacgccgaggacaugggcaacggcugcuucaagaucuaccaccgcugcgacaacgccugcaucggcuccauccgcaacggcaccuacgaccacaacgucuaccgcgacgaggcccucaacaaccgcuuccagauccgcggcgucgagcucaaguccggcuacaaggacuggauccucuggaucuccuucgccaucuccugcuuccuccucugcgucgcccuccucggcuucaucaugugggccugccagaagggcaacauccgcugcaacaucugcaucuga

SEQ ID NO: 108415 - RNA, 1701 nt, Artificial Sequence
  derived and/or modified CDS sequence (opt2) from hemagglutinin__InfluenzaA__AIC73742
augaaggccauccucgucguccuccucuacaccuucgccaccgccaacgccgacacccucugcaucggcuaccacgccaacaacuccaccgacaccgucgacaccguccucgagaagaacgucaccgucacccacuccgucaaccuccucgaggacaagcacaacggcaagcucugcaagcuccgcggcgucgccccccuccaccucggcaagugcaacaucgccggcuggauccucggcaaccccgagugcgagucccucuccaccgccuccuccugguccuacaucgucgagaccuccuccuccgacaacggcaccugcuaccccggcgacuucaucaacuacgaggagcuccgcgagcagcucuccuccgucuccuccuucgagcgcuucgagaucuuccccaagaccuccuccuggcccaaccacgacuccaacaagggcgucaccgccgccugcccccacgccggcgccaaguccuucuacaagaaccucaucuggcucgucaagaagggcaacuccuaccccaagcuccgccaguccuacaucaacgacaagggcaaggagguccucguccucuggggcauccaccaccccuccaccaccaccgaccagcagucccucuaccagaacgccgacgccuacgucuucgucggcaccucccgcuacuccaagaaguucaagcccgagaucgccauccgccccaagguccgcgaccaggagggccgcaugaacuacuacuggacccucgucgagcccggcgacaagaucaccuucgaggccaccggcaaccucgucgucccccgcuacgccuucaccauggagcgcaacgccggcuccggcaucaucaucuccgacacccccguccacgacugcaacaccaccugccagacccccgagggcgccaucaacaccucccuccccuuccagaacauccaccccaucaccaucggcaagugccccaaguacgucaaguccaccaagcuccgccucgccaccggccuccgcaacguccccuccauccagucccgcggccucuucggcgccaucgccggcuucaucgagggcggcuggaccggcauggucgacggcugguacggcuaccaccaccagaacgagcagggcuccggcuacgccgccgaccucaaguccacccagaacgccaucgacaagaucaccaacaaggucaacuccgucaucgagaagaugaacacccaguucaccgccgucggcaaggaguucaaccaccucgagaagcgcaucgagaaccucaaccgcaaggucgacgacggcuuccucgacaucuggaccuacaacgccgagcuccucguccuccucgagaacgagcgcacccucgacuaccacgacuccaacgucaagaaccucuacgagaagguccgcaaccagcucaagaacaacgccaaggagaucggcaacggcugcuucgaguucuaccacaagugcgacaacaccugcauggaguccgucaagaacggcaccuacgacuaccccaaguacuccgaggaggccaagcucaaccgcgagaagaucgacggcgucaagcucgaguccacccgcaucuaccagauccucgccaucuacuccaccgucgccuccucccucguccucgucgucucccucggcgccaucuccuucuggaugugcuccaacggcucccuccagugccgcaucugcaucuga

SEQ ID NO: 108416 - RNA, 1701 nt, Artificial Sequence; identical to SEQ ID NO: 108415
  derived and/or modified CDS sequence (opt2) from hemagglutinin__InfluenzaA__AIC73743

SEQ ID NO: 108417 - RNA, 1701 nt, Artificial Sequence
  derived and/or modified CDS sequence (opt2) from hemagglutinin__InfluenzaA__AIC73744
augaaggccauccucgucguccuccucuacaccuucgccaccgccaacgccgacacccucugcaucggcuaccacgccaacaacuccaccgacaccgucgacaccguccucgagaagaacgucaccgucacccacuccgucaaccuccucgaggacaagcacaacggcaagcucugcaagcuccgcggcgucgccccccuccaccucggcaagugcaacaucgccggcuggauccucggcaaccccgagugcgagucccucuccaccgccuccuccugguccuacaucgucgagaccuccuccuccgacaacggcaccugcuaccccggcgacuucaucaacuacgaggagcuccgcgagcagcucuccuccgucuccuccuucgagcgcuucgagaucuuccccaagaccuccuccuggcccaaccacgacuccaacaagggcgucaccgccgccugcccccacgccggcgccaaguccuucuacaagaaccucaucuggcucgucaagaagggcaacuccuaccccaagcucaaccaguccuacaucaacgacaagggcaaggagguccucguccucuggggcauccaccaccccuccaccaccgccgaccagcagucccucuaccagaacgccgacgccuacgucuucgucggcaccucccgcuacuccaagaaguucaagcccgagaucgccauccgccccaagguccgcgaccaggagggccgcaugaacuacuacuggacccucgucgagcccggcgacaagaucaccuucgaggccaccggcaaccucgucgucccccgcuacgccuucaccauggagcgcaacgccggcuccggcaucaucaucuccgacacccccgcccacgacugcaacaccaccugccagacccccgagggcgccaucaacaccucccuccccuuccagaacauccaccccaucaccaucggcaagugccccaaguacgucaaguccaccaagcuccgccucgccaccggccuccgcaacguccccuccauccagucccgcggccucuucggcgccaucgccggcuucaucgagggcggcuggaccggcauggucgacggcugguacggcuaccaccaccagaacgagcagggcuccggcuacgccgccgaccucaaguccacccagaacgccaucgacaagaucaccaacaaggucaacuccgucaucgagaagaugaacacccaguucaccgccgucggcaaggaguucaaccaccucgagaagcgcaucgagaaccucaacaagaaggucgacgacggcuuccucgacaucuggaccuacaacgccgagcuccucguccuccucgagaacgagcgcacccucgacuaccacgacuccaacgucaagaaccucuacgagaagguccgcaaccagcucaagaacaacgccaaggagaucggcaacggcugcuucgaguucuaccacaagugcgacaacaccugcauggaguccgucaagaacggcaccuacgacuaccccaaguacuccgaggaggccaagcucaaccgcgagaagaucgacggcgucaagcucgaguccacccgcaucuaccagauccucgccaucuacuccaccgucgccuccucccucguccucgucgucucccucggcgccaucuccuucuggaugugcuccaacggcucccuccagugccgcaucugcaucuga

SEQ ID NO: 108418 - RNA, 1701 nt, Artificial Sequence
  derived and/or modified CDS sequence (opt2) from hemagglutinin__InfluenzaA__AIC73745
augaaggccauccucgucguccuccucuacaccuucgccaccgccaacgccgacacccucugcaucggcuaccacgccaacaacuccaccgacaccgucgacaccguccucgagaagaacgucaccgucacccacuccgucaaccuccucgaggacaagcacaacggcaagcucugcaagcuccgcggcgucgccccccuccaccucggcaagugcaacaucgccggcuggauccucggcaaccccgagugcgagucccucuccaccgccuccuccugguccuacaucgucgagaccuccuccuccgacaacggcaccugcuaccccggcgacuucaucaacuacgaggagcuccgcgagcagcucuccuccgucuccuccuucgagcgcuucgagaucuuccccaagaccuccuccuggcccaaccacgacuccaacaagggcgucaccgccgccugcccccacgccggcgccaaguccuucuacaagaaccucaucuggcucgucaagaagggcaacuccuaccccaagcucucccaguccuacaucaacgacaagggcaaggagguccucguccucuggggcauccaccaccccuccaccaccgccgaccagcagucccucuaccagaacgccgacgccuacgucuucgucggcaccucccgcuacuccaagaaguucaagcccgagaucgccauccgccccaagguccgcgaccaggagggccgcaugaacuacuacugggcccucgucgagcccggcgacaagaucaccuucgaggccaccggcaaccucgucgucccccgcuacgccuucaccauggagcgcaacgccggcuccggcaucaucaucuccgacacccccguccacgacugcaacaccaccugccagacccccgagggcgccaucaacaccucccuccccuuccagaacauccaccccaucaccaucggcaagugccccaaguacgucaaguccaccaagcuccgccucgccaccggccuccgcaacauccccuccauccagucccgcggccucuucggcgccaucgccggcuucaucgagggcggcuggaccggcauggucgacggcugguacggcuaccaccaccagaacgagcagggcuccggcuacgccgccgaccucaaguccacccagaacgccaucgacaagaucaccaacaaggucaacuccgucaucgagaagaugaacacccaguucaccgccgucggcaaggaguucaaccaccucgagaagcgcaucgagaaccucaacaagaaggucgacgacggcuuccucgacaucuggaccuacaacgccgagcuccucguccuccucgagaacgagcgcacccucgacuaccacgacuccaacgucaagaaccucuacgagaagguccgcaaccagcucaagaacaacgccaaggagaucggcaacggcugcuucgaguucuaccacaagugcgacaacaccugcauggaguccgucaagaacggcaccuacgacuaccccaaguacuccgaggaggccaagcucaaccgcgagaagaucgacggcgucaagcucgaguccacccgcaucuaccagauccucgccaucuacuccaccgucgccuccucccucguccucgucgucucccucggcgccaucuccuucuggaugugcuccaacggcucccuccagugccgcaucugcaucuga

SEQ ID NO: 108419 - RNA, 1701 nt, Artificial Sequence
  derived and/or modified CDS sequence (opt2) from hemagglutinin__InfluenzaA__AIC73746
augaaggccauccucgucguccuccucuacaccuucgccaccgccaacgccgacacccucugcaucggcuaccacgccaacaacuccaccgacaccgucgacaccguccucgagaagaacgucaccgucacccacuccgucaaccuccucgaggacaagcacaacggcaagcucugcaagcuccgcggcgucaccccccuccaccucggcaagugcaacaucgccggcuggauccucggcaaccccgagugcgagucccucuccaccgccuccuccugguccuacaucgucgagaccuccuccuccgacaacggcaccugcuaccccggcgacuucaucaacuacgaggagcuccgcgagcagcucuccuccgucuccuccuucgagcgcuucgagaucuuccccaagaccuccuccuggcccaaccacgacuccaacaagggcgucaccgccgccugcccccacgccggcgccaaguccuucuacaagaaccucaucuggcucgucaagaagggcaacuccuaccccaagcucucccaguccuacaucaacgacaagggcaaggagguccucguccucuggggcauccaccaccccuccaccaccaccgaccagcagucccucuaccagaacgccgacgccuacgucuucgucggcaccucccgcuacuccaagaaguucaagcccgagaucgccauccgccccaagguccgcgaccaggagggccgcaugaacuacuacuggacccucgucgagcccggcgacaagaucaccuucgaggccaccggcaaccucgucgucccccgcuacgccuucaccauggagcgcaacgccggcuccggcaucaucaucuccgacacccccguccacgacugcaacaccaccugccagacccccgagggcgccaucaacaccucccuccccuuccagaacauccaccccaucaccaucggcaagugccccaaguacgucaaguccaccaagcuccgccucgccaccggccuccgcaacguccccuccauccagucccgcggccucuucggcgccaucgccggcuucaucgagggcggcuggaccggcauggucgacggcugguacggcuaccaccaccagaacgagcagggcuccggcuacgccgccgaccucaaguccacccagaacgccaucgacaagaucaccaacaaggucaacuccgucaucgagaagaugaacacccaguucaccgccgucggcaaggaguucaaccaccucgagaagcgcaucgagaaccucaacaagaaggucgacgacggcuuccucgacaucuggaccuacaacgccgagcuccucguccuccucgagaacgagcgcacccucgacuaccacgacuccaacgucaagaaccucuacgagaagguccgcaaccagcucaagaacaacgccaaggagaucggcaacggcugcuucgaguucuaccacaagugcgacaacaccugcauggaguccgucaagaacggcaccuacgacuaccccaaguacuccgaggaggccaagcucaaccgcgagaagaucgacggcgucaagcucgaguccacccgcaucuaccagauccucgccaucuacuccaccgucgccuccucccucguccucgucgucucccucggcgccaucuccuucuggaugugcuccaacggcucccuccagugccgcaucugcaucuga

SEQ ID NO: 108420 - RNA, 1701 nt, Artificial Sequence
  derived and/or modified CDS sequence (opt2) from hemagglutinin__InfluenzaA__AIC73747
augaaggccauccucgucguccuccucuacacccucgccaccgccaacgccgacacccucugcaucggcuaccacgccaacaacuccaccgacaccgucgacaccguccucgagaagaacgucaccgucacccacuccgucaaccuccucgaggacaagcacaacggcaagcucugcaagcuccgcggcgucgccccccuccaccucggcaagugcaacaucgccggcuggauccucggcaaccccgagugcgagucccucuccaccgccuccuccugguccuacaucgucgagaccuccuccuccgacaacggcaccugcuaccccggcgacuucaucaacuacgaggagcuccgcgagcagcucuccuccgucuccuccuucgagcgcuucgagaucuuccccaagaccuccuccuggcccaaccacgacuccaacaagggcgucaccgccgccugcccccacgccggcgccaaguccuucuacaagaaccucaucuggcucgucaagaagggcaacuccuaccccaagcucucccaguccuacaucaacgacaagggcaaggagguccucguccucuggggcauccaccaccccuccaccaccgccgaccagcagucccucuaccagaacgccgacgccuacgucuucgucggcaccucccgcuacuccaagaaguucaagcccgagaucgccauccgccccaagguccgcgaccaggagggccgcaugaacuacuacuggacccucgucgagcccggcgacaagaucaccuucgaggccaccggcaaccucgucgucccccgcuacgccuucaccauggagcgcaacaccggcuccggcaucaucaucuccgacacccccguccacgacugcaacaccaccugccagacccccgagggcgccaucaacaccucccuccccuuccagaacauccaccccaucaccaucggcaagugccccaaguacgucaaguccaccaagcuccgccucgccaccggccuccgcaacguccccuccauccagucccgcggccucuucggcgccaucgccggcuucaucgagggcggcuggaccggcauggucgacggcugguacggcuaccaccaccagaacgagcagggcuccggcuacgccgccgaccucaaguccacccagaacgccaucgacaagaucaccaacaaggucaacuccgucaucgagaagaugaacacccaguucaccgccgucggcaaggaguucaaccaccucgagaagcgcaucgagaaccucaacaagaaggucgacgacggcuuccucgacaucuggaccuacaacgccgagcuccucguccuccucgagaacgagcgcacccucgacuaccacgacuccaacgucaagaaccucuacgagaagguccgcaaccagcucaagaacaacgccaaggagaucggcaacggcugcuucgaguucuaccacaagugcgacaacaccugcauggaguccgucaagaacggcaccuacgacuaccccaaguacuccgaggaggccaagcucaaccgcgagaagaucgacggcgucaagcucgaguccacccgcaucuaccagauccucgccaucuacuccaccgucgccuccucccucguccucgucgucucccucggcgccaucuccuucuggaugugcuccaacggcucccuccagugccgcaucugcaucuga

SEQ ID NO: 108421 - RNA, 1701 nt, Artificial Sequence; identical to SEQ ID NO: 106076
  derived and/or modified CDS sequence (opt2) from hemagglutinin__InfluenzaA__AIC73748

SEQ ID NO: 108422 - RNA, 1701 nt, Artificial Sequence
  derived and/or modified CDS sequence (opt2) from hemagglutinin__InfluenzaA__AIC73749
augaagaccaucaucgcccucuccuacauccucugccucgucuucgcccagaagcuccccggcaacgacaacuccaccgccacccucugccucggccaccacgccguccccaacggcaccaucgucaagaccaucaccaacgaccgcaucgaggucaccaacgccaccgagcucguccagaacuccuccaucggcgagaucugcgacuccccccaccagauccucgacggcaagaacugcacccucaucgacgcccuccucggcgacccccagugcgacggcuuccagaacaagcgcugggaccucuucgucgagcgcuccaaggccuacuccaacugcuaccccuacgacguccccgacuacgccucccuccgcucccucgucgccuccuccggcacccucgaguucaacgacgaguccuucaacugggccggcgucacccagaacggcaccuccuccgccugcauccgcggcuccaacuccuccuucuucucccgccucaacuggcucacccacuccaacuucaaguaccccgcccucaacgucaccaugcccaacaacgagcaguucgacaagcucuacaucuggggcguccaccaccccggcaccgacaaggaccagaucuuccucuacgcccacuccuccggccgcaucaccgucuccaccaagcgcucccagcaggccgucauccccaacaucggcucccgcccccgcauccgcaacauccccucccgcaucuccaucuacuggaccaucgucaagcccggcgacauccuccucaucaacuccaccggcaaccucaucgccccccgcggcuacuucaagauccaguccggcaaguccuccaucaugcgcuccgacgcccccaucggcaagugcaaguccgagugcaucacccccaacggcuccaucaccaacgacaagcccuuccagaacgucaaccgcaucaccuacggcgccugcccccgcuacgucaagcaguccacccucaagcucgccaccggcaugcgcaacguccccgagaagcagacccgcggcaucuucggcgccaucgccggcuucaucgagaacggcugggagggcaugaaggacggcugguacggcuuccgccaccagaacuccgagggccgcggccaggccgccgaccucaaguccacccaggccgccaucgaccagaucaacggcaagcucaaccgccucaucggcaagaccaacgagaaguuccaccagaucgagaaggaguucuccgaggucgagggccgcauccaggaccucgagaaguacgucgaggacaccaagaucgaccucugguccuacaacgccgagcuccucgucgcccucgagaaccagcacaccaucgaccucaccgacuccgagaugaacaagcucuucgagaagaccaagaagcagcuccgcgagaacgccgaggacaugggcaacggcugcuucaagaucuaccacaagugcgacaacgccugcaucggcuccauccgcaacggcaccuacgaccacgacgucuaccgcgacgaggcccucaacaaccgcuuccagaucaagggcgucgagcucaaguccggcuacaaggacuggauccucuggaucuccuucgccaucuccugcuuccuccucugcgucgcccuccucggcuucaucaugugggccugccagaagggcaacauccgcugcaacaucugcaucuga

SEQ ID NO: 108423 - RNA, 1701 nt, Artificial Sequence; identical to SEQ ID NO: 106076
  derived and/or modified CDS sequence (opt2) from hemagglutinin__InfluenzaA__AIC73750

SEQ ID NO: 108424 - RNA, 1701 nt, Artificial Sequence
  derived and/or modified CDS sequence (opt2) from hemagglutinin__InfluenzaA__AIC73754
augaaggccauccucgucguccuccucuacaccuucgccaccgccaacgccgacacccucugcaucggcuaccacgccaacaacuccaccgacaccgucgacaccguccucgagaagaacgucaccgucacccacuccgucaaccuccucgaggacaagcacaacggcaagcucugcaagcuccgcggcgucgccccccuccaccucggcaagugcaacaucgccggcuggauccucggcaaccccgagugcgagucccucuccaccgccuccuccugguccuacaucgucgagaccuccuccuccgacaacggcaccugcuaccccggcgacuucaucaacuacgaggagcuccgcgagcagcucuccuccgucuccuccuucgagcgcuucgagaucuuccccaagaccuccuccuggcccaaccacgacuccaacaagggcgucaccgccgccugcccccacgccggcgccaaguccuucuacaagaaccucaucuggcucgucaagaagggcaacuccuaccccaagcucucccaguccuacaucaacgacaagggcaaggagguccucguccucuggggcauccaccaccccuccaccaccgccgaccagcagucccucuaccagaacgccgacgccuacgucuucgucggcaccucccgcuacucccgcaaguucaagcccgagaucgccauccgccccaagguccgcgaccaggagggccgcaugaacuacuacuggacccucgucgagcccggcgacaagaucaccuucgaggccaccggcaaccucgucgucccccgcuacgccuucaccauggagcgcaacgccggcuccggcaucaucaucuccgacacccccguccacgacugcaacaccaccugccagacccccgagggcgccaucaacaccucccuccccuuccagaacauccaccccaucaccaucggcaagugccccaaguacgucaaguccaccaagcuccgccucgccaccggccuccgcaacguccccuccauccagucccgcggccucuucggcgccaucgccggcuucaucgagggcggcuggaccggcauggucgacggcugguacggcuaccaccaccagaacgagcagggcuccggcuacgccgccgaccucaaguccacccagaacgccaucgacaagaucaccaacaaggucaacuccgucaucgagaagaugaacacccaguucaccgccgucggcaaggaguucaaccaccucgagaagcgcaucgagaaccucaacaagaaggucgacgacggcuuccucgacaucuggaccuacaacgccgagcuccucguccuccucgagaacgagcgcacccucgacuaccacgacuccaacgucaagaaccucuacgagaagguccgcaaccagcucaagaacaacgccaaggagaucggcaacggcugcuucgaguucuaccacaagugcgacaacaccugcauggaguccgucaagaacggcaccuacgacuaccccaaguacuccgaggaggccaagcucaaccgcgagaagaucgacggcgucaagcucgaguccacccgcaucuaccagauccucgccaucuacuccaccgucgccuccucccucguccucgucgucucccucggcgccaucuccuucuggaugugcuccaacggcucccuccagugccgcaucugcaucuga

SEQ ID NO: 108425 - RNA, 1701 nt, Artificial Sequence; identical to SEQ ID NO: 106076
  derived and/or modified CDS sequence (opt2) from hemagglutinin__InfluenzaA__AIC73755

SEQ ID NO: 108426 - RNA, 1701 nt, Artificial Sequence; identical to SEQ ID NO: 106076
  derived and/or modified CDS sequence (opt2) from hemagglutinin__InfluenzaA__AIC73756

SEQ ID NO: 108427 - RNA, 1701 nt, Artificial Sequence; identical to SEQ ID NO: 106076
  derived and/or modified CDS sequence (opt2) from hemagglutinin__InfluenzaA__AIC73757

SEQ ID NO: 108428 - RNA, 1701 nt, Artificial Sequence
  derived and/or modified CDS sequence (opt2) from hemagglutinin__InfluenzaA__AIC73758
augaaggccauccucgucguccuccucuacaccuucgccaccgccaacgccgacacccucugcaucggcuaccacgccaacaacuccaccgacaccgucgacaccguccucgagaagaacgucaccgucacccacuccgucaaccuccucgaggacaagcacaacggcaagcucugcaagcuccgcggcaucgccccccuccaccucggcaagugcaacaucgccggcuggauccucggcaaccccgagugcgagucccucuccaccgccuccuccugguccuacaucgucgagaccuccuccuccgacaacggcaccugcuaccccggcgacuucaucaacuacgaggagcuccgcgagcagcucuccuccgucuccuccuucgagcgcuucgagaucuuccccaagaccuccuccuggcccaaccacgacuccaacaagggcgucaccgccgccugcccccacgccggcgccaaguccuucuacaagaaccucaucuggcucgucaagaagggcaacuccuaccccaagcucucccaguccuacaucaacgacaagggcaaggagguccucguccucuggggcauccaccaccccuccaccaccgccgaccagcagucccucuaccagaacgccgacgccuacgucuucgucggcaccucccgcuacuccaagaaguucaagcccgagaucgccauccgccccaagguccgcgaccaggagggccgcaugaacuacuacuggacccucgucgagcccggcgacaagaucaccuucgaggccaccggcaaccucgucgucccccgcuacgccuucaccauggagcgcaacgccggcuccggcaucaucaucuccgacacccccguccacgacugcaacaccaccugccagacccccgagggcgccaucaacaccucccuccccuuccagaacauccaccccaucaccaucggcaagugccccaaguacgucaaguccaccaagcuccgccucgccaccggccuccgcaacguccccuccauccagucccgcggccucuucggcgccaucgccggcuucaucgagggcggcuggaccggcauggucgacggcugguacggcuaccaccaccagaacgagcagggcuccggcuacgccgccgaccucaaguccacccagaacgccaucgacaagaucaccaacaaggucaacuccgucaucgagaagaugaacacccaguucaccgccgucggcaaggaguucaaccaccucgagaagcgcaucgagaaccucaacaagaaggucgacgacggcuuccucgacaucuggaccuacaacgccgagcuccucguccuccucgagaacgagcgcacccucgacuaccacgacuccaacgucaagaaccucuacgagaagguccgcaaccagcucaagaacaacgccaaggagaucggcaacggcugcuucgaguucuaccacaagugcgacaacaccugcauggaguccgucaagaacggcaccuacgacuaccccaaguacuccgaggaggccaagcucaaccgcgagaagaucgacggcgucaagcucgaguccacccgcaucuaccagauccucgccaucuacuccaccgucgccuccucccucguccucgucgucucccucggcgccaucuccuucuggaugugcuccaacggcucccuccagugccgcaucugcaucuga

SEQ ID NO: 108429 - RNA, 1701 nt, Artificial Sequence
  derived and/or modified CDS sequence (opt2) from hemagglutinin__InfluenzaA__AIC73760
augaaggccauccucaucguccuccucuacaccuucgccaccgccaacgccgacacccucugcaucggcuaccacgccaacaacuccaccgacaccgucgacaccguccucgagaagaacgucaccgucacccacuccgucaaccuccucgaggacaagcacaacggcaagcucugcaagcuccgcggcgucgccccccuccaccucggcaagugcaacaucgccggcuggauccucggcaaccccgagugcgagucccucuccaccgccuccuccugguccuacaucgucgagaccuccuccuccgacaacggcaccugcuaccccggcgacuucaucaacuacgaggagcuccgcgagcagcucuccuccgucuccuccuucgagcgcuucgagaucuuccccaagaccuccuccuggcccaaccacgacuccaacaagggcgucaccgccgccugcccccacgccggcgccaaguccuucuacaagaaccucaucuggcucgucaagaagggcaacuccuaccccaagcucucccaguccuacaucaacgacaagggcaaggagguccucguccucuggggcauccaccaccccuccaccaccgccgaccagcagucccucuaccagaacgccgacgccuacgucuucgucggcaccucccgcuacuccaagaaguucaagcccgagaucgccauccgccccaagguccgcgaccaggagggccgcaugaacuacuacuggacccucgucgagcccggcgacaagaucaccuucgaggccaccggcaaccucgucgucccccgcuacgccuucaccauggagcgcaacgccggcuccggcaucaucaucuccgacacccccguccacgacugcaacaccaccugccagacccccgagggcgccaucaacaccucccuccccuuccagaacauccaccccaucaccaucggcaagugccccaaguacgucaaguccaccaagcuccgccucgccaccggccuccgcaacguccccuccauccagucccgcggccucuucggcgccaucgccggcuucaucgagggcggcuggaccggcauggucgacggcugguacggcuaccaccaccagaacgagcagggcuccggcuacgccgccgaccucaaguccacccagaacgccaucgacaagaucaccaacaaggucaacuccgucaucgagaagaugaacacccaguucaccgccgucggcaaggaguucaaccaccucgagaagcgcaucgagaaccucaacaagaaggucgacgacggcuuccucgacaucuggaccuacaacgccgagcuccucguccuccucgagaacgagcgcacccucgacuaccacgacuccaacgucaagaaccucuacgagaagguccgcaaccagcucaagaacaacgccaaggagaucggcaacggcugcuucgaguucuaccacaagugcgacaacaccugcauggaguccgucaagaacggcaccuacgacuaccccaaguacuccgaggaggccaagcucaaccgcgagaagaucgacggcgucaagcucgaguccacccgcaucuaccagauccucgccaucuacuccaccgucgccuccucccucguccucgucgucucccucggcgccaucuccuucuggaugugcuccaacggcucccuccagugccgcaucugcaucuga

SEQ ID NO: 108430 - RNA, 1701 nt, Artificial Sequence; identical to SEQ ID NO: 108429
  derived and/or modified CDS sequence (opt2) from hemagglutinin__InfluenzaA__AIC73761

SEQ ID NO: 108431 - RNA, 1701 nt, Artificial Sequence; identical to SEQ ID NO: 107956
  derived and/or modified CDS sequence (opt2) from hemagglutinin__InfluenzaA__AIC73762

SEQ ID NO: 108432 - RNA, 1701 nt, Artificial Sequence
  derived and/or modified CDS sequence (opt2) from hemagglutinin__InfluenzaA__AIC73763
augaaggccauccucgucguccuccucuacaccuucgccaccgccaacgccgacacccucugcaucggcuaccacgccaacaacuccaccgacaccgucgacaccguccucgagaagaacgucaccgucacccacuccgucaaccuccucgaggacaagcacaacggcaagcucugcaagcuccgcggcgucgccccccuccaccucggcaagugcaacaucgccggcuggauccucggcaaccccgagugcgagucccucuccaccgccuccuccugguccuacaucgucgagaccuccuccuccgacaacggcaccugcuaccccggcgacuucaucaacuacgaggagcuccgcgagcagcucuccuccgucuccuccuucgagcgcuucgagaucuuccccaagaccuccuccuggcccaaccacgacuccaacaagggcgucaccgccgccugcccccacgccggcgccaaguccuucuacaagaaccucaucuggcucgucaagaagggcaacuccuaccccaagaucucccaguccuacaucaacgacaagggcaaggagguccucguccucuggggcauccaccaccccuccaccaccgccgaccagcagucccucuaccagaacgccgacgccuacgucuucgucggcaccucccgcuacuccaagaaguucaagcccgagaucgccauccgccccaagguccgcgaccaggagggccgcaugaacuacuacuggacccucgucgagcccggcgacaagaucaccuucgaggccaccggcaaccucgucgucccccgcuacgccuucaccauggagcgcaacgccggcuccggcaucaucaucuccgacacccccguccacgacugcaacaccaccugccagacccccgagggcgccaucaacaccucccuccccuuccagaacauccaccccaucaccaucggcaagugccccaaguacgucaaguccaccaagcuccgccucgccaccggccuccgcaacguccccuccauccagucccgcggccucuucggcgccaucgccggcuucaucgagggcggcuggaccggcauggucgacggcugguacggcuaccaccaccagaacgagcagggcuccggcuacgccgccgaccucaaguccacccagaacgccaucgacaagaucaccaacaaggucaacuccgucaucgagaagaugaacacccaguucaccgccgucggcaaggaguucaaccaccucgagaagcgcaucgagaaccucaacaagaaggucgacgacggcuuccucgacaucuggaccuacaacgccgagcuccucguccuccucgagaacgagcgcacccucgacuaccacgacuccaacgucaagaaccucuacgagaagguccgcaaccagcucaagaacaacgccaaggagaucggcaacggcugcuucgaguucuaccacaagugcgacaacaccugcauggaguccgucaagaacggcaccuacgacuaccccaaguacuccgaggaggccaagcucaaccgcgagaagaucgacggcgucaagcucgaguccacccgcaucuaccagauccucgccaucuacuccaccgucgccuccucccucguccucgucgucucccucggcgccaucuccuucuggaugugcuccaacggcucccuccagugccgcaucugcaucuga

SEQ ID NO: 108433 - RNA, 1701 nt, Artificial Sequence; identical to SEQ ID NO: 106076
  derived and/or modified CDS sequence (opt2) from hemagglutinin__InfluenzaA__AIC73765

SEQ ID NO: 108434 - RNA, 1701 nt, Artificial Sequence; identical to SEQ ID NO: 106076
  derived and/or modified CDS sequence (opt2) from hemagglutinin__InfluenzaA__AIC73766

SEQ ID NO: 108435 - RNA, 1701 nt, Artificial Sequence
  derived and/or modified CDS sequence (opt2) from hemagglutinin__InfluenzaA__AIC73767
augaaggccauccucgucguccuccucuacaccuucgccaccgccaacgccgacacccucugcaucggcuaccacgccaacaacuccaccgacaccgucgacaccguccucgagaagaacgucaccgucacccacuccgucaaccuccucgaggacaagcacaacggcaagcucugcaagcuccgcggcgucgccccccuccaccucggcaagugcaacaucgccggcuggauccucggcaaccccgagugcgagucccucuccaccgccuccuccugguccuacaucgucgagaccuccuccuccgacaacggcaccugcuaccccggcgacuucaucaacuacgaggagcuccgcgagcagcucuccuccgucuccuccuucgagcgcuucgagaucuuccccaagaccuccuccuggcccaaccacgacuccaacaagggcgucaccgccgccugcccccacgccggcgccaaguccuucuacaagaaccucaucuggcucaucaagaagggcaacuccuaccccaagcucucccaguccuacaucaacgacaagggcaaggagguccucguccucuggggcauccaccaccccuccaccaccgccgaccagcagucccucuaccagaacgccgacgccuacgucuucgucggcaccucccgcuacuccaagaaguucaagcccgagaucgccauccgccccaagguccgcgaccaggagggccgcaugaacuacuacuggacccucgucgagcccggcgacaagaucaccuucgaggccaccggcaaccucgucgucccccgcuacgccuucaccauggagcgcaacgccggcuccggcaucaucaucuccgacacccccguccacgacugcaacaccaccugccagacccccgagggcgccaucaacaccucccuccccuuccagaacauccaccccaucaccaucggcaagugccccaaguacgucaaguccaccaagcuccgccucgccaccggccuccgcaacauccccuccauccagucccgcggccucuucggcgccaucgccggcuucaucgagggcggcuggaccggcauggucgacggcugguacggcuaccaccaccagaacgagcagggcuccggcuacgccgccgaccucaaguccacccagaacgccaucgacaagaucaccaacaaggucaacuccgucaucgagaagaugaacacccaguucaccgccgucggcaaggaguucaaccaccucgagaagcgcaucgagaaccucaacaagaaggucgacgacggcuuccucgacaucuggaccuacaacgccgagcuccucguccuccucgagaacgagcgcacccucgacuaccacgacuccaacgucaagaaccucuacgagaagauccgcaaccagcucaagaacaacgccaaggagaucggcaacggcugcuucgaguucuaccacaagugcgacaacaugugcauggaguccgucaagaacggcaccuacgacuaccccaaguacuccgaggaggccaagcucaaccgcgagaagaucgacggcgucaagcucgaguccacccgcaucuaccagauccucgccaucuacuccaccgucgccuccucccucguccucgucgucucccucggcgccaucuccuucuggaugugcuccaacggcucccuccagugccgcaucugcaucuga

SEQ ID NO: 108436 - RNA, 1701 nt, Artificial Sequence; identical to SEQ ID NO: 106076
  derived and/or modified CDS sequence (opt2) from hemagglutinin__InfluenzaA__AIC73768

SEQ ID NO: 108437 - RNA, 1701 nt, Artificial Sequence; identical to SEQ ID NO: 106076
  derived and/or modified CDS sequence (opt2) from hemagglutinin__InfluenzaA__AIC73769

SEQ ID NO: 108438 - RNA, 1701 nt, Artificial Sequence; identical to SEQ ID NO: 106076
  derived and/or modified CDS sequence (opt2) from hemagglutinin__InfluenzaA__AIC73770

SEQ ID NO: 108439 - RNA, 1701 nt, Artificial Sequence; identical to SEQ ID NO: 106076
  derived and/or modified CDS sequence (opt2) from hemagglutinin__InfluenzaA__AIC73771

SEQ ID NO: 108440 - RNA, 1701 nt, Artificial Sequence
  derived and/or modified CDS sequence (opt2) from hemagglutinin__InfluenzaA__AIC73772
augaaggccauccucgucguccuccucuacaccuucgccaccgccaacgccgacacccucugcaucggcuaccacgccaacaacuccaccgacaccgucgacaccguccucgagaagaacgucaccgucacccacuccgucaaccuccucgaggacaagcacaacggcaagcucugcaagcuccgcggcgucgccccccuccaccucggcaagugcaacaucgccggcuggauccucggcaaccccgagugcgagucccucuccaccgccuccuccugguccuacaucgucgagaccuccuccuccgacaacggcaccugcuaccccggcgacuucaucaacuacgaggagcuccgcgagcagcucuccuccgucuccuccuucgagcgcuucgagaucuuccccaagaccuccuccuggcccaaccacgacuccaacaagggcgucaccgccgccugcccccacgccggcgccaaguccuucuacaagaaccucaucuggcucgucaagaagggcaacuccuaccccaagcucucccaguccuacaucaacgacaagggcaaggagguccucguccucuggggcauccaccaccccuccaccaccgccgaccagcagucccucuaccagaacgccgacgccuacgucuucgucggcaccucccgcuacuccaagaaguucaagcccgagaucgccauccgccccaagguccgcgaccaggagggccgcaugaacuacuacuggacccucgucgagcccggcgacaagaucaccuucgaggccaccggcaaccucgucgucccccgcuacgccuucaccauggagcgcaacgccggcuccggcaucaucaucuccgacacccccguccacgacugcaacaccaccugccagacccccgagggcgccaucaacaccucccuccccuuccagaacauccaccccaucaccaucggcaagugccccaaguacgucaaguccaccaagcuccgccucgccaccggccuccgcaacguccccuccauccagucccgcggccucuucggcgccaucgccggcuucaucgagggcggcuggaccggcauggucgacggcugguacggcuaccaccaccagaacgagcagggcuccggcuacgccgccgaccucaaguccacccagaacgccaucgacaagaucaccaacaaggucaacuccgucaucgagaagaugaacacccaguucaccgccgucggcaaggaguucaaccaccucgagaagcgcaucgagaaccucaacaagaaggucgacgacggcuuccucgacaucuggaccuacaacgccgagcuccucguccuccucgagaacgagcgcacccucgacuaccacgacuccaacgucaagaaccucuacgagaagguccgcaaccagcucaagaacaacgccaaggagaucggcaacggcugcuucgaguucuaccacaagugcgacaacaccugcauggaguccgucaagaacggcaccuacgacuaccccaaguacuccgaggaggccaagcucaaccgcgagaagaucgacggcgucaagcucgaguccacccgcgucuaccagauccucgccaucuacuccaccgucgccuccucccucguccucgucgucucccucggcgccaucuccuucuggaugugcuccaacggcucccuccagugccgcaucugcaucuga

SEQ ID NO: 108441 - RNA, 1701 nt, Artificial Sequence; identical to SEQ ID NO: 106076
  derived and/or modified CDS sequence (opt2) from hemagglutinin__InfluenzaA__AIC73773

SEQ ID NO: 108442 - RNA, 1701 nt, Artificial Sequence; identical to SEQ ID NO: 106076
  derived and/or modified CDS sequence (opt2) from hemagglutinin__InfluenzaA__AIC73775

SEQ ID NO: 108443 - RNA, 1701 nt, Artificial Sequence; identical to SEQ ID NO: 106076
  derived and/or modified CDS sequence (opt2) from hemagglutinin__InfluenzaA__AIC73776

SEQ ID NO: 108444 - RNA, 1701 nt, Artificial Sequence; identical to SEQ ID NO: 108440
  derived and/or modified CDS sequence (opt2) from hemagglutinin__InfluenzaA__AIC73777

SEQ ID NO: 108445 - RNA, 1701 nt, Artificial Sequence
  derived and/or modified CDS sequence (opt2) from hemagglutinin__InfluenzaA__AIC73778
augaagaccaucaucgcccucuccuacauccucugccucgucuucgcccagaagcuccccggcaacgacaacuccaccgccacccucugccucggccaccacgccguccccaacggcaccaucgucaagaccaucaccaacgaccgcaucgaggucaccaacgccaccgagcucguccagaacuccuccaucggcgagaucugcgacuccccccaccagauccucgacggcgagaacugcacccucaucgacgcccuccucggcgacccccagugcgacggcuuccagaacaagaagugggaccucuucgucgagcgcuccaaggcccacuccaacugcuaccccuacgacguccccgacuacgccucccuccgcucccucgucgccuccuccggcacccucgaguucaacaacgaguccuucaacuggaccggcgucacccagaacggcaccuccuccgccugcauccgccgcuccaacuccuccuucuucucccgccucaacuggcucacccaccucaacuucaaguaccccgcccucaacgucaccaugcccaacaacgagcaguucgacaagcucuacaucuggggcguccaccaccccggcaccgacaaggaccagaucuuccucuacgcccaguccuccggccgcaucaccgucuccaccaagcgcucccagcaggccgucauccccaacaucggcucccgcccccgcauccgcaacauccccucccgcaucuccaucuacuggaccaucgucaagcccggcgacauccuccucaucaacuccaccggcaaccucaucgccccccgcggcuacuucaagauccgcuccggcaaguccuccaucaugcgcuccgacgcccccaucggcaagugcaaguccgagugcaucacccccaacggcuccauccccaacgacaagcccuuccagaacgucaaccgcaucaccuacggcgccugcccccgcuacgucaagcaguccacccucaagcucgccaccggcaugcgcaacguccccgagaagcagacccgcggcaucuucggcgccaucgccggcuucaucgagaacggcugggagggcauggucgacggcugguacggcuuccgccaccagaacuccgagggccgcggccaggccgccgaccucaaguccacccaggccgccaucgaccagaucaacggcaagcucaaccgccucaucggcaagaccaacgagaaguuccaccagaucgagaaggaguucuccgaggucgagggccgcauccaggaccucgagaaguacgucgaggacaccaagaucgaccucugguccuacaacgccgagcuccucgucgcccucgagaaccagcacaccaucgaccucaccgacuccgagaugaacaagcucuucgagaagaccaagaagcagcuccgcgagaacgccgaggacaugggcaacggcugcuucaagaucuaccacaagugcgacaacgccugcaucggcuccauccgcaacggcaccuacgaccacaacgucuaccgcgacgaggcccucaacaaccgcuuccagaucaagggcgucgagcucaaguccggcuacaaggacuggauccucuggaucuccuucgccaucuccugcuuccuccucugcgucgcccuccucggcuucaucaugugggccugccagaagggcaacauccgcugcaacaucugcaucuga

SEQ ID NO: 108446 - RNA, 1701 nt, Artificial Sequence; identical to SEQ ID NO: 108445
  derived and/or modified CDS sequence (opt2) from hemagglutinin__InfluenzaA__AIC73779

SEQ ID NO: 108447 - RNA, 1701 nt, Artificial Sequence; identical to SEQ ID NO: 108445
  derived and/or modified CDS sequence (opt2) from hemagglutinin__InfluenzaA__AIC73780

SEQ ID NO: 108448 - RNA, 1701 nt, Artificial Sequence; identical to SEQ ID NO: 107034
  derived and/or modified CDS sequence (opt2) from hemagglutinin__InfluenzaA__AIC73781

SEQ ID NO: 108449 - RNA, 1701 nt, Artificial Sequence; identical to SEQ ID NO: 108445
  derived and/or modified CDS sequence (opt2) from hemagglutinin__InfluenzaA__AIC73782

SEQ ID NO: 108450 - RNA, 1701 nt, Artificial Sequence; identical to SEQ ID NO: 108445
  derived and/or modified CDS sequence (opt2) from hemagglutinin__InfluenzaA__AIC73783

SEQ ID NO: 108451 - RNA, 1701 nt, Artificial Sequence; identical to SEQ ID NO: 108445
  derived and/or modified CDS sequence (opt2) from hemagglutinin__InfluenzaA__AIC73784

SEQ ID NO: 108452 - RNA, 1701 nt, Artificial Sequence; identical to SEQ ID NO: 106076
  derived and/or modified CDS sequence (opt2) from hemagglutinin__InfluenzaA__AIC73785

SEQ ID NO: 108453 - RNA, 1701 nt, Artificial Sequence; identical to SEQ ID NO: 108445
  derived and/or modified CDS sequence (opt2) from hemagglutinin__InfluenzaA__AIC73786

SEQ ID NO: 108454 - RNA, 1701 nt, Artificial Sequence; identical to SEQ ID NO: 106076
  derived and/or modified CDS sequence (opt2) from hemagglutinin__InfluenzaA__AIC73787

SEQ ID NO: 108455 - RNA, 1701 nt, Artificial Sequence; identical to SEQ ID NO: 106076
  derived and/or modified CDS sequence (opt2) from hemagglutinin__InfluenzaA__AIC73788

SEQ ID NO: 108456 - RNA, 1701 nt, Artificial Sequence
  derived and/or modified CDS sequence (opt2) from hemagglutinin__InfluenzaA__AIC73789
augaagaccaucaucgcccucuccuacauccucugccucgucuucgcccagaagccccccggcaacgacaacuccaccgccacccucugccucggccaccacgccguccccaacggcaccaucgucaagaccaucaccaacgaccgcaucgaggucaccaacgccaccgagcucguccagaacuccuccaucggcgagaucugcgacuccccccaccagauccucgacggcgagaacugcacccucaucgacgcccuccucggcgacccccagugcgacggcuuccagaacaagaagugggaccucuucgucgagcgcuccaaggccuacuccaacugcuaccccuacgacguccccgacuacgccucccuccgcucccucgucgccuccuccggcacccucgaguucaacaacgaguccuucaacugggccggcgucacccagaacggcaccuccuccgccugcauccgcggcuccaacuccuccuucuucucccgccucaacuggcucacccaccucaacuucaaguaccccgcccucaacgucaccaugcccaacaacgagcaguucgacaagcucuacaucuggggcguccaccaccccggcaccgacaaggaccagaucuuccucuacgcccaguccuccggccgcaucaccgucuccaccaagcgcucccagcaggccgucauccccaacaucggcucccgcccccgcauccgcaacauccccucccgcaucuccaucuacuggaccaucgucaagcccggcgacauccuccucaucaacuccaccggcaaccucaucgccccccgcggcuacuucaagauccgcuccggcaaguccuccaucaugcgcuccgacgcccccaucggcaagugcaaguccgagugcaucacccccaacggcuccauccccaacgacaagcccuuccagaacgucaaccgcaucaccuacggcgccugcccccgcuacgucaagcaguccacccucaagcucgccaccggcaugcgcaacguccccgagaagcagacccgcggcaucuucggcgccaucgccggcuucaucgagaacggcugggagggcauggucgacggcugguacggcuuccgccaccagaacuccgagggccgcggccaggccgccgaccucaaguccacccaggccgccaucgaccagaucaacggcaagcucaaccgccucaucggcaagaccaacgagaaguuccaccagaucgagaaggaguucuccgaggucgagggccgcauccaggaccucgagaaguacgucgaggacaccaagaucgaccucugguccuacaacgccgagcuccucgucgcccucgagaaccagcacaccaucgaccucaccgacuccgagaugaacaagcucuucgagaagaccaagaagcagcuccgcgagaacgccgaggacaugggcaacggcugcuucaagaucuaccacaagugcgacaacgccugcaucggcuccauccgcaacggcaccuacgaccacgacgucuaccgcgacgaggcccucaacaaccgcuuccagaucaagggcgucgagcucaaguccggcuacaaggacuggauccucuggaucuccuucgccaucuccugcuuccuccucugcgucguccuccucggcuucaucaugugggccugccagaagggcaacauccgcugcaacaucugcaucuga

SEQ ID NO: 108457 - RNA, 1701 nt, Artificial Sequence
  derived and/or modified CDS sequence (opt2) from hemagglutinin__InfluenzaA__AIC73790
augaaggccauccucgucguccuccucuacaccuucgccaccaccaacgccgacacccucugcaucggcuaccacgccaacaacuccaccgacaccgucgacaccguccucgagaagaacgucaccgucacccacuccgucaaccuccucgaggacaagcacaacggcaagcucugcaagcuccgcggcgucgccccccuccaccucggcaagugcaacaucgccggcuggauccucggcaaccccgagugcgagucccucuccaccgccuccuccugguccuacaucgucgagaccuccuccuccgacaacggcaccugcuaccccggcgacuucaucaacuacgaggagcuccgcgagcagcucuccuccgucuccuccuucgagcgcuucgagaucuuccccaagaccuccuccuggcccaaccacgacuccaacaagggcgucaccgccgccugcccccacgccggcgccaaguccuucuacaagaaccucaucuggcucgucaagaagggcaacuccuaccccaagcuccgccaguccuacaucaacgacaagggcaaggagguccucguccucuggggcauccaccaccccuccaccaccaccgaccagcagucccucuaccagaacgccgacgccuacgucuucgucggcaccucccgcuacuccaagaaguucaagcccgagaucgccauccgccccaagguccgcgaccaggagggccgcaugaacuacuacuggacccucgucgagcccggcgacaagaucaccuucgaggccaccggcaaccucgucgucccccgcuacgccuucaccauggagcgcaacgccggcuccggcaucaucaucuccgacacccccguccacgacugcaacaccaccugccagacccccgagggcgccaucaacaccucccuccccuuccagaacauccaccccaucaccaucggcaagugccccaaguacgucaaguccaccaagcuccgccucgccaccggccuccgcaacguccccuccauccagucccgcggccucuucggcgccaucgccggcuucaucgagggcggcuggaccggcauggucgacggcugguacggcuaccaccaccagaacgagcagggcuccggcuacgccgccgaccucaaguccacccagaacgccaucgacaagaucaccaacaaggucaacuccgucaucgagaagaugaacacccaguucaccgccgucggcaaggaguucaaccaccucgagaagcgcaucgagaaccucaacaagaaggucgacgacggcuuccucgacaucuggaccuacaacgccgagcuccucguccuccucgagaacgagcgcacccucgacuaccacgacuccaacgucaagaaccucuacgagaagguccgcaaccagcucaagaacaacgccaaggagaucggcaacggcugcuucgaguucuaccacaagugcgacaacaccugcauggaguccgucaagaacggcaccuacgacuaccccaaguacuccgaggaggccaagcucaaccgcgagaagaucgacggcgucaagcucgaguccacccgcaucuaccagauccucgccaucuacuccaccgucgccuccucccucguccucgucgucucccucggcgccaucuccuucuggaugugcuccaacggcucccuccagugccgcaucugcaucuga

SEQ ID NO: 108458 - RNA, 1701 nt, Artificial Sequence
  derived and/or modified CDS sequence (opt2) from hemagglutinin__InfluenzaA__AIC73791
augaaggccauccucgucguccuccucuacaccuucgccaccgccaacgccgacacccucugcaucggcuaccacgccaacaacuccaccgacaccaucgacaccguccucgagaagaacgucaccgucacccacuccgucaaccuccucgaggacaagcacaacggcaagcucugcaagcuccgcggcgucgccccccuccaccucggcaagugcaacaucgccggcuggauccucggcaaccccgagugcgagucccucuccaccgccuccuccugguccuacaucgucgagaccuccuccuccgacaacggcaccugcuaccccggcgacuucaucaacuacgaggagcuccgcgagcagcucuccuccgucuccuccuucgagcgcuucgagaucuuccccaagaccuccuccuggcccaaccacgacuccaacaagggcgucaccgccgccugcccccacgccggcgccaaguccuucuacaagaaccucaucuggcucgucaagaagggcaacuccuaccccaagcucucccaguccuacaucaacgacaagggcaaggagguccucguccucuggggcauccaccaccccuccaccaccgccgaccagcagucccucuaccagaacgccgacgccuacgucuucgucggcaccucccgcuacuccaagaaguucaagcccgagaucgccauccgccccaagguccgcgaccaggagggccgcaugaacuacuacuggacccucgucgagcccggcgacaagaucaccuucgaggccaccggcaaccucgucgucccccgcuacgccuucaccauggagcgcaacgccggcuccggcaucaucaucuccgacacccccguccacgacugcaacaccaccugccagacccccgagggcgccaucaacaccucccuccccuuccagaacauccaccccaucaccaucggcaagugccccaaguacgucaaguccaccaagcuccgccucgccaccggccuccgcaacguccccuccauccagucccgcggccucuucggcgccaucgccggcuucaucgagggcggcuggaccggcauggucgacggcugguacggcuaccaccaccagaacgagcagggcuccggcuacgccgccgaccucaaguccacccagaacgccaucgacaagaucaccaacaaggucaacuccgucaucgagaagaugaacacccaguucaccgccgucggcaaggaguucaaccaccucgagaagcgcaucgagaaccucaacaagaaggucgacgacggcuuccucgacaucuggaccuacaacgccgagcuccucguccuccucgagaacgagcgcacccucgacuaccacgacuccaacgucaagaaccucuacgagaagguccgcaaccagcucaagaacaacgccaaggagaucggcaacggcugcuucgaguucuaccacaagugcgacaacaccugcauggaguccgucaagaacggcaccuacgacuaccccaaguacuccgaggaggccaagcucaaccgcgagaagaucgacggcgucaagcucgaguccacccgcaucuaccagauccucgccaucuacuccaccgucgccuccucccucguccucgucgucucccucggcgccaucuccuucuggaugugcuccaacggcucccuccagugccgcaucugcaucuga

SEQ ID NO: 108459 - RNA, 1701 nt, Artificial Sequence; identical to SEQ ID NO: 106076
  derived and/or modified CDS sequence (opt2) from hemagglutinin__InfluenzaA__AIC73792

SEQ ID NO: 108460 - RNA, 1701 nt, Artificial Sequence; identical to SEQ ID NO: 108440
  derived and/or modified CDS sequence (opt2) from hemagglutinin__InfluenzaA__AIC73793

SEQ ID NO: 108461 - RNA, 1701 nt, Artificial Sequence
  derived and/or modified CDS sequence (opt2) from hemagglutinin__InfluenzaA__AIC73794
augaagaccaucaucggcgucuccuacauccucugccucgucuucgcccagaagcuccccggcaacgacaacuccaccgccacccucugccucggccaccacgccguccccaacggcaccaucgucaagaccaucaccaacgaccgcaucgaggucaccaacgccaccgagcucguccagaacuccuccaucggcgagaucugcgacuccccccaccagauccucgacggcgagaacugcacccucaucgacgcccuccucggcgacccccagugcgacggcuuccagaacaagaagugggaccucuucgucgagcgcuccaaggccuacuccaacugcuaccccuacgacguccccgacuacgccucccuccgcucccucgucgccuccuccggcacccucgaguucaacaacgaguccuucaacugggccggcgucacccagaacggcaccuccuccuccugcauccgcggcuccaacuccuccuucuucucccgccucaacuggcucacccaccucaacuccaaguaccccgcccucaacgucaccaugcccaacaacgagcaguucgacaagcucuacaucuggggcguccaccaccccggcaccgacaaggaccagaucuuccucuacgcccaguccuccggccgcaucaccgucuccaccaagcgcucccagcaggccgucauccccaacaucggcucccgcccccgcauccgcgacauccccucccgcaucuccaucuacuggaccaucgucaagcccggcgacauccuccucaucaacuccaccggcaaccucaucgccccccgcggcuacuucaagauccgcuccggcaaguccuccaucaugcgcuccgacgcccccaucggcaagugcaaguccgagugcaucacccccaacggcuccauccccaacgacaagcccuuccagaacgucaaccgcaucaccuacggcgccugcccccgcuacgucaagcaguccacccucaagcucgccaccggcaugcgcaacguccccgagcgccagacccgcggcaucuucggcgccaucgccggcuucaucgagaacggcugggagggcauggucgacggcugguacggcuuccgccaccagaacuccgagggccgcggccaggccgccgaccucaaguccacccaggccgccaucgaccagaucaacggcaagcucaaccgccucaucggcaagaccaacgagaaguuccaccagaucgagaaggaguucuccgaggucgagggccgcauccaggaccucgagaaguacgucgaggacaccaagaucgaccucugguccuacaacgccgagcuccucgucgcccucgagaaccagcacaccaucgaccucaccgacuccgagaugaacaagcucuucgagaagaccaagaagcagcuccgcgagaacgccgaggacaugggcaacggcugcuucaagaucuaccacaagugcgacaacgccugcaucggcuccauccgcaacggcaccuacgaccacgacgucuaccgcgacgaggcccucaacaaccgcuuccagaucaagggcgucgagcucaaguccggcuacaaggacuggauccucuggaucuccuucgccaucuccugcuuccuccucugcgucgcccuccucggcuucaucaugugggccugccagaagggcaacauccgcugcaacaucugcaucuga

SEQ ID NO: 108462 - RNA, 1701 nt, Artificial Sequence; identical to SEQ ID NO: 106076
  derived and/or modified CDS sequence (opt2) from hemagglutinin__InfluenzaA__AIC73796

SEQ ID NO: 108463 - RNA, 1701 nt, Artificial Sequence
  derived and/or modified CDS sequence (opt2) from hemagglutinin__InfluenzaA__AIC73797
augaagaccaucaucgcccucuccuacauccucugccucgucuucgcccagaagcuccccggcaacgacaacuccaccgccacccucugccucggccaccacgccguccccaacggcaccaucgucaagaccaucaccaacgaccgcaucgaggucaccaacgccaccgagcucguccagaacuccuccaucggcgagaucugcgacuccccccaccagauccucgacggcgagaacugcacccucaucgacgcccuccucggcgacccccagugcgacggcuuccagaacaagaagugggaccucuucgucgagcgcuccaaggccuacuccaacugcuaccccuacgacguccccgacuacgccucccuccgcucccucgucgccuccuccggcacccucgaguucaacaacgaguccuucaacugggccggcgucacccagaacggcaccuccuccuccugcauccgcggcuccaacuccuccuucuucucccgccucaacuggcucacccaccucaacuccaaguaccccgcccucaacgucaccaugcccaacaacgagcaguucgacaagcucuacaucuggggcguccaccaccccggcaccgacaaggaccagaucuuccucuacgcccaguccuccggccgcaucaccgucuccaccaagcgcucccagcaggccgucauccccaacaucggcucccgcccccgcauccgcgacauccccucccgcaucuccaucuacuggaccaucgucaagcccggcgacauccuccucaucaacuccaccggcaaccucaucgccccccgcggcuacuucaagauccgcuccggcaaguccuccaucaugcgcuccgacgcccccaucggcaagugcaaguccgagugcaucacccccaacggcuccauccccaacgacaagcccuuccagaacgucaaccgcaucaccuacggcgccugcccccgcuacgucaagcaguccacccucaagcucgccaccggcaugcgcaacguccccgagcgccagacccgcggcaucuucggcgccaucgccggcuucaucgagaacggcugggagggcauggucgacggcugguacggcuuccgccaccagaacuccgagggccgcggccaggccgccgaccucaaguccacccaggccgccaucgaccagaucaacggcaagcucaaccgccucaucggcaagaccaacgagaaguuccaccagaucgagaaggaguucuccgaggucgagggccgcauccaggaccucgagaaguacgucgaggacaccaagaucgaccucugguccuacaacgccgagcuccucgucgcccucgagaaccagcacaccaucgaccucaccgacuccgagaugaacaagcucuucgagaagaccaagaagcagcuccgcgagaacgccgaggacaugggcaacggcugcuucaagaucuaccacaagugcgacaacgccugcaucggcuccauccgcaacggcaccuacgaccacgacgucuaccgcgacgaggcccucaacaaccgcuuccagaucaagggcgucgagcucaaguccggcuacaaggacuggauccucuggaucuccuucgccaucuccugcuuccuccucugcgucgcccuccucggcuucaucaugugggccugccagaagggcaacauccgcugcaacaucugcaucuga

SEQ ID NO: 108464 - RNA, 1701 nt, Artificial Sequence; identical to SEQ ID NO: 108463
  derived and/or modified CDS sequence (opt2) from hemagglutinin__InfluenzaA__AIC73798

SEQ ID NO: 108465 - RNA, 1701 nt, Artificial Sequence; identical to SEQ ID NO: 108463
  derived and/or modified CDS sequence (opt2) from hemagglutinin__InfluenzaA__AIC73800

SEQ ID NO: 108466 - RNA, 1701 nt, Artificial Sequence; identical to SEQ ID NO: 108463
  derived and/or modified CDS sequence (opt2) from hemagglutinin__InfluenzaA__AIC73801

SEQ ID NO: 108467 - RNA, 1701 nt, Artificial Sequence; identical to SEQ ID NO: 108463
  derived and/or modified CDS sequence (opt2) from hemagglutinin__InfluenzaA__AIC73802

SEQ ID NO: 108468 - RNA, 1701 nt, Artificial Sequence; identical to SEQ ID NO: 108463
  derived and/or modified CDS sequence (opt2) from hemagglutinin__InfluenzaA__AIC73803

SEQ ID NO: 108469 - RNA, 1701 nt, Artificial Sequence; identical to SEQ ID NO: 108463
  derived and/or modified CDS sequence (opt2) from hemagglutinin__InfluenzaA__AIC73804

SEQ ID NO: 108470 - RNA, 1701 nt, Artificial Sequence; identical to SEQ ID NO: 108463
  derived and/or modified CDS sequence (opt2) from hemagglutinin__InfluenzaA__AIC73805

SEQ ID NO: 108471 - RNA, 1701 nt, Artificial Sequence; identical to SEQ ID NO: 108463
  derived and/or modified CDS sequence (opt2) from hemagglutinin__InfluenzaA__AIC73806

SEQ ID NO: 108472 - RNA, 1701 nt, Artificial Sequence
  derived and/or modified CDS sequence (opt2) from hemagglutinin__InfluenzaA__AIC73807
augaaggccauccucgucguccuccucuacaccuucgccaccgccaacgccgacacccucugcaucggcuaccacgccaacaacuccaccgacaccgucgacaccguccucgagaagaacgucaccgucacccacuccgucaaccuccucgaggacaagcacaacggcaagcucugcaagcuccgcggcgucgccccccuccaccucggcaagugcaacaucgccggcuggauccucggcaaccccgagugcgagucccucuccaccgccuccuccugguccuacaucgucgagaccuccuccuccgacaacggcaccugcuaccccggcgacuucaucaacuacgaggagcuccgcgagcagcucuccuccgucuccuccuucgagcgcuucgagaucuuccccaagaccuccuccuggcccaaccacgacuccaacaagggcgucaccgccgccugcccccacgccggcgccaaguccuucuacaagaaccucaucuggcucgucaagaagggcaacuccuaccccaagcucucccaguccuacaucaacaacaagggcaaggagguccucguccucuggggcauccaccaccccuccaccaccgccgaccagcagucccucuaccagaacgccgacgccuacgucuucgucggcaccucccgcuacuccaagaaguucaagcccgagaucgccauccgccccaagguccgcgaccaggagggccgcaugaacuacuacuggacccucgucgagcccggcgacaagaucaccuucgaggccaccggcaaccucgucgucccccgcuacgccuucaccauggagcgcaacgccggcuccggcaucaucaucuccgacacccccguccacgacugcaacaccaccugccagacccccgagggcgccaucaacaccucccuccccuuccagaacauccaccccaucaccaucggcaagugccccaaguacgucaaguccaccaagcuccgccucgccaccggccuccgcaacguccccuccauccagucccgcggccucuucggcgccaucgccggcuucaucgagggcggcuggaccggcauggucgacggcugguacggcuaccaccaccagaacgagcagggcuccggcuacgccgccgaccucaaguccacccagaacgccaucgacaagaucaccaacaaggucaacuccgucaucgagaagaugaacacccaguucaccgccgucggcaaggaguucaaccaccucgagaagcgcaucgagaaccucaacaagaaggucgacgacggcuuccucgacaucuggaccuacaacgccgagcuccucguccuccucgagaacgagcgcacccucgacuaccacgacuccaacgucaagaaccucuacgagaagguccgcaaccagcucaagaacaacgccaaggagaucggcaacggcugcuucgaguucuaccacaagugcgacaacaccugcauggaguccgucaagaacggcaccuacgacuaccccaaguacuccgaggaggccaagcucaaccgcgagaagaucgacggcgucaagcucgaguccacccgcaucuaccagauccucgccaucuacuccaccgucgccuccucccucguccucgucgucucccucggcgccaucuccuucuggaugugcuccaacggcucccuccagugccgcaucugcaucuga

SEQ ID NO: 108473 - RNA, 1701 nt, Artificial Sequence; identical to SEQ ID NO: 108463
  derived and/or modified CDS sequence (opt2) from hemagglutinin__InfluenzaA__AIC73808

SEQ ID NO: 108474 - RNA, 1701 nt, Artificial Sequence
  derived and/or modified CDS sequence (opt2) from hemagglutinin__InfluenzaA__AIC73809
augaaggccauccucgucguccuccucuacaccuucgccaccgccaacgccgacacccucugcaucggcuaccacgccaacaacuccaccgacaccgucgacaccguccucgagaagaacgucaccgucacccacuccgucaaccuccucgaggacaagcacaacggcaagcucugcaagcuccgcggcgucgccccccuccaccucggcaagugcaacaucgccggcuggauccucggcaaccccgagugcgagucccucuccaccgccuccuccugguccuacaucgucgagaccuccuccuccgacaacggcaccugcuaccccggcgacuucaucaacuacgaggagcuccgcgagcagcucuccuccgucuccuccuucgagcgcuucgagaucuuccccaagaccuccuccuggcccaaccacgacuccaacaagggcgucaccgccgccugcccccacgccggcgccaaguccuucuacaagaaccucaucuggcucgucaagaagggcaacuccuaccccaagcuccgccaguccuacaucaacgacaagggcaaggagguccucguccucuggggcauccaccaccccuccaccaccaccgaccagcagucccucuaccagaacgccgacgccuacgucuucgucggcaccucccgcuacuccaagaaguucaagcccgagaucgccauccgccccaagguccgcgaccaggagggccgcaugaacuacuacuggacccucgucgagcccggcgacaagaucaccuucgaggccaccggcaaccucgucgucccccgcuacgccuucaccauggagcgcaacgccggcuccggcaucaucaucuccgacacccccguccacgacugcaacaccaccugccagacccccgagggcgccaucaacaccucccuccccuuccagaacauccaccccaucaccaucggcaagugccccaaguacgucaaguccaccaagcuccgccucgccaccggccuccgcaacguccccuccauccagucccgcggccucuucggcgccaucgccggcuucaucgagggcggcuggaccggcauggucgacggcugguacggcuaccaccaccagaacgagcagggcuccggcuacgccgccgaccucaaguccacccagaacgccaucgacaagaucaccaacaaggucaacuccgucaucgagaagaugaacacccaguucaccgccgucggcaaggaguucaaccaccucgagaagcgcaucgagaaccucaacaagaaggucgacgacggcuuccucgacaucuggaccuacaacgccgagcuccucguccuccucgagaacgagcgcacccucgacuaccacgacuccaacgucaagaaccucuacgagaagguccgcaaccagcucaagaacaacgccaaggagaucggcaacggcugcuucgaguucuaccacaagugcgacaacaccugcauggaguccgucaagaacggcaccuacgacuaccccaaguacuccgaggaggccaagcucaaccgcgagaagaucgacgaggucaagcucgaguccacccgcaucuaccagauccucgccaucuacuccaccgucgccuccucccucguccucgucgucucccucggcgccaucuccuucuggaugugcuccaacggcucccuccagugccgcaucugcaucuga

SEQ ID NO: 108475 - RNA, 1701 nt, Artificial Sequence
  derived and/or modified CDS sequence (opt2) from hemagglutinin__InfluenzaA__AIC73810
augaaggccauccucgucguccuccucuacaccuucgccaccgccaacgccgacacccucugcaucggcuaccacgccaacaacuccaccgacaccgucgacaccguccucgagaagaacgucaccgucacccacuccgucaaccuccucgaggacaagcacaacggcaagcucugcaagcuccgcggcgucgccccccuccaccucggcaagugcaacaucgccggcuggauccucggcaaccccgagugcgagucccucuccaccgccuccuccugguccuacaucgucgagaccuccuccuccgacaacggcaccugcuaccccggcgacuucaucaacuacgaggagcuccgcgagcagcucuccuccgucuccuccuucgagcgcuucgagaucuuccccaagaccuccuccuggcccaaccacgacuccaacaagggcgucaccgccgccugcccccacgccggcgccaaguccuucuacaagaaccucaucuggcucgucaagaagggcaacuccuaccccaagcucucccaguccuacaucaacgacaagggcaaggagguccucguccucuggggcauccaccaccccuccaccaccgccgaccagcagucccucuaccagaacgccgacgccuacgucuucgucggcaccucccgcuacuccaagaaguucaagcccgagaucgccauccgccccaagguccgcgaccaggagggccgcaugaacuacuacuggacccucgucgagcccggcgacaagaucaccuucgaggccaccggcaaccucgucgucccccgcuacgccuucaccauggagcgcaacgccggcuccggcaucaucaucuccgacacccccguccacgacugcaacaccaccugccagacccccgagggcgccaucaacaccucccuccccuuccagaacauccaccccaucaccaucggcaagugccccaaguacgucaaguccaccaagcuccgccucgccaccggccuccgcaacguccccuccauccagucccgcggccucuucggcgccaucgccggcuucaucgagggcggcuggaccggcauggucgacggcugguacggcuaccaccaccagaacgagcagggcuccggcuacgccgccgaccucaaguccacccagaacgccaucgacaagaucaccaacaaggucaacuccgucaucgagaagaugaacacccaguucaccgccgucggcaaggaguucaaccaccucgagaagcgcaucgagaaccucaacaagaaggucgacgacggcuuccucgacaucuggaccuacaacgccgagcuccucguccuccucgagaacgagcgcacccucgacuaccacgacuccaacgucaagaaccucuacgagaagguccgcaaccagcucaagaacaacgccaaggagaucggcaacggcugcuucgaguucuaccaccgcugcgacaacaccugcauggaguccgucaagaacggcaccuacgacuaccccaaguacuccgaggaggccaagcucaaccgcgagaagaucgacggcgucaagcucgaguccacccgcaucuaccagauccucgccaucuacuccaccgucgccuccucccucguccucgucgucucccucggcgccaucuccuucuggaugugcuccaacggcucccuccagugccgcaucugcaucuga

SEQ ID NO: 108476 - RNA, 1701 nt, Artificial Sequence
  derived and/or modified CDS sequence (opt2) from hemagglutinin__InfluenzaA__AIC73813
augaaggccauccucgucguccuccucuacaccuucgccaccgccaacgccgacacccucugcaucggcuaccacgccaacaacuccaccgacaccgucgacaccguccucgagaagaacgucaccgucacccacuccgucaaccuccucgaggacaagcacaacggcaagcucugcaagcuccgcggcgucgccccccuccaccucggcaagugcaacaucgccggcuggauccucggcaaccccgagugcgagucccucuccaccgccuccuccugguccuacaucgucgagaccuccuccuccgacaacggcaccugcuaccccggcgacuucaucaacuacgaggagcuccgcgagcagcucuccuccgucuccuccuucgagcgcuucgagaucuuccccaagaccuccuccuggcccaaccacgacuccaacaagggcgucaccgccgccugcccccacgccggcgccaaguccuucuacaagaaccucaucuggcucgucaagaagggcaacuccuaccccaagcucucccaguccuacaucaacgacaagggcaaggagguccucguccucuggggcauccaccaccccuccaccaccgccgaccagcagucccucuaccagaacgccgacgccuacgucuucgucggcaccucccgcuacuccaagaaguucaagcccgagaucgccauccgccccaagguccgcgaccaggagggccgcaugaacuacuacuggacccucgucgagcccggcgacaagaucaccuucgaggccaccggcaaccucgucgucccccgcuacgccuucaccauggagcgcaacgccggcuccggcaucaucaucuccgacacccccguccacgacugcaacaccaccugccagacccccgagggcgccaucaacaccucccuccccuuccagaacauccaccccaucaccaucggcaagugccccaaguacgucaaguccaccaagcuccgccucgccaccggccuccgcaacguccccuccauccagucccgcggccucuucggcgccaucgccggcuucaucgagggcggcuggaccggcauggucgacggcugguacggcuaccaccaccagaacgagcagggcuccggcuacgccgccgaccucaaguccacccagaacgccaucgacaagaucaccaacaaggucaacuccgucaucgagaagaugaacacccaguucaccgccgucggcaaggaguucaaccaccucgagaagcgcaucgagaaccucaacaagaaggucgacgacggcuuccucgacaucuggaccuacaacgccgagcuccucguccuccucgagaacgagcgcacccucgacuaccacgacuccaacgucaagaaccucuacgagaagguccgcaaccagcucaagaacaacgccaaggagaucggcaacggcugcuucgaguucuaccacaagugcgacaacaccugcauggaguccgucaagaacggcaccuacgacuaccccaaguacuccgaggaggccaagcucaaccgcgagaagaucgacggcgucaagcucgaguccacccgcaucuaccagauccucgccaucuacuccaccgccgccuccucccucguccucgucaucucccucggcgccaucuccuucuggaugugcuccaacggcucccuccagugccgcaucugcaucuga

SEQ ID NO: 108477 - RNA, 1701 nt, Artificial Sequence
  derived and/or modified CDS sequence (opt2) from hemagglutinin__InfluenzaA__AIC73815
augaagaccaucaucgcccucuccuacauccucugccucgucuucgcccagaagauccccggcaacgacaacuccaccgccacccucugccucggccaccacgccguccccaacggcaccaucgucaagaccaucaccaacgaccgcaucgaggucaccaacgccaccgagcucguccagaacuccuccaucggcgagaucugcgacuccccccaccagauccucgacggcgagaacugcacccucaucgacgcccuccucggcgacccccagugcgacggcuuccagaacaagaagugggaccucuucgucgagcgcuccaaggccuacuccaacugcuaccccuacgacguccccgacuacgccucccuccgcucccucgucgccuccuccggcacccucgaguucaacaacgaguccuucaacuggaccggcgucacccagaacggcaccuccuccgccugcauccgccgcuccuccuccuccuucuucucccgccucaacuggcucacccaccucaacuacaccuaccccgcccucaacgucaccaugcccaacaacgagcaguucgacaagcucuacaucuggggcguccaccaccccggcaccgacaaggaccagaucuuccucuacgcccaguccuccggccgcaucaccgucuccaccaagcgcucccagcaggccgucauccccaacaucggcucccgcccccgcauccgcgacauccccucccgcaucuccaucuacuggaccaucgucaagcccggcgacauccuccucaucaacuccaccggcaaccucaucgccccccgcggcuacuucaagauccgcuccggcaaguccuccaucaugcgcuccgacgcccccaucggcaagugcaaguccgagugcaucacccccaacggcuccauccccaacgacaagcccuuccagaacgucaaccgcaucaccuacggcgccugcccccgcuacgucaagcacuccacccucaagcucgccaccggcaugcgcaacguccccgagaagcagacccgcggcaucuucggcgccaucgccggcuucaucgagaacggcugggagggcauggucgacggcugguacggcuuccgccaccagaacuccgagggccgcggccaggccgccgaccucaaguccacccaggccgccaucgaccagaucaacggcaagcucaaccgccucaucggcaagaccaacgagaaguuccaccagaucgagaaggaguucuccgaggucgagggccgcauccaggaccucgagaaguacgucgaggacaccaagaucgaccucugguccuacaacgccgagcuccucgucgcccucgagaaccagcacaccaucgaccucaccgacuccgagaugaacaagcucuucgagaagaccaagaagcagcuccgcgagaacgccgaggacaugggcaacggcugcuucaagaucuaccacaagugcgacaacgccugcaucggcuccauccgcaacggcaccuacgaccacaacgucuaccgcgacgaggcccucaacaaccgcuuccagaucaagggcgucgagcucaaguccggcuacaaggacuggauccucuggaucuccuucgccaucuccugcuuccuccucugcgucgcccuccucggcuucaucaugugggccugccagaagggcaacauccgcugcaacaucugcaucuga

SEQ ID NO: 108478 - RNA, 1701 nt, Artificial Sequence; identical to SEQ ID NO: 107956
  derived and/or modified CDS sequence (opt2) from hemagglutinin__InfluenzaA__AIC73817

SEQ ID NO: 108479 - RNA, 1701 nt, Artificial Sequence; identical to SEQ ID NO: 106076
  derived and/or modified CDS sequence (opt2) from hemagglutinin__InfluenzaA__AIC73819

SEQ ID NO: 108480 - RNA, 1701 nt, Artificial Sequence
  derived and/or modified CDS sequence (opt2) from hemagglutinin__InfluenzaA__AIC73820
augaagaccaucaucgcccucuccuacauccucugccucgucuucgcccagaagauccccggcaacgacaacuccaccgccacccucugccucggccaccacgccguccccaacggcaccaucgucaagaccaucaccaacgaccgcaucgaggucaccaacgccaccgagcucguccagaacuccuccaucggcgagaucugcgacuccccccaccagauccucgacggcgagaacugcacccucaucgacgcccuccucggcgacccccagugcgacggcuuccagaacaagaagugggaccucuucgucgagcgcuccaaggccuacuccaacugcuaccccuacgacguccccgacuacgccucccuccgcucccucgucgccuccuccggcacccucgaguucaacaacgaguccuucaacuggaccggcgucacccagaacggcaccuccuccgccugcauccgccgcuccuccuccuccuucuucucccgccucaacuggcucacccaccucaacuacaccuaccccgcccucaacgucaccaugcccaacaacgagcaguucgacaagcucuacaucuggggcguccaccaccccggcaccgacaaggaccagaucuuccucuacgcccaguccuccggccgcaucaccgucuccaccaagcgcucccagcaggccgucauccccaacaucggcucccgcccccgcauccgcgacauccccucccgcaucuccaucuacuggaccaucgucaagcccggcgacauccuccucaucaacuccaccggcaaccucaucgccccccgcggcuacuucaagauccgcuccggcaaguccuccaucaugcgcuccgacgcccccaucggcaagugcaaguccgagugcaucacccccaacggcuccauccccaacgacaagcccuuccagaacgucaaccgcaucaccuacggcgccugcccccgcuacgucaagcacuccacccucaagcucgccaccggcaugcgcaacguccccgagaagcagacccgcggcaucuucggcgccaucgccggcuucaucgagaacggcugggagggcauggucgacggcugguacggcuuccgccaccagaacuccgagggccgcggccaggccgccgaccucaaguccacccaggccgccaucgaccagaucaacggcaagcucaaccgccucaucggcaagaccaacgagaaguuccaccagaucgagaaggaguucuccgaggucgagggccgcauccaggaccucgagaaguacaucgaggacaccaagaucgaccucugguccuacaacgccgagcuccucgucgcccucgagaaccagcacaccaucgaccucaccgacuccgagaugaacaagcucuucgagaagaccaagaagcagcuccgcgagaacgccgaggacaugggcaacggcugcuucaagaucuaccacaagugcgacaacgccugcaucggcuccauccgcaacggcaccuacgaccacaacgucuaccgcgacgaggcccucaacaaccgcuuccagaucaagggcgucgagcucaaguccggcuacaaggacuggauccucuggaucuccuucgccaucuccugcuuccuccucugcgucgcccuccucggcuucaucaugugggccugccagaagggcaacauccgcugcaacaucugcaucuga

SEQ ID NO: 108481 - RNA, 1701 nt, Artificial Sequence; identical to SEQ ID NO: 106076
  derived and/or modified CDS sequence (opt2) from hemagglutinin__InfluenzaA__AIC73821

SEQ ID NO: 108482 - RNA, 1701 nt, Artificial Sequence; identical to SEQ ID NO: 108440
  derived and/or modified CDS sequence (opt2) from hemagglutinin__InfluenzaA__AIC73824

SEQ ID NO: 108483 - RNA, 1701 nt, Artificial Sequence; identical to SEQ ID NO: 106076
  derived and/or modified CDS sequence (opt2) from hemagglutinin__InfluenzaA__AIC73825

SEQ ID NO: 108484 - RNA, 1701 nt, Artificial Sequence
  derived and/or modified CDS sequence (opt2) from hemagglutinin__InfluenzaA__AIC73827
augaaggccauccucgucguccuccucuacaccuucgccaccgccaacgccgacacccucugcaucggcuaccacgccaacaacuccaccgacaccgucgacaccguccucgagaagaacgucaccgucacccacuccgucaaccuccucgaggacaagcacaacggcaagcucugcaagcuccgcggcgucgccccccuccaccucggcaagugcaacaucgccggcuggauccucggcaaccccgagugcgagccccucuccaccgccuccuccugguccuacaucgucgagaccuccuccuccgacaacggcaccugcuaccccggcgacuucaucaacuacgaggagcuccgcgagcagcucuccuccgucuccuccuucgagcgcuucgagaucuuccccaagaccuccuccuggcccaaccacgacuccaacaagggcgucaccgccgccugcccccacgccggcgccaaguccuucuacaagaaccucaucuggcucgucaagaagggcaacuccuaccccaagcucucccaguccuacaucaacgacaagggcaaggagguccucguccucuggggcauccaccaccccuccaccaccgccgaccagcagucccucuaccagaacgccgacgccuacgucuucgucggcaccucccgcuacuccaagaaguucaagcccgagaucgccauccgccccaagguccgcgaccaggagggccgcaugaacuacuacuggacccucgucgagcccggcgacaagaucaccuucgaggccaccggcaaccucgucgucccccgcuacgccuucaccauggagcgcaacgccggcuccggcaucaucaucuccgacacccccguccacgacugcaacaccaccugccagacccccgagggcgccaucaacaccucccuccccuuccagaacauccaccccaucaccaucggcaagugccccaaguacgucaaguccaccaagcuccgccucgccaccggccuccgcaacguccccuccauccagucccgcggccucuucggcgccaucgccggcuucaucgagggcggcuggaccggcauggucgacggcugguacggcuaccaccaccagaacgagcagggcuccggcuacgccgccgaccucaaguccacccagaacgccaucgacaagaucaccaacaaggucaacuccgucaucgagaagaugaacacccaguucaccgccgucggcaaggaguucaaccaccucgagaagcgcaucgagaaccucaacaagaaggucgacgacggcuuccucgacaucuggaccuacaacgccgagcuccucguccuccucgagaacgagcgcacccucgacuaccacgacuccaacgucaagaaccucuacgagaagguccgcaaccagcucaagaacaacgccaaggagaucggcaacggcugcuucgaguucuaccacaagugcgacaacaccugcauggaguccgucaagaacggcaccuacgacuaccccaaguacuccgaggaggccaagcucaaccgcgagaagaucgacggcgucaagcucgaguccacccgcaucuaccagauccucgccaucuacuccaccgucgccuccucccucauccucgucgucucccucggcgccaucuccuucuggaugugcuccaacggcucccuccagugccgcaucugcaucuga

SEQ ID NO: 108485 - RNA, 1701 nt, Artificial Sequence
  derived and/or modified CDS sequence (opt2) from hemagglutinin__InfluenzaA__AIC73828
augaaggccauccucgucguccuccucuacaccuucgccaccgccaacgccgacacccucugcaucggcuaccacgccaacaacuccaccgacaccgucgacaccguccucgagaagaacgucaccgucacccacuccgucaaccuccucgaggacaagcacaacggcaagcucugcaagcuccgcggcgucgccccccuccaccucggcaagugcaacaucgccggcuggauccucggcaaccccgagugcgagucccucuccaccgccuccuccugguccuacaucgucgagaccuccuccuccgacaacggcaccugcuaccccggcgacuucaucaacuacgaggagcuccgcgagcagcucuccuccgucuccuccuucgagcgcuucgagaucuuccccaagaccuccuccuggcccaaccacgacuccaacaagggcgucaccgccgccugcccccacgccggcgccaaguccuucuacaagaaccucaucuggcucgucaagaagggcaacuccuaccccaagcucucccaguccuacaucaacgacaagggcaaggagguccucguccucuggggcauccaccaccccuccaccaccgccgaccagcagucccucuaccagaacgccgacgccuacgucuucgucggcaccucccgcuacuccaagaaguucaagcccgagaucgccauccgccccaagguccgcgaccaggagggccgcaugaacuacuacuggacccucgucgagcccggcgacaagaucaccuucgaggccaccggcaaccucgucgucccccgcuacgccuucaccauggagcgcaacgccggcuccggcaucaucaucuccgacacccccguccacgacugcaacaccaccugccagacccccgagggcgccaucaacaccucccuccccuuccagaacauccaccccaucaccaucggcaagugccccaaguacgucaaguccaccaagcuccgccucgccaccggccuccgcaacguccccuccauccagucccgcggccucuucggcgccaucgccggcuucaucgagggcggcuggaccggcauggucgacggcugguacggcuaccaccaccagaacgagcagggcuccggcuacgccgccgaccucaaguccacccagaacgccaucgacaagaucaccaacaaggucaacuccgucaucgagaagaugaacacccaguucaccgccgucggcaaggaguucaaccaccucgagaagcgcaucgagaaccucaacaagaaggucgacgacggcuuccucgacaucuggaccuacaacgccgagcuccucguccuccucgagaacgagcgcacccucgacuaccacgacuccaacgucaagaaccucuacgagaagguccgcaaccagcucaagaccaacgccaaggagaucggcaacggcugcuucgaguucuaccacaagugcgacaacaccugcauggaguccgucaagaacggcaccuacgacuaccccaaguacuccgaggaggccaagcucaaccgcgagaagaucgacggcgucaagcucgaguccacccgcaucuaccagauccucgccaucuacuccaccgccgccuccucccucguccucgucgucucccucggcgccaucuccuucuggaugugcuccaacggcucccuccagugccgcaucugcaucuga

SEQ ID NO: 108486 - RNA, 1701 nt, Artificial Sequence
  derived and/or modified CDS sequence (opt2) from hemagglutinin__InfluenzaA__AIC73830
augaaggccauccucgucguccuccucuacaccuucgccaccgccaacgccgacacccucugcaucggcuaccacgccaacaacuccaccgacaccgucgacaccguccucgagaagaacgucaccgucacccacuccgucaaccuccucgaggacaagcacaacggcaagcucugcaagcucaagggcgucgccccccuccaccucggcaagugcaacaucgccggcuggauccucggcaaccccgagugcgagucccucuccaccgccuccuccugguccuacaucgucgagaccuccuccuccgacaacggcaccugcuaccccggcgacuucaucaacuacgaggagcuccgcgagcagcucuccuccgucuccuccuucgagcgcuucgagaucuuccccaagaccuccuccuggcccaaccacgacuccaacaagggcgucaccgccgccugcccccacgccggcgccaaguccuucuacaagaaccucaucuggcucgucaagaagggcaacuccuaccccaagcucucccaguccuacaucaacgacaagggcaaggagguccucguccucuggggcauccaccaccccuccaccaccgccgaccagcagucccucuaccagaacgccgacgccuacgucuucgucggcaccucccgcuacuccaagaaguucaagcccgagaucgccauccgccccaagguccgcgaccaggagggccgcaugaacuacuacuggacccucgucgagcccggcgacaagaucaccuucgaggccaccggcaaccucgucgucccccgcuacgccuucaccauggagcgcaacgccggcuccggcaucaucaucuccgacacccccguccacgacugcaacaccaccugccagacccccgagggcgccaucaacaccucccuccccuuccagaacauccaccccaucaccaucggcaagugccccaaguacgucaaguccaccaagcuccgccucgccaccggccuccgcaacguccccuccauccagucccgcggccucuucggcgccaucgccggcuucaucgagggcggcuggaccggcauggucgacggcugguacggcuaccaccaccagaacgagcagggcuccggcuacgccgccgaccucaaguccacccagaacgccaucgacaagaucaccaacaaggucaacuccgucaucgagaagaugaacacccaguucaccgccgucggcaaggaguucaaccaccucgagaagcgcaucgagaaccucaacaagaaggucgacgacggcuuccucgacaucuggaccuacaacgccgagcuccucguccuccucgagaacgagcgcacccucgacuaccacgacuccaacgucaagaaccucuacgagaagguccgcaaccagcucaagaacaacgccaaggagaucggcaacggcugcuucgaguucuaccacaagugcgacaacaccugcauggaguccgucaagaacggcaccuacgacuaccccaaguacuccgaggaggccaagcucaaccgcgagaagaucgacggcgucaagcucgaguccacccgcaucuaccagauccucgccaucuacuccaccgucgccuccucccucguccucgucgucucccucggcgccaucuccuucuggaugugcuccaacggcucccuccagugccgcaucugcaucuga

SEQ ID NO: 108487 - RNA, 1701 nt, Artificial Sequence
  derived and/or modified CDS sequence (opt2) from hemagglutinin__InfluenzaA__AIC73833
augaaggccauccucgucguccuccucuacaccuucgccaccgccaacgccgacacccucugcaucggcuaccacgccaacaacuccaccgacaccgucgacaccguccucgagaagaacgucaccgucacccacuccgucaaccuccucgaggacaagcacaacggcaagcucugcaagcuccgcggcgucgccccccuccaccucggcaagugcaacaucgccggcuggauccucggcaaccccgagugcgagucccucuccaccgccuccuccugguccuacaucgucgagaccuccuccuccgacaacggcaccugcuaccccggcgacuucaucaacuacgaggagcuccgcgagcagcucuccuccgucuccuccuucgagcgcuucgagaucuuccccaagaccuccuccuggcccaaccacgacuccaacaagggcgucaccgccgccugcccccacgccggcgccaaguccuucuacaagaaccucaucuggcucgucaagaagggcaacuccuaccccaagcucucccaguccuacaucaacgacaagggcaaggagguccucguccucuggggcauccaccaccccuccaccaccgccgaccagcagucccucuaccagaacgccgacgccuacgucuucgucggcaccucccgcuacuccaagaaguucaagcccgagaucgccauccgccccaagguccgcgaccaggagggccgcaugaacuacuacuggacccucgucgagcccggcgacaagaucaccuucgaggccaccggcaaccucgucgucccccgcuacgccuucaccauggagcgcaacgccggcuccggcaucaucaucuccgacacccccguccacgacugcaacaccaccugccagacccccgagggcgccaucaacaccucccuccccuuccagaacauccaccccaucaccaucggcaagugccccaaguacgucaaguccaccaagcuccgccucgccaccggccuccgcaacguccccuccauccagucccgcggccucuucggcgccaucgccggcuucaucgagggcggcuggaccggcauggucgacggcugguacggcuaccaccaccagaacgagcagggcuccggcuacgccgccgaccucaaguccacccagaacgccaucgacaagaucaccaacaaggucaacuccgucaucgagaagaugaacacccaguucaccgccgucggcaaggaguucaaccaccucgagaagcgcaucgagaaccucaacaagaaggucgacgacggcuuccucgacaucuggaccuacaacgccgagcuccucguccuccucgagaacgagcgcacccucgacuaccacgacuccaacgucaagaaccucuacgagaagguccgcaaccagcucaagaacaacgccaaggagaucggcaacggcugcuucgaguucuaccacaagugcgacaacaccugcauggaguccgucaagaacggcaccuacgacuaccccaaguacuccgaggaggccaagcucaaccgcgagaagaucgacggcgucaagcucgaguccacccgcaucuaccagauccucgccaucuacuccaccgccgccuccucccucguccucgucgucucccucggcgccaucuccuucuggaugugcuccaacggcucccuccagugccgcaucugcaucuga

SEQ ID NO: 108488 - RNA, 1701 nt, Artificial Sequence
  derived and/or modified CDS sequence (opt2) from hemagglutinin__InfluenzaA__AIC73834
augaaggccauccucgucguccuccucuacaccuucgccaccgccaacgccgacacccucugcaucggcuaccacgccaacaacuccaccgacaccgucgacaccguccucgagaagaacgucaccgucacccacuccgucaaccuccucgaggacaagcacaacggcaagcucugcaagcuccgcggcgucgccccccuccaccucggcaagugcaacaucgccggcuggauccucggcaaccccgagugcgagucccucuccaccgccuccuccugguccuacaucgucgagaccuccuccuccgacaacggcaccugcuaccccggcgacuucaucaacuacgaggagcuccgcgagcagcucuccuccgucuccuccuucgagcgcuucgagaucuuccccaagaccuccuccuggcccaaccacgacuccaacaagggcgucaccgccgccugcccccacgacggcgccaaguccuucuacaagaaccucaucuggcucgucaagaagggcaacuccuaccccaagcucucccaguccuacaucaacgacaagggcaaggagguccucguccucuggggcauccaccaccccuccaccaccgccggccagcagucccucuaccagaacgccgacgccuacgucuucgucggcaccucccgcuacuccaagaaguucaagcccgagaucgccauccgccccaagguccgcgaccaggagggccgcaugaacuacuacuggacccucgucgagcccggcgacaagaucaccuucgaggccaccggcaaccucgucgucccccgcuacgccuucaccauggagcgcaacgccggcuccggcaucaucaucuccgacacccccguccacgacugcaacaccaccugccagacccccgagggcgccaucaacaccucccuccccuuccagaacauccaccccaucaccaucggcaagugccccaaguacgucaaguccaccaagcuccgccucgccaccggccuccgcaacguccccuccauccagucccgcggccucuucggcgccaucgccggcuucaucgagggcggcuggaccggcauggucgacggcugguacggcuaccaccaccagaacgagcagggcuccggcuacgccgccgaccucaaguccacccagaacgccaucgacaagaucaccaacaaggucaacuccgucaucgagaagaugaacacccaguucaccgccgucggcaaggaguucaaccaccucgagaagcgcaucgagaaccucaacaagaaggucgacgacggcuuccucgacaucuggaccuacaacgccgagcuccucguccuccucgagaacgagcgcacccucgacuaccacgacuccaacgucaagaaccucuacgagaagguccgcaaccagcucaagaacaacgccaaggagaucggcaacggcugcuucgaguucuaccacaagugcgacaacaccugcauggaguccgucaagaacggcaccuacgacuaccccaaguacuccgaggaggccaagcucaaccgcgagaagaucgacggcgucaagcucgaguccacccgcaucuaccagauccucgccaucuacuccaccgucgccuccucccucguccucgucgucucccucggcgccaucuccuucuggaugugcuccaacggcucccuccagugccgcaucugcaucuga

SEQ ID NO: 108489 - RNA, 1701 nt, Artificial Sequence
  derived and/or modified CDS sequence (opt2) from hemagglutinin__InfluenzaA__AIC73835
augaaggccauccucgucguccuccucuacaccuucgccaccgccaacgccgacacccucugcaucggcuaccacgccaacaacuccaccgacaccgucgacaccguccucgagaagaacgucaccgucacccacuccgucaaccuccucgaggacaagcacaacggcaagcucugcaagcuccgcggcgucgccccccuccaccucggcaagugcaacaucgccggcuggauccucggcaaccccgagugcgagucccucuccaccgccuccuccugguccuacaucgucgagaccuccuccuccgacaacggcaccugcuaccccggcgacuucaucaacuacgaggagcuccgcgagcagcucuccuccgucuccuccuucgagcgcuucgagaucuuccccaagaccuccuccuggcccaaccacgacuccaacaagggcgucaccgccgccugcccccacgccggcgccaaguccuucuacaagaaccucaucuggcucgucaagaagggcaacuccuaccccaagcucucccaguccuacaucaacgacaagggcaaggagguccucguccucuggggcauccaccaccccuccaccaccgccgaccagcagucccucuaccagaacgccgacgccuacgucuucgucggcaccucccgcuacuccaagaaguucaagcccgagaucgccauccgccccaagguccgcgaccaggagggccgcaugaacuacuacuggacccucaucgagcccggcgacaagaucaccuucgaggccaccggcaaccucgucgucccccgcuacgccuucaccauggagcgcaacgccggcuccggcaucaucaucuccgacacccccguccacgacugcaacaccaccugccagacccccgagggcgccaucaacaccucccuccccuuccagaacauccaccccaucaccaucggcaagugccccaaguacgucaaguccaccaagcuccgccucgccaccggccuccgcaacguccccuccauccagucccgcggccucuucggcgccaucgccggcuucaucgagggcggcuggaccggcauggucgacggcugguacggcuaccaccaccagaacgagcagggcuccggcuacgccgccgaccucaaguccacccagaacgccaucgacaagaucaccaacaaggucaacuccgucaucgagaagaugaacacccaguucaccgccgucggcaaggaguucaaccaccucgagaagcgcaucgagaaccucaacaagaaggucgacgacggcuuccucgacaucuggaccuacaacgccgagcuccucguccuccucgagaacgagcgcacccucgacuaccacgacuccaacgucaagaaccucuacgagaagguccgcaaccagcucaagaacaacgccaaggagaucggcaacggcugcuucgaguucuaccacaagugcgacaacaccugcauggaguccgucaagaacggcaccuacgacuaccccaaguacuccgaggaggccaagcucaaccgcgagaagaucgacggcgucaagcucgaguccacccgcaucuaccagauccucgccaucuacuccaccgucgccuccucccucguccucgucgucucccucggcgccaucucccucuggaugugcuccaacggcucccuccagugccgcaucugcaucuga

SEQ ID NO: 108490 - RNA, 1701 nt, Artificial Sequence; identical to SEQ ID NO: 108432
  derived and/or modified CDS sequence (opt2) from hemagglutinin__InfluenzaA__AIC73836

SEQ ID NO: 108491 - RNA, 1701 nt, Artificial Sequence
  derived and/or modified CDS sequence (opt2) from hemagglutinin__InfluenzaA__AIC73837
augaagaccaucaucgcccucuccuacauccucugccucgucuucgcccagaagcuccccggcaacgacaacuccaccgccacccucugccucggccaccacgccguccccaacggcaccaucgucaagaccaucaccaacgaccgcaucgaggucaccaacgccaccgagcucguccagaacuccuccaucggcgagaucugcgacuccccccaccagauccucgacggcgagaacugcacccucaucgacgcccuccucggcgacccccagugcgacggcuuccagaacaagaagugggaccucuucgucgagcgcuccaaggccuacuccaacugcuaccccuacgacguccccgacuacgccucccuccgcucccucgucgccuccuccggcacccucgaguucaacaacgaguccuucaacugggccggcgucacccagaacggcaccuccuccgccugcauccgcggcuccaacuccuccuucuucucccgccucaacuggcucacccaccucaacuucaaguaccccgcccucaacgucaccaugcccaacaacgagcaguucgacaagcucuacaucuggggcguccaccaccccggcaccgacaaggaccagaucuuccucuacgcccaguccuccggccgcaucaccgucuccaccaagcgcucccagcaggccgucauccccaacaucggcucccgcccccgcauccgcaacauccccucccgcaucuccaucuacuggaccaucgucaagcccggcgacauccuccucaucaacuccaccggcaaccucaucgccccccgcggcuacuucaagauccgcuccggcaaguccuccaucaugcgcuccgacgcccccaucggcaagugcaaguccgagugcaucacccccaacggcuccauccccaacgacaagcccuuccagaacgucaaccgcaucaccuacggcgccugcccccgcuacgucaagcaguccacccucaagcucgccaccggcaugcgcaacguccccgagaagcagacccgcggcaucuucggcgccaucgccggcuucaucgagaacggcugggagggcaugaaggacggcugguacggcuuccgccaccagaacuccgagggccgcggccaggccgccgaccucaaguccacccaggccgccaucgaccagaucaacggcaagcucaaccgccucaucggcaagaccaacgagaaguuccaccagaucgagaaggaguucuccgaggucgagggccgcauccaggaccucgagaaguacgucgaggacaccaagaucgaccucugguccuacaacgccgagcuccucgucgcccucgagaaccagcacaccaucgaccucaccgacuccgagaugaacaagcucuucgagaagaccaagaagcagcuccgcgagaacgccgaggacaugggcaacggcugcuucaagaucuaccacaagugcgacaacgccugcaucggcuccauccgcaacggcaccuacgaccacgacgucuaccgcgacgaggcccucaacaaccgcuuccagaucaagggcgucgagcucaaguccggcuacaaggacuggauccucuggaucuccuucgccaucuccugcuuccuccucugcgucgcccuccucggcuucaucaugugggccugccagaagggcaacauccgcugcaacaucugcaucuga

SEQ ID NO: 108492 - RNA, 1701 nt, Artificial Sequence
  derived and/or modified CDS sequence (opt2) from hemagglutinin__InfluenzaA__AIC73838
augaagaccaucaucgcccucuccuacauccucugccucgucuucgcccagaagcuccccggcaacgacaacuccaccgccacccucugccucggccaccacgccguccccaacggcaccaucgucaagaccaucaccaacgaccgcaucgaggucaccaacgccaccgagcucguccagaacuccuccaucggcgagaucugcaacuccccccaccagauccucgacggcgagaacugcacccucaucgacgcccuccucggcgacccccagugcgacggcuuccagaacaagaagugggaccucuucgucgagcgcuccaaggccuacuccaacugcuaccccuacgacguccccgacuacgccucccuccgcucccucgucgccuccuccggcacccucgaguucaacaacgaguccuucaacugggccggcgucacccagaacggcaccuccuccgccugcauccgcggcuccaacuccuccuucuucucccgccucaacuggcucacccacuccaacuucaaguaccccgcccucaacgucaccaugcccaacaacgagcaguucgacaagcucuacaucuggggcguccaccaccccggcaccgacaaggaccagaucuuccucuacgcccaguccuccggccgcaucaccgucuccaccaagcgcucccagcaggccgucauccccaacaucggcucccgcccccgcauccgcaacauccccucccgcaucuccaucuacuggaccaucgucaagcccggcgacauccuccucaucaacuccaccggcaaccucaucgccccccgcggcuacuucaagauccgcuccggcaaguccuccaucaugcgcuccgacgcccccaucggcaagugcaaguccgagugcaucacccccaacggcuccauccccaacgacaagcccuuccagaacgucaaccgcaucaccuacggcgccugcccccgcuacgucaagcaguccacccucaagcucgccaccggcaugcgcaacguccccgagaagcagacccgcggcaucuucggcgccaucgccggcuucaucgagaacggcugggagggcaugauggacggcugguacggcuuccgccaccagaacuccgagggccgcggccaggccgccgaccucaaguccacccaggccgccaucgaccagaucaacggcaagcucaaccgccucaucggcaagaccaacgagaaguuccaccagaucgagaaggaguucuccgaggucgagggccgcauccaggaccucgagaaguacgucgaggacaccaagaucgaccucugguccuacaacgccgagcuccucgucgcccucgagaaccagcacaccaucgaccucaccgacuccgagaugaacaagcucuucgagaagaccaagaagcagcuccgcgagaacgccgaggaccucggcaacggcugcuucaagaucuaccacaagugcgacaacgccugcaucggcuccauccgcaacggcaccuacgaccacgacgucuaccgcgacgaggcccucaacaaccgcuuccagaucaagggcgucgagcucaaguccggcuacaaggacuggauccucuggaucuccuucgccaucuccugcuuccuccucugcgucgcccuccucggcuucaucaugugggccugccagaagggcaacauccgcugcaacaucugcaucuga

SEQ ID NO: 108493 - RNA, 1701 nt, Artificial Sequence
  derived and/or modified CDS sequence (opt2) from hemagglutinin__InfluenzaA__AIC73839
augaaggccauccucgucguccuccucuacaccuucgccaccgccaacgccgacacccucugcaucggcuaccacgccaacaacuccaccgacaccgucgacaccguccucgagaagaacgucaccgucacccacuccgucaaccuccucgaggacaagcacaacggcaagcucugcaagcuccgcggcgucgccccccuccaccucggcaagugcaacaucgccggcuggauccucggcaaccccgagugcgagucccucuccaccgccuccuccugguccuacaucgucgagaccuccuccuccgacaacggcaccugcuaccccggcgacuucaucaacuacgaggagcuccgcgagcagcucuccuccgucuccuccuucgagcgcuucgagaucuuccccaagaccuccuccuggcccgaccacgacuccaacaagggcgucaccgccgccugcccccacgccggcgccaaguccuucuacaagaaccucaucuggcucgucaagaagggcaacuccuaccccaagcucucccaguccuacaucaacgacaagggcaaggagguccucguccucuggggcauccaccaccccuccaccaccgccgaccagcagucccucuaccagaacgccgacgccuacgucuucgucggcaccucccgcuacuccaagaaguucaagcccgagaucgccauccgccccaagguccgcgaccaggagggccgcaugaacuacuacuggacccucgucgagcccggcgacaagaucaccuucgaggccaccggcaaccucgucgucccccgcuacgccuucaccauggagcgcaacgccggcuccggcaucaucaucuccgacacccccguccacgacugcaacaccaccugccagacccccgagggcgccaucaacaccucccuccccuuccagaacauccaccccaucaccaucggcaagugccccaaguacgucaaguccaccaagcuccgccucgccaccggccuccgcaacguccccuccauccagucccgcggccucuucggcgccaucgccggcuucaucgagggcggcuggaccggcauggucgacggcugguacggcuaccaccaccagaacgagcagggcuccggcuacgccgccgaccucaaguccacccagaacgccaucgacaagaucaccaacaaggucaacuccgucaucgagaagaugaacacccaguucaccgccgucggcaaggaguucaaccaccucgagaagcgcaucgagaaccucaacaagaaggucgacgacggcuuccucgacaucuggaccuacaacgccgagcuccucguccuccucgagaacgagcgcacccucgacuaccacgacuccaacgucaagaaccucuacgagaagguccgcaaccagcucaagaacaacgccaaggagaccggcaacggcugcuucgaguucuaccacaagugcgacaacaccugcauggaguccgucaagaacggcaccuacgacuaccccaaguacuccgaggaggccaagcucaaccgcgagaagaucgacggcgucaagcucgaguccacccgcaucuaccagauccucgccaucuacuccaccgucgccuccucccucguccucgucgucucccucggcgccaucuccuucuggaugugcuccaacggcucccuccagugccgcaucugcaucuga

SEQ ID NO: 108494 - RNA, 1701 nt, Artificial Sequence; identical to SEQ ID NO: 106076
  derived and/or modified CDS sequence (opt2) from hemagglutinin__InfluenzaA__AIC73840

SEQ ID NO: 108495 - RNA, 1701 nt, Artificial Sequence
  derived and/or modified CDS sequence (opt2) from hemagglutinin__InfluenzaA__AIC73841
augaaggccauccucgucguccuccucuacaccuucgccaccgccaacgccgacacccucugcaucggcuaccacgccaacaacuccaccgacaccgucgacaccguccucgagaagaacgucaccgucacccacuccgucaaccuccucgaggacaagcacaacggcaagcucugcaagcuccgcggcgucgccccccuccaccucggcaagugcaacaucgccggcuggauccucggcaaccccgagugcgagucccucuccaccgccuccuccugguccuacaucgucgagaccuccuccuccgacaacggcaccugcuaccccggcgacuucaucaacuacgaggagcuccgcgagcagcucuccuccgucuccuccuucgagcgcuucgagaucuuccccaagaccuccuccuggcccaaccacgacuccaacaagggcgucaccgccgccugcccccacgccggcgccaaguccuucuacaagaaccucaucuggcucgucaagaagggcaacuccuaccccaagcucucccaguccuacaucaacgacaagggcaaggagguccucguccucuggggcauccaccaccccuccaccaucgccgaccagcagucccucuaccagaacgccgacgccuacgucuucgucggcaccucccgcuacuccaagaaguucaagcccgagaucgccauccgccccaagguccgcgaccaggagggccgcaugaacuacuacuggacccucgucgagcccggcgacaagaucaccuucgaggccaccggcaaccucgucgucccccgcuacgccuucaccauggagcgcaacgccggcuccggcaucaucaucuccgacacccccguccacgacugcaacaccaccugccagacccccgagggcgccaucaacaccucccuccccuuccagaacauccaccccaucaccaucggcaagugccccaaguacgucaaguccaccaagcuccgccucgccaccggccuccgcaacauccccuccauccagucccgcggccucuucggcgccaucgccggcuucaucgagggcggcuggaccggcauggucgacggcugguacggcuaccaccaccagaacgagcagggcuccggcuacgccgccgaccucaaguccacccagaacgccaucgacaagaucaccaacaaggucaacuccgucaucgagaagaugaacacccaguucaccgccgucggcaaggaguucaaccaccucgagaagcgcaucgagaaccucaacaagaaggucgacgacggcuuccucgacaucuggaccuacaacgccgagcuccucguccuccucgagaacgagcgcacccucgacuaccacgacuccaacgucaagaaccucuacgagaagguccgcaaccagcucaagaacaacgccaaggagaucggcaacggcugcuucgaguucuaccacaagugcgacaacaccugcauggaguccgucaagaacggcaccuacgacuaccccaaguacuccgaggaggccaagcucaaccgcgagaagaucgacggcgucaagcucgaguccacccgcaucuaccagauccucgccaucuacuccaccgucgccuccucccucguccucgucgucucccucggcgccaucuccuucuggaugugcuccaacggcucccuccagugccgcaucugcaucuga

SEQ ID NO: 108496 - RNA, 1701 nt, Artificial Sequence; identical to SEQ ID NO: 108491
  derived and/or modified CDS sequence (opt2) from hemagglutinin__InfluenzaA__AIC73842

SEQ ID NO: 108497 - RNA, 1707 nt, Artificial Sequence
  derived and/or modified CDS sequence (opt2) from hemagglutinin__InfluenzaA__AID48082
auggagaagaucguccuccucuucgccaucgucucccucgucaaguccgaccagaucugcaucggcuaccacgccaacaacuccaccgagcaggucgacaccaucauggagaagaacgucaccgucacccacgcccaggacauccucgagaagacccacaacggcaagcucugcgaccucgacggcgucaagccccucauccuccgcgacugcuccgucgccggcuggcuccucggcaaccccaugugcgacgaguucaucaacguccccgagugguccuacaucgucgagaaggccaaccccgucaacgaccucugcuaccccggcgacuucaacgacuacgaggagcucaagcaccuccucucccgcaucaaccacuucgagaagauccagaucauccccaaguccuccugguccucccacgaggccucccucggcgucuccuccgccugccccuaccagggcaaguccuccuucuuccgcaacgucgucuggcucaucaagaagaacuccaccuaccccaccaucaagcgcuccuacaacaacaccaaccaggaggaccuccucguccucuggggcauccaccaccccaacgacgccgccgagcagaccaagcucuaccagaaccccaccaccuacaucuccgucggcaccuccacccucaaccagcgccucgucccccgcaucgccacccgcuccaaggucaacggccaguccggccgcauggaguucuucuggaccauccucaagcccaacgacgccaucaacuucgaguccaacggcaacuucaucgcccccgaguacgccuacaagaucgucaagaagggcgacuccaccaucaugaaguccgagcucgaguacggcaacugcaacaccaagugccagacccccaugggcgccaucaacuccuccaugcccuuccacaacauccacccccucaccaucggcgagugccccaaguacgucaaguccaaccgccucguccucgccaccggccuccgcaacuccccccagcgcgagcgccgccgcaagaagcgcggccucuucggcgccaucgccggcuucaucgagggcggcuggcagggcauggucgacggcugguacggcuaccaccacuccaacgagcagggcuccggcuacgccgccgacaaggaguccacccagaaggccaucgacggcgucaccaacaaggucaacuccaucaucgacaagaugaacacccaguucgaggccgucggccgcgaguucaaccaccucgagcgccgcaucgagaaccucaacaagaagauggaggacggcuuccucgacgucuggaccuacaacgccgagcuccucguccucauggagaacgagcgcacccucgacuuccacgacuccaacgucaagaaccucuacgacaagguccgccuccagcuccgcgacaacgccaaggagcucggcaacggcugcuucgaguucuaccacaagugcgacgacgagugcauggaguccguccgcaacggcaccuacgacuacccccaguacuccgaggaggcccgccucaagcgcgaggagaucuccggcgucaagcucgaguccaucggcaucuaccagauccucuccaucuacuccaccgucgccuccucccucgcccucgccaucauggucgccggccucucccucuggaugugcuccaacggcucccuccagugccgcaucugcaucuga

SEQ ID NO: 108498 - RNA, 1701 nt, Artificial Sequence
  derived and/or modified CDS sequence (opt2) from hemagglutinin__InfluenzaA__AID70444
augaaggccguccucgucguccuccucuacaccuucgccaccgccaacgccgacacccucugcaucggcuaccacgccaacaacuccaccgacaccgucgacaccguccucgagaagaacgucaccgucacccacuccgucaaccuccucgaggacaagcacaacggcaagcucugcaagcuccgcggcgucgccccccuccaccucggcaagugcaacaucgccggcuggauccucggcaaccccgagugcgagucccucgccaccgccuccuccugguccuacaucgucgagaccuccaacuccgacaacggcaccugcuaccccggcgacuucaucgacuacgaggagcuccgcgagcagcucuccuccgucuccuccuucgagcgcuucgagaucuuccccaagaccuccuccuggcccaaccacgacuccaacaagggcgucaccgccgccugcccccacgccggcgccaaguccuucuacaagaaccucaucuggcucgucaagaagggcaacuccuaccccaagcucuccaaguccuacaucaacgacaagggccgcgagguccucguccucuggggcauccaccaccccuccaccuccgccgaccagcagucccucuaccagaacgccgacaccuacgucuucgucggcaccucccgcuacuccaagaaguucaagcccgagaucgccauccgccccaagguccgcgaccaggagggccgcaugaacuacuacuggacccucgucgagcccggcgacaagaucaccuucgaggccaccggcaaccucgucgucccccgcuacgccuucgccauggagcgcaacgccggcuccggcaucaucaucuccgacacccccguccacgacugcaacaccaccugccagacccccaagggcgccaucaacaccucccuccccuuccagaacauccaccccaucaccaucggcaagugccccaaguacgucaaguccaccaagcuccgccucgccaccggccuccgcaacguccccuccauccagucccgcggccucuucggcgccaucgccggcuucaucgagggcggcuggaccggcauggucgacggcugguacggcuaccaccaccagaacgagcagggcuccggcuacgccgccgaccucaaguccacccagaacgccaucgacgagaucaccaacaaggucaacuccgucaucgagaagaugaacacccaguucaccgccgucggcaaggaguucaaccaccucgagaagcgcaucgagaaccucaacaagaaggucgacgacggcuuccucgacaucuggaccuacaacgccgagcuccucgucguccucgagaacgagcgcacccucgaguaccacgacuccaacgucaagaaccucuacgagaagguccgcucccaggucaagaacaacgccaaggagaucggcaacggcugcuucgaguucuaccacaagugcgacaacaccugcauggaguccgucaagaacggcaccuacgacuaccccaaguacuccgaggaggccaagcucaaccgcgaggagaucgacggcgucaagcucgaguccacccgcaucuaccagauccucgccaucuacuccaccgucgccuccucccucguccucgucgucucccucggcgccaucuccuucuggaugugcuucaacggcucccuccagugccgcaucuacaucuga

SEQ ID NO: 108499 - RNA, 1701 nt, Artificial Sequence
  derived and/or modified CDS sequence (opt2) from hemagglutinin__InfluenzaA__AID70445
augaaggccauccucgucguccuccucuacaccuucgccaccgccaacgccgacacccucugcaucggcuaccacgccaacaacuccaccgacaccgucgacaccguccucgagaagaacgucaccgucacccacuccgucaaccuccucgaggacaagcacaacggcaagcucugcaagcuccgcggcgucgccccccuccaccucggcaagugcaacaucgccggcuggauccucggcaaccccgagugcgagucccucuccaccgccuccuccugguccuacaucgucgagaccuccuccuccgacaacggcaccugcuaccccggcgacuucaucgacuacgaggagcuccgcgagcagcucuccuccgucuccuccuucgagcgcuucgagaucuuccccaagaccuccuccuggcccaaccacgacuccaacaagggcgucaccgccgccugcccccacgccggcgccaaguccuucuacaagaaccucaucuggcucgucaagaagggcaacuccuaccccaagcucuccaaguccuacaucaacgacaagggcaaggagguccucguccucuggggcauccaccaccccuccaccaccgccgaccagcagucccucuaccagaacgccgacaccuacgucuucgucggcaccucccgcuacuccaagaaguucaagcccgagaucgccauccgccccaagguccgcgaccaggagggccgcaugaacuacuacuggacccucgucgagcccggcgacaagaucaccuucgaggccaccggcaaccucgucgucccccgcuacgccuucgccauggagcgcaacgccggcuccggcaucaucaucuccgacacccccguccacgacugcaacaccaccugccagacccccaagggcgccaucaacaccucccuccccuuccagaacauccaccccaucaccaucggcaagugccccaaguacgucaaguccaccaagcuccgccucgccaccggccuccgcaacguccccuccauccagucccgcggccucuucggcgccaucgccggcuucaucgagggcggcuggaccggcauggucgacggcugguacggcuaccaccaccagaacgagcagggcuccggcuacgccgccgaccucaaguccacccagaacgccaucgacaagaucaccaacaaggucaacuccgucaucgagaagaugaacacccaguucaccgccgucggcaaggaguucaaccaccucgagaagcgcaucgagaaccucaacaagaaggucgacgacggcuuccucgacaucuggaccuacaacgccgagcuccucgucguccucgagaacgagcgcacccucgaguaccacgacuccaacgucaagaaccucuacgagaagguccgcaaccagcucaagaacaacgccaaggagaucggcaacggcugcuucgaguucuaccacaagugcgacaacaccugcauggaguccgucaagaacggcaucuacgacuaccccaaguacuccgaggaggccaagcucaaccgcgaggagaucgacggcgucaagcucgaguccacccgcaucuaccagauccucgccaucuacuccaccgucgccuccucccucguccaggucgucucccucggcgccaucuccuucuggaugugcuucaacggcucccuccagugccgcaucugcaucuga

SEQ ID NO: 108500 - RNA, 1701 nt, Artificial Sequence
  derived and/or modified CDS sequence (opt2) from hemagglutinin__InfluenzaA__AID70446
augaaggccguccucgucguccuccucuacaccuucgccaccgccaacgccgacacccucugcaucggcuaccacgccaacaacuccaccgacaccgucgacaccguccucgagaagaacgucaccgucacccacuccgucaaccuccucgaggacaagcacaacggcaagcucugcaagcuccgcggcgucgccccccuccaccucggcaagugcaacaucgccggcuggauccucggcaaccccgagugcgagucccucuccaccgccuccuccugguccuacaucgucgagaccuccuccuccgacaacggcaccugcuaccccggcgacuucaucgacuacgaggagcuccgcgagcagcucuccuccgucuccuccuucgagcgcuucgagaucuuccccaagaccuccuccuggcccaaccacgacuccaacaagggcgucaccgccgccugcccccacgccggcgccaaguccuucuacaagaaccucaucuggcucgucaagaagggcaacuccuaccccaagcucuccaaguccuacaucaacgacaagggcaaggagauccucguccucuggggcauccaccaccccuccaccaccgccgaccagcagucccucuaccagaacgccgacaccuacgucuucgucggcaccucccgcuacuccaagaaguucaagcccgagaucgccauccgccccaagguccgcgaccaggagggccgcaugaacuacuacuggacccucgucgagcccggcgacaagaucaccuucgaggccaccggcaaccucgucgucccccgcuacgccuucgccauggagcgcaacgccggcuccggcaucaucaucuccggcacccccguccacgacugcaacaccaccugccagacccccaagggcgccaucaacaccucccuccccuuccagaacauccaccccaucaccaucggcaagugccccaaguacgucaaguccaccaagcuccgccucgccaccggccuccgcaacguccccuccauccagucccgcggccucuucggcgccaucgccggcuucaucgagggcggcuggaccggcauggucgacggcugguacggcuaccaccaccagaacgagcagggcuccggcuacgccgccgaccucaaguccacccagaacgccaucgacaagaucaccaacaaggucaacuccgucaucgagaagaugaacacccaguucaccgccgucggcaaggaguucaaccaccucgagaagcgcaucgagaaccucaacaagaaggucgacgacggcuuccucgacaucuggaccuacaacgccgagcuccucgucguccucgagaacgagcgcacccucgaguaccacgacuccaacgucaagaaccucuacgagaagguccgcaaccagcucaagaacaacgccaaggagaucggcaacggcugcuucgaguucuaccacaagugcgacaacaccugcauggaguccgucaagaacggcaucuacgacuaccccaaguacuccgaggaggccaagcucaaccgcgaggagaucgacggcgucaagcucgaguccacccgcaucuaccagauccucgccaucuacuccaccgucgccuccucccucguccaggucgucucccucggcgccaucuccuucuggaugugcuucaacggcucccuccagugccgcaucugcaucuga

SEQ ID NO: 108501 - RNA, 1701 nt, Artificial Sequence
  derived and/or modified CDS sequence (opt2) from hemagglutinin__InfluenzaA__AID70447
augaaggccauccucgucguccuccucuacaccuucgccaccgccaacgccgacacccucugcaucggcuaccacgccaacaacuccaccgacaccgucgacaccguccucgagaagaacgucaccgucacccacuccgucaaccuccucgaggacaagcacaacggcaagcucugcaagcuccgcggcgucgccccccuccaccucggcaagugcaacaucgccggcuggauccucggcaaccccgagugcgagucccucuccaccgccuccuccugguccuacaucgucgagaccuccuccuccgacaacggcaccugcuaccccggcgacuucaucgacuacgaggagcuccgcgagcagcucuccuccgucuccuccuucgagcgcuucgagaucuuccccaagaccuccuccuggcccaaccacgacuccaacaagggcgucaccgccgccugcccccaggccggcgccaagggcuucuacaagaaccuccucuggcucgucaagaagggcaacuccuaccccaagcucuccaaguccuacaucaacgacaagggcaaggagguccucguccucuggggcauccaccaccccuccaccaccgccgaccagcagucccucuaccagaacgccgacaccuacgucuucgucggcaccucccgcuacuccaagaaguucaagcccgagaucgccauccgccccaagguccgcgaccaggagggccgcaugaacuacuacuggacccucgucgagcccggcgacaagaucaccuucgaggccaccggcaaccucgucgucccccgcuacgccuucgccauggagcgcaacgccggcuccggcaucaucaucuccgacacccccguccacgacugcaacaccaccugccagacccccaagggcgccaucaacaccucccuccccuuccagaacauccaccccaucaccaucggcaagugccccaaguacgucaaguccaccaagcuccgccucgccaccggccuccgcaacguccccuccauccagucccgcggccucuucggcgccaucgccggcuucaucgagggcggcuggaccggcauggucgacggcugguacggcuaccaccaccagaacgagcagggcuccggcuacgccgccgaccucaaguccacccagaacgccaucgacaagaucaccaacaaggucaacuccgucaucgagaagaugaacacccaguucaccuccgucggcaaggaguucaaccaccucgagaagcgcauggagaaccucaacaagaaggucgacgacggcuuccucgacaucuggaccuacaacgccgagcuccucgucguccucgagaacgagcgcacccucgaguaccacgacuccaacgucaagaaccucuacgagaagguccgcaaccagcucaagaacaacgccaaggagaucggcaacggcugcuucgaguucuaccacaagugcgacaacaccugcauggaguccgucaagaacggcaucuacgacuaccccaaguacuccgaggaggccaagcucaaccgcgaggagaucgacggcgucaagcucgaguccacccgcaucuaccagauccucgccaucuacuccaccgucgccuccucccucguccucgucgucucccucggcgccaucuccuucuggaugugcuucaacggcucccuccagugccgcaucugcaucuga

SEQ ID NO: 108502 - RNA, 1701 nt, Artificial Sequence
  derived and/or modified CDS sequence (opt2) from hemagglutinin__InfluenzaA__AID70448
augaaggccauccucgucguccuccucuacaccuucgccaccgccaacgccgacacccucugcaucggcuaccacgccaacaacuccaccgacaccgucgacaccguccucgagaagaacgucaccgucacccacuccgucaaccuccucgaggacaagcacaacggcaagcucugcaagcuccgcggcgucgccccccuccaccucggcaagugcaacaucgccggcuggauccucggcaaccccgagugcgagucccucuccaccgccuccuccugguccuacaucgucgagaccuccuccuccgacaacggcaccugcuaccccggcgacuucaucgacuacgaggagcuccgcgagcagcucuccuccgucuccuccuucgagcgcuucgagaucuuccccaagaccuccuccuggcccaaccacgacuccaacaagggcgucaccgccgccugcccccacgccggcgccaagggcuucuacaagaaccucaucuggcucgucaagaagggcaacuccuaccccaagcucuccaaguccuacaucaacgacaagggcaaggagguccucguccucuggggcauccaccaccccuccaccaccgccgaccagcagucccucuaccagaacgccgacaccuacgucuucgucggcaccucccgcuacuccaagaaguucaagcccgagaucgccauccgccccaagguccgcgaccaggagggccgcaugaacuacuacuggacccucgucgagcccggcgacaagaucaccuucgaggccaccggcaaccucgucgucccccgcuacgccuucaccauggagcgcgacgccggcuccggcaucaucaucuccgacacccccguccacgacugcaacaccaccugccagacccccaagggcgccaucaacaccucccuccccuuccagaacauccaccccaucaccaucggcaagugccccaaguacgucaaguccaccaagcuccgccucgccaccggccuccgcaacguccccuccauccagucccgcggccucuucggcgccaucgccggcuucaucgagggcggcuggaccggcauggucgacggcugguacggcuaccaccaccagaacgagcagggcuccggcuacgccgccgaccucaaguccacccagaacgccaucgacaagaucaccaacaaggucaacuccgucaucgagaagaugaacacccaguucaccgccgucggcaaggaguucaaccaccucgagaagcgcaucgagaaccucaacaagaaggucgacgacggcuuccucgacaucuggaccuacaacgccgagcuccucgucguccucgagaacgagcgcacccucgaguaccaggacuccaacgucaagaaccucuacgagaagguccgcaaccagcucaagaacaacgccaaggagaucggcaacggcugccucgaguucuaccacaaguucgacaacaccugcauggaguccgucaagaacggcaccuacgacuaccccaaguacuccgaggaggccaagcucaaccgcgagaagaucgacggcgucaagcucgaguccacccgcaucuaccagauccucgccaucuacuccaccgucgccuccucccucguccucgucgucucccucggcaccaucuccuucuggaugugcuucaacggcucccuccagugccgcaucugcaucuga

SEQ ID NO: 108503 - RNA, 1701 nt, Artificial Sequence
  derived and/or modified CDS sequence (opt2) from hemagglutinin__InfluenzaA__AID70449
augaaggccauccucgucguccuccucuacaccuucgccaccgccaacgccgacacccucugcaucggcuaccacgccaacaacuccaccgacaccgucgacaccguccucgagaagaacgucaccgucacccacuccgucaaccuccucgaggacaagcacaacggcaagcucugcaagcuccgcggcgucgccccccuccaccucggcaagugcaacaucgccggcuggauccucggcaaccccgagugcgagucccucuccaccgccuccuccugguccuacaucgucgagaccuccuccuccgacaacggcaccugcuaccccggcgacuucaucgacuacgaggagcuccgcgagcagcucuccuccgucuccuccuucgagcgcuucgagaucuuccccaagaccuccuccuggcccaaccacgacuccaacaagggcgucaccgccgccugcccccacgccggcgccaaguccuucuacaagaaccucaucuggcucgucaagaagggcaacuccuaccccaagcucuccaaguccuacaucaacgacaagggcaaggagguccucguccucuggggcauccaccaccccuccaccaccgccgaccagcagucccucuaccagaacgccgacaccuacgucuucgucggcaccucccgcuacuccaagaaguucaagcccgagaucgccauccgccccaagguccgcgaccaggagggccgcaugaacuacuacuggacccucgucgagcccggcgacaagaucaccuucgaggccaccggcaaccucgucgucccccgcuacgccuucgccauggagcgcaacgccggcuccggcaucaucaucuccgacacccccguccacgacugcaacaccaccugccagacccccaagggcgccaucaacaccucccuccccuuccagaacauccaccccaucaccaucggcaagugccccaaguacgucaaguccaccaagcuccgccucgccaccggccuccgcaacguccccuccauccagucccgcggccucuucggcgccaucgccggcuucaucgagggcggcuggaccggcauggucgacggcugguacggcuaccaccaccagaacgagcagggcuccggcuacgccgccgaccucaaguccacccagaacgccaucgacaagaucaccaacaaggucaacuccgucaucgagaagaugaacacccaguucaccgccgucggcaaggaguucaaccaccucgagaagcgcaucgagaaccucaacaagaaggucgacgacggcuuccucgacaucuggaccuacaacgccgagcuccucgucguccucgagaacgagcgcacccucgaguaccacgacuccaacgucaagaaccucuacgagaagguccgcaaccagcucaagaacaacgccaaggagaucggcaacggcugcuucgaguucuaccacaagugcgacaacaccugcauggaguccgucaagaacggcaccuacgacuaccccaaguacuccgaggaggccaagcucaaccgcgaggagaucgacggcgucaagcucgaguccacccgcaucuaccagauccucgccaucuacuccaccgucgccuccucccucguccucgucgucucccucggcgccaucuccuucuggaugugcuucaacggcucccuccagugccgcaucugcgucuga

SEQ ID NO: 108504 - RNA, 1701 nt, Artificial Sequence
  derived and/or modified CDS sequence (opt2) from hemagglutinin__InfluenzaA__AID70450
augaaggccauccucgucguccuccucuacaccuucgccaccgccaacgccgacacccucugcaucggcuaccacgccaacaacuccaccgacaccgucgacaccguccucgagaagaacgucaccgucacccacuccgucaaccuccucgaggacaagcacaacggcaagcucugcaagcuccgcggcgucgccccccuccaccucggcaagugcaacaucgccggcuggauccucggcaaccccgagugcgagucccucuccaccgccuccuccugguccuacaucgucgagaccuccuccuccgacaacggcaccugcuaccccggcgacuucaucgacuacgaggagcuccgcgagcagcucuccuccgucuccuccuucgagcgcuucgagaucuuccccaagaccuccuccuggcccaaccacgacuccaacaagggcgucaccgccgccugcccccacgccggcgccaagggcuucuacaagaaccucaucuggcucgucaagaagggcaacuccuaccccaagcucuccaaguccuacaucaacgacaagggcaaggagguccucguccucuggggcauccaccaccccuccaccaccgccgaccagcagucccucuaccagaacgccgacaccuacgucuucgucggcaccucccgcuacuccaagaaguucaagcccgagaucgccauccgccccaagguccgcgaccaggagggccgcaugaacuacuacuggacccucgucgagcccggcgacaagaucaccuucgaggccaccggcaaccucgucgucccccgcuacgccuucgccauggagcgcgacgccggcuccggcaucaucaucuccgacacccccguccacgacugcaacaccaccugccagaccuccaagggcgccaucaacaccucccuccccuuccagaacauccaccccaucaccaucggcaagugccccaaguacgucaaguccaccaagcuccgccucgccaccggccuccgcaacguccccuccauccagucccgcggccucuucggcgccaucgccggcuucaucgagggcggcuggaccggcauggucgacggcugguacggcuaccaccaccagaacgagcagggcuccggcuacgccgccgaccucaaguccacccagaacgccaucgacaagaucaccaacaaggucaacuccgucaucgagaagaugaacacccaguucaccgccgucggcaaggaguucaaccaccucgagaagcgcaucgagaaccucaacaagaaggucgacgacggcuuccucgacaucuggaccuacaacgccgagcuccucgucguccucgagaacgagcgcacccucgaguaccacgacuccaacgucaagaaccucuacgagaagguccgcaaccagcucaagaacaacgccaaggagaucggcaacggcugcuucgaguucuaccacaaguucgacaacaccugcauggaguccgucaagaacggcaccuacgacuaccccaaguacuccgaggaggccaagcucaaccgcgagaagaucgacggcgucaagcucgaguccacccgcaucuaccagauccucgccaucuacuccaccgucgccuccucccucguccaggucgucucccucggcgccaucuccuucuggaugugcuucaacggcucccuccagugccgcaucugcaucuga

SEQ ID NO: 108505 - RNA, 1701 nt, Artificial Sequence
  derived and/or modified CDS sequence (opt2) from hemagglutinin__InfluenzaA__AID70451
augaaggccauccucgucgucaugcucuacaccuucgccaccgccaacgccgacacccucugcaucggcuaccacgccaacaacuccaccgacaccgucgacaccguccucgagaagaacgucaccgucacccacuccgucaaccuccucgaggacaagcacaacggcaagcucugcaagcuccgcggcgucgccccccuccaccucggcaagugcaacaucgccggcuggauccucggcaaccccgagugcgagucccucuccaccgccuccuccugguccuacaucgucgagaccuccuccuccgacaacggcaccugcuaccccggcgacuucaucgacuacgaggagcuccgcgagcagcucuccuccgucuccuccuucgagcgcuucgagaucuuccccaagaccuccuccuggcccaaccacgacuccaacaagggcgucaccgccgccugcccccacgccggcgccaagggcuucuacaagaaccucaucuggcucgucaagaagggcaacuccuaccccaagcucuccaaguccuacaucaacgacaagggcaaggagguccucguccucuggggcauccaccaccccuccaccaccgccgaccagcagucccucuaccagaacgccgacaccuacgucuucgucggcaccucccgcuacuccaagaaguucaagcccgagaucgccauccgccccaagguccgcgaccaggagggccgcaugaacuacuacuggacccucgucgagcccggcgacaagaucaccuucgaggccaccggcaaccucgucgucccccgcuacgccuucgccauggagcgcaacgccggcuccggcaucaucaucuccgacacccccguccacgacugcaacaccaccugccagacccccaagggcgccaucaacaccucccuccccuuccagaacauccaccccaucaccaucggcaagugccccaaguacgucaaguccaccaagcuccgccucgccaccggccuccgcaacguccccuccauccagucccgcggccucuucggcgccaucgccggcuucaucgagggcggcuggaccggcauggucgacggcugguacggcuaccaccaccagaacgagcagggcuccggcuacgccgccgaccucaaguccacccagaacgccaucgacaagaucaccaacaaggucaacuccgucaucgagaagaugaacacccaguucaccgccgucggcaaggaguucaaccaccucgagaagcgcaucgagaaccucaacaagaaggucgacgacggcuuccucgacaucuggaccuacaacgccgagcuccucgucguccucgagaacgagcgcacccucgaguaccacgacuccaacgucaagaaccucuacgagaagguccgcaaccagcucaagaacaacgccaaggagaucggcaacggcugcuucgaguucuaccacaaguucgacaacaccugcauggaguccgucaagaacggcaccuacgacuaccccaaguacuccgaggaggccaagcucaaccgcgaggagaucgacggcgucaagcucgaguccacccgcaucuaccagauccucgccaucuacuccaccgucgccuccucccucguccucgucgucucccucggcgccaucuccuucuggaugugcuucaacggcucccuccagugccgcaucugcaucuga

SEQ ID NO: 108506 - RNA, 1701 nt, Artificial Sequence
  derived and/or modified CDS sequence (opt2) from hemagglutinin__InfluenzaA__AID70452
augaaggccauccucgucguccuccucuacaccuucgccaccgccaacgccgacacccucugcaucggcuaccacgccaacaacuccaccgacaccgucgacaccguccucgagaagaacgucaccgucacccacuccgucaaccuccucgaggacaagcacaacggcaagcucugcaagcuccgcggcgucgccccccuccaccucggcaagugcaacaucgccggcuggauccucggcaaccccgagugcgagucccucuccaccgccuccuccugguccuacaucgucgagaccuccuccuccgacaacggcaccugcuaccccggcgacuucaucgacuacgaggagcuccgcgagcagcucggcuccgucuccuccuucaagcgcuucgagaucuuccccaagaccuccuccuggcccaaccacgacuccaacaagggcgucaccgccgccugcccccacgccggcgccaagggcuucuacaagaaccucaucuggcucgucaagaagggcaacuccuaccccaagcucuccaaguccuacaucaacgacaagggcaaggagguccucguccucuggggcauccaccaccccuccaccaccgccgaccagcagucccucuaccagaacgccgacaccuacgucuucgucggcaccucccgcuacuccaagaaguucaagcccgagaucgccauccgccccaagguccgcgaccaggagggccgcaugaacuacuacuggacccucgucgagcccggcgacaagaucaccuucgaggccaccggcaaccucgucgucccccgcuacgccuucgccauggagcgcgacgccggcuccggcaucaucaucuccgacacccccguccacgacugcaacaccaccugccagacccccaagggcgccaucaacaccucccuccccuuccagaacauccaccccaucaccaucggcaagugccccaaguacgucaaguccaccaagcuccgccucgccaccggccuccgcaacguccccuccauccagucccgcggccucuucggcgccaucgccggcuucaucgagggcggcuggaccggcauggucgacggcugguacggcuaccaccaccagaacgagcagggcuccggcuacgccgccgaccucaaguccacccagaacgccaucgacaagaucaccaacaaggucaacuccgucaucgagaagaugaacacccaguucaccgccgucggcaaggaguucaaccaccucgagaagcgcaucgagaaccucaacaagaaggucgacgacggcuuccucgacaucuggaccuacaacgccgagcuccucgucguccucgagaacgagcgcacccucgaguaccacgacuccaacgucaagaaccucuacgagaagguccgcaaccagcucaagaacaacgccaaggagaucggcaacggcugcuucgaguucuaccacaagugcgacaacaccugcauggaguccgucaagaacggcaucuacgacuaccccaaguacuccgaggaggccaagcucaaccgcgagaagaucgacggcgucaagcucgaguccacccgcaucuaccagauccucgccaucuacuccaccgucgccuccucccucguccucgucgucucccucggcgccaucuccuucuggaugcgcuucaacggcucccuccagugcuccaucugcaucuga

SEQ ID NO: 108507 - RNA, 1701 nt, Artificial Sequence
  derived and/or modified CDS sequence (opt2) from hemagglutinin__InfluenzaA__AID70453
augaaggccauccucgucguccuccucuacaccuucgccaccgccaacgccgacacccucugcaucggcuaccacgccaacaacuccaccgacaccgucgacaccguccucgagaagaacgucaccgucacccacuccgucaaccuccucgaggacaagcacaacggcaagcucugcaagcuccgcggcgucgccccccuccaccucggcaagugcaacaucgccggcuggauccucggcaaccccgagugcgagucccucuccaccgccuccuccugguccuacaucgucgagaccuccuccuccgacaacggcaccugcuaccccggcgacuucaucgacuacgaggagcuccgcgagcagcucuccuccgucuccuccuucgagcgcuucgagaucuuccccaagaccuccuccuggcccaaccacgacuccaacaagggcgucaccgccgccugcccccacgccggcgccaagggcuucuacaagaaccucaucuggcucgucaagaagggcaacuccuaccccaagcucuccaaguccuacaucaacgacaagggcaaggagguccucguccucuggggcauccaccaccccuccaccaccgccgaccagcagucccucuaccagaacgccgacaccuacgucuucgucggcaccucccgcuacuccaagaaguucaagcccgagaucgccauccgccccaagguccgcgaccaggagggccgcaugaacuacuacuggacccucgucgagcccggcgacaagaucaccuucgaggccaccggcaaccucgucgucccccgcuacgccuucgccauggagcgcgacgccggcuccggcaucaucaucuccgacacccccguccaggacugcaacaccaccugccagacccccaagggcgccaucaacaccucccuccccuuccagaacauccaccccaucaccaucggcaagugccccaaguacgucaaguccaccaagcuccgccucgucaccggccuccgcaacguccccuccauccagucccgcggccucuucggcgccaucgccggcuucaucgagggcggcuggaccggcauggucgacggcugguacggcuaccaccaccagaacgagcagggcuccggcuacgccgccgaccucaaguccacccagaacgccaucgacaagaucaccaacaaggucaacuccgucaucgagaagaugaacacccaguucaccgccgucggcaaggaguucaaccaccucgagaagcgcaucgagaaccucaacaagaaggucgacgacggcuuccucgacaucuggaccuacaacgccgagcuccucgucguccucgagaacgagcgcacccucgaguaccacgacuccaaccucaagaaccucuacgagaagguccgcaaccagcucaagaacaacgccaaggagaucggcaacggcugcuucgaguucuaccacaaguucgacaacaccugcauggaguccgucaagaacggcaccuacgacuaccccaaguacuccgaggaggccaagcucaaccgcgaggagaucgacggcgucaagcucgaguccacccgcaucuaccagauccucgccaucuacuccaccgucgccuccucccucguccaggucgucucccucggcgccaucuccuucuggaugcgcuucaacggcucccuccacugccgcaucugcaucuga

SEQ ID NO: 108508 - RNA, 1701 nt, Artificial Sequence
  derived and/or modified CDS sequence (opt2) from hemagglutinin__InfluenzaA__AID70454
augaaggccauccucgucguccuccucuacaccuucgccaccgccaacgccgacacccucugcaucggcuaccacgccaacaacuccaccgacaccgucgacaccguccucgagaagaacgucaccgucacccacuccgucaaccuccucgaggacaagcacaacggcaagcucugcaagcuccgcggcgucgccccccuccaccucggcaagugcaacaucgccggcuggauccucggcaaccccgagugcgagucccucuccaccgccuccuccugguccuacaucgucgagaccuccuccuccgacaacggcaccugcuaccccggcgacuucaucaacuacgaggagcuccgcgagcagcucuccuccgucuccuccuucgagcgcuucgagaucuuccccaagaccuccuccuggcccaaccacgacuccaacaagggcgucaccgccgccugcccccacgccggcgccaaguccuucuacaagaaccucaucuggcucgucaagaagggcaacuccuaccccaagcucuccaaguccuacaucaacgacaagggcaaggagguccucguccucuggggcauccaccaccccuccaccaccgccgaccagcagucccucuaccagaacgccgacgccuacgucuucgucggcaccucccgcuacuccaagaaguucaagcccgagaucgccauccgccccaagguccgcgaccaggagggccgcaugaacuacuacuggacccucgucgagcccggcgacaagaucaccuucgaggccaccggcaaccucgucgucccccgcuacgccuucgccauggagcgcaacgccggcuccggcaucaucaucuccgacacccccguccacgacugcaacaccaccugccagacccccaagggcgccaucaacaccucccuccccuuccagaacauccaccccaucaccaucggcaagugccccaaguacgucaaguccaccaagaugcgccucgccaccggccuccgcaacguccccugcauccagucccgcggccucuucggcgccaucgccggcuucaucgagggcggcuggaccggcauggucgacggcugguacggcuaccaccaccagaacgagcagggcuccggcuacgccgccgaccucaaguccacccagaacgccaucgacaagaucaccaacaaggucaacuccgucaucgagaagaugaacacccaguucaccgccgucggcaaggaguucaaccaccucgagaagcgcaucgagaaccucaacaagaaggucgacgacggcuuccucgacaucuggaccuacaacgccgagcuccucgucguccucgagaacgagcgcacccucgacuaccacgacuccaacgucaagaaccucuacgagaagguccgcaaccagcucaagaacaacgccaaggagaucggcaacggcugcuucgaguucuaccacaagugcgacaacaccugcauggaguccgucaagaacggcaccuacgacuaccccaaguacuccgaggaggccaagcucaaccgcgaggagaucgacggcgucaagcucgaguccacccgcaucuaccagauccucgccaucuacuccaccgucgccuccucccucguccucgucgucucccucggcgccaucuccuucuggaugugcuccaacggcucccuccagugccgcaucugcaucuga

SEQ ID NO: 108509 - RNA, 1701 nt, Artificial Sequence
  derived and/or modified CDS sequence (opt2) from hemagglutinin__InfluenzaA__AID70455
augaaggccauccucgucguccuccucuacaccuucgccaccgccaacgccgacacccucugcaucggcuaccacgccaacaacuccaccgacaccgucgacaccguccucgagaagaacgucaccgucacccacuccgucaaccuccucgaggacaagcacaacggcaagcucugcaagcucggcggcgucgccccccuccaccucggcaagugcaacaucgccggcuggauccucggcaaccccgagugcgagucccucuccaccgccuccuccugguccuacaucgucgagaccuccuccuccgacaacggcaccugcuaccccggcgacuucaucgacuacgaggagcuccgcgagcagcucuccuccgucuccuccuucgagcgcuucgagaucuuccccaagaccuccuccuggcccaaccacgacuccaacaagggcgucaccgccgccugcccccacgccggcgccaagggcuucuacaagaaccucaucuggcucgucaagaagggcaacuccuaccccaagaucuccaaguccuacaucaacgacaagggcaaggagguccucguccucuggggcauccaccaccccuccaccaccgccgaccagcagucccucuaccagaacgccgacaccuacaucuucgucggcaccucccgcuacuccaagaaguucaagcccgagaucgccauccgccccaagguccgcgaccaggagggccgcaugaacuacuacuggacccucgucgagcccggcgacaagaucaccuucgaggccaccggcaaccucgucgucccccgcuacgccuucgccauggagcgcgacgccggcuccggcaucaucaucuccgacacccccguccacgacugcaacaccaccugccagacccccaagggcgccaucaacaccucccuccccuuccagaacauccaccccaucaccaucggcaagugccccaaguacgucaaguccaccaagcuccgccucgccaccggccuccgcaacguccccuccauccagucccgcggccucuucggcgccaucgccggcuucaucgagggcggcuggaccggcauggucgacggcugguacggcuaccaccaccagaacgagcagggcuccggcuacgccgccgaccucaaguccacccagaacgccaucgacaagaucaccaacaaggucaacuccgucaucaagaagaugaacacccaguucaccgccgucggcaaggaguucaaccaccucgagaagcgcaucgagaaccucaacaagaaggucgacgacggcuuccucgacaucuggaccuacaacgccgagcuccucgucguccucgagaacgagcgcacccucgaguaccacgacuccaacgucaagaaccucuacgagaagguccgcaaccagcucaagaacaacgccaaggagaucggcaacggcugcuucgaguucuaccacaaguucgacaacaccugcauggaguccgucaagaacggcaccuacgacuaccccaaguacuccgaggaggccaagcucaaccgcgaggagaucgacggcgucaagcucgaguccacccgcaucuaccagauccucgccaucuacuccaccgucgccuccucccucguccucgucgucucccucggcgccaucuccuucuggaugugcuucaacggcucccuccagugccgcaucugcaucuga

SEQ ID NO: 108510 - RNA, 1701 nt, Artificial Sequence
  derived and/or modified CDS sequence (opt2) from hemagglutinin__InfluenzaA__AID70456
augaaggccauccucgucguccuccucuacaccuucgccaccgccaacgccgacacccucugcaucggcuaccacgccaacaacuccaccgacaccgucgacaccguccucgagaagaacgucaccgucacccacuccgucaaccuccucgaggacaagcacaacggcaagcucugcaagcuccgcggcgucgccccccuccaccucggcaagugcaacaucgccggcuggauccucggcaaccccgagugcgagucccucuccaccgccuccuccugguccuacaucgucgagaccuccuccuccgacaacggcaccugcuaccccggcgacuucaucgacuacgaggagcuccgcgagcagcucuccuccgucuccuccuucgagcgcuucgagaucuuccccaagaccuccuccuggcccaaccacgacuccaacaagggcgucaccgccgccugcccccacgccggcgccaaguccuucuacaagaaccucaucuggcucgucaagaagggcaacuccuaccccaagcucuccaaguccuacaucaacgacaagggcaaggagguccucguccucuggggcauccaccaccccuccaccaccgccgaccagcagucccucuaccagaacgccgacaccuacgucuucgucggcaccucccgcuacuccaagaaguucaagcccgagaucgccauccgccccaagguccgcgaccaggagggccgcaugaacuacuacuggacccucgucgagcccggcgacaagaucaccuucgaggccaccggcaaccucgucgucccccgcuacgccuucgccauggagcgcaacgccggcuccggcaucaucaucuccgacacccccguccacgacugcaacaccaccugccagacccccaagggcgccaucaacaccucccuccccuuccagaacauccaccccaucaccaucggcaagugccccaaguacgucaaguccaccaagcuccgccucgccaccggccuccgcaacguccccuccauccagucccgcggccucuucggcgccaucgccggcuucaucgagggcggcuggaccggcauggucgacggcugguacggcuaccaccaccagaacgagcagggcuccggcuacgccgccgaccucaaguccacccagaacgccaucgacaagaucaccaacaaggucaacuccgucaucgagaagaugaacacccaguucaccgccgucgucaaggaguucaaccaccucgagaagcgcaucgagaaccucaacaagaaggucgacgacggcuuccucgacaucuggaccuacaacgccgagcuccucgucguccucgagaacgagcgcacccucgaguaccacgacuccaaccucaagaaccucuacgagaagguccgcaaccagcucaagaacaacgccaaggagaucggcaacggcugcuucgaguucuaccacaaguucgacaacaccugcauggaguccgucaagaacggcaccuacgacuaccccaaguacuccgaggaggccaagcucaaccgcgaggagaucgacggcgucaagcucgaguccacccgcaucuaccagauccucgccaucuacuccaccgucgccuccucccucguccaggucgucucccucggcgccaucuccuucuggaugugcuucaacggcucccuccagugccgcaucugcaucuga

SEQ ID NO: 108511 - RNA, 1701 nt, Artificial Sequence
  derived and/or modified CDS sequence (opt2) from hemagglutinin__InfluenzaA__AID70457
augaaggccauccucgucguccuccucuacaccuucgccaccgccaacgccgacacccucugcaucggcuaccacgccaacaacuccaccgacaccgucgacaccguccucgagaagaacgucaccgucacccacuccgucaaccuccucgaggacaagcacaacggcaagcucugcaagcuccgcggcgucgccccccuccaccucggcaagugcaacaucgccggcuggauccucggcaaccccgagugcgagucccucuccaccgccuccuccugguccuacaucgucgagaccuccuccuccgacaacggcaccugcuaccccggcgacuucaucgacuacgaggagcuccgcgagcagcucuccuccgucuccuccuucgagcgcuucgagaucuuccccaagaccuccuccuggcccaaccacgacuccaacaagggcgucaccgccgccugcccccacgccggcgccaagggcuucuacaagaaccucaucuggcucgucaagaagggcaacuccuaccccaagcucuccaaguccuacaucaacgacaagggcaaggagguccucguccucuggggcauccaccaccccuccaccaccgccgaccagcagucccucuaccagaacgccgacaccuacgucuucgucggcaccucccgcuacuccaagaaguucaagcccgagaucgccauccgccccaagguccgcgaccaggagggccgcaugaacuacuacuggacccucgucgagcccggcgacaagaucaccuucgaggccaccggcaaccucgucgucccccgcuacgccuucgccauggagcgcgacgccggcuccggcaucaucaucuccgacacccccguccacgacugcaacaccaccugccagacccccaagggcgccaucaacaccucccuccccuuccagaacauccaccccaucaccaucggcaagugccccaaguacgucaaguccaccaagcuccgccucgccaccggccuccgcaacguccccuccauccagucccgcggccucuucggcgccaucgccggcuucaucgagggcggcuggaccggcauggucgacggcugguacggcuaccaccaccagaacgagcagggcuccggcuacgccgccgaccucaaguccacccagaacgccaucgacaagaucaccaacaaggucaacuccgucaucgagaagaugaacacccaguucaccgccgucggcaaggaguucaaccaccucgagaagcgcaucgagaaccucaacaagaaggucgacgacggcuuccucgacaucuggaccuacaacgccgagcuccucgucguccucgagaacgagcgcacccucgaguaccacgacuccaacgucaagaaccucuacgagaagguccgcaaccagcucaagaacaacgccaaggagaucggcaacggcugcuucgaguucuaccacaaguucgacaacaccugcauggaguccgucaagaacggcaccuacgacuaccccaaguacuccgaggaggccaagcucaaccgcgagaagaucgacggcgucaagcucgaguccacccgcaucuaccagauccucgccaucuacuccaccgucgccuccucccucguccaggucgucucccucggcgccaucuccuucuggaagugcuucaacggcucccuccagugccgcaucugcuccuga

SEQ ID NO: 108512 - RNA, 1701 nt, Artificial Sequence
  derived and/or modified CDS sequence (opt2) from hemagglutinin__InfluenzaA__AID70458
augaagaccaucaucgcccucuccuacauccucugccucgucuucgcccagaaguuccccggcaacgacaacuccauggccacccucugccucggccaccacgccguccccaacggcaccauggucaagaccaucaccaacgaccagaucgaggucaccaacgccaccgagcucguccaguccuccuccaccggcggcaucugcaacuccccccaccagauccucgacggcggcaacugcacccucaucgacgcccuccucggcgacccccagugcgacggcuuccagaacaagaagugggaccucuucgucgagcgcuccaaggccuacuccaacugcuaccccuacgacguccccgacuacgccucccuccgcuccaucgucgccuccuccggcacccucgaguucaacaacgaguccuucaacuggaccggcgucacccagaacggcaaguccgccuccugcaagcgcggcuccgacaacuccuucuucucccgccucaacuggcucacccaccucaacuacaaguaccccgcccucaaggucaccaugcccaacaacgagaaguucgacaagcucuacaucuggggcguccaccaccccggcaccuacaacgaccagaucucccucuacgcccaggccuccggcaucaucaccgucuccaccaagcgcaaccagcagaccgucauccccaacaucggcucccgcccccgcguccgcgacauccccucccgcaucuccaucuacuggaccaucgucaagcccggcgacauccuccucaucaacuccaccggcaaccucaucgccccccgcggcuacuucaagauccaguccggcaaguccuccaucaugcgcuccgacgcccccaucggcaagugcaacuccgagugcaucacccccaacggcuccauccccaacgacaagcccuuccagaacgucaaccgcaucaccuacggcgccugcccccgcuacgucaagcagaacacccucaagcucgccaccggcaugcgcaacguccccgagaagcagacccgcggcaucuucggcgccaucgccggcuucaucgagaacggcugggagggcauggucgacggcugguacggcuuccgccaccagaacuccgagggcaugggccaggccgccgaccucaaguccacccaggccgccaucaaccagaucaacggcaagcucaaccgccucaucggcaagaccaucgagaaguuccaccagaucgagaaggaguucuccgaggucgagggccgcauccaggaccucgagaaguacgucgaggacaccaagaucgaccucugguccuacaacgccgagcuccucgucgcccucgagaaccagcacaccaucgaccucaccgacuccgagauggacaagcucuucgagcgcaccaagaagcagaugcgcgagaacgccgaggacaugggcaacggcugcuucaagaucuaccacaagugcgacaacgccugcaucggcuccauccgcaacggcaucuacgaccgcgacaucuaccgcgacgaggcccucuccaaccgcuuccagaucaagggcgucgagcucaaggccggcuacaaggacuggauccucuggaucuccuucgccaucuccugcuuccuccucugcgucguccuccucggcuucaucaugugggccugccagaagggcaaccuccgcugcaacaucugcaucuga

SEQ ID NO: 108513 - RNA, 1701 nt, Artificial Sequence
  derived and/or modified CDS sequence (opt2) from hemagglutinin__InfluenzaA__AID70459
augaagaccaucaucgcccucuccuacauccucugccucgucuucgcccagaagguccccggcaacgacaacuccaccgccacccucugccucggccaccacgccguccccaacggcaccaucgucaagaccaucaccaacgaccagaucgaggucaccaacgccaccgagcucguccaguccuccuccaccggcgagaucugcaacuccccccaccagauccucgacggcgagaacugcacccucaucgacgcccuccucggcgacccccagugcgacggcuuccagaacaagaagugggaccucuucgucgagcgcuccaaggcccacuccaacugcuaccccuacgacguccccgacuacgccucccuccgcucccucgucgccuccuccggcacccucgaguucaacaacgaguccuucaacuggaccggcgucacccagaacggcaccuccuccgccugcauccgccgcuccaacaacuccuucuucucccgccucaacuggcucacccaccucaacuucaaguaccccgcccucaacgucaccaugcccaacaacgagcaguucgacaagcucuacaucuggggcguccaccaccccggcaccgacaaggaccagaucuuccucuacgcccaggccuccggccgcaucaccgucuccaccaagaagucccagcaggccgucauccccaacaucggcucccgcccccgcguccgcaacauccccucccgcgucuccaucuacuggaccaucgucaagcccggcgacauccuccucaucaacuccaccggcaaccucaucgccccccgcggcuacuucaagauccgcuccggcaaguccuccaucaugcgcuccgacgcccccaucggcaagugcaacuccgccugcaucacccccaacggcuccauccccaacgacaagcccuuccagaacgucaaccgcaucaccuacggcgccugcccccgcuacgucaagcagaacacccucaagcucgcccccggcaugcgcaacguccccgagaagcagacccgcggcaucuucggcgccaucgccggcuucaucgagaacggcugggagggcauggucgacggcugguacggcuuccgccaccagaacuccgagggccgcggccaggccgccgaccucaaguccacccaggccgccaucgaccagaucaacggcaagcucaaccgccucaucggcaagaccaucgagaaguuccaccagaucgagaacgaguucuccgaggucgagggccgcauccaggaccucgagaaguacgucgaggacaccaagaucgaccucugguccuacaucgccgagcuccucgucgcccucgagaaccagcacaccaucgaccucaccgacuccgagaugaacaagcucuucgagaagaccaagaagcagcuccgcgagaacgccgaggacaugggcaacggcugcuucaagaucuaccacaagugcgacaacgccugcaucggcuccauccgcaacggcaucuacgaccacgacgucuaccgcgacgaggcccucaacaaccgcuuccagaucaagggcgucgagcucaaguccggcuacaaggacuggauccucuggaucuccuucgccaucuccugcuuccuccucugcgucgcccuccucggcuucaucaugugggccugccagaagggcaacauccgcugcaacaucugcaucuga

SEQ ID NO: 108514 - RNA, 1701 nt, Artificial Sequence
  derived and/or modified CDS sequence (opt2) from hemagglutinin__InfluenzaA__AID70460
augaagaccaucaucgcccucuccuacauccucugccucgucuucgcccagaagcuccccggcaacgacaacuccaccgccacccucugccucggccaccacgccguccccaacggcaccaucgucaagaccaucaccaacgaccagaucgaggucaccaacgccaccgagcucguccaguccuccuccaccggcgagaucugcaacuccccccaccagauccucgacggcgagaacugcacccucaucgacgcccuccucggcgacccccagugcgacggcuuccagaacaagaagugggaccucuucgucgagcgcuccaaggcccacuccaacugcuaccccuacgacguccccgacuacgccucccuccgcucccucgucgccuccuccggcacccucgaguucaacaacgaguccuucaacuggaccggcgucacccagaacggcaccuccuccgccugcauccgccgcuccaacaacuccuucuucucccgccucaacuggcucacccaccucaacuucaaguaccccgcccucaacgucaccaugcccaacaacgagcaguucgacaagcucuacaucuggggcguccaccaccccggcaccgacaaggaccagaucuuccucuacgcccaggccuccggccgcaucaccgucuccaccaagaagucccagcaggccgucauccccaacaucggcucccgcccccgcguccgcaacauccccucccgcgucuccaucuacuggaccaucgucaagcccggcgacauccuccucaucaacuccaccggcaaccucaucgccccccgcggcuacuucaagauccgcuccggcaaguccuccaucaugcgcuccgacgcccccaucggcaagugcaacuccgccugcaucacccccaacggcuccauccccaacgacaagcccuuccagaacgucaaccgcaucaccuacggcgccugcccccgcuacgucaagcagaacacccucaagcucgccaccggcaugcgcaacguccccgagaagcagacccgcggcaucuucggcgccaucgccggcuucaucgagaacggcugggagggcauggucgacggcugguacggcuuccgccaccagaacuccgagggccgcggccaggccgccgaccucaaguccacccaggccgccaucgaccagaucaacggcaagcucaaccgccucaucggcaagaccaucgagaaguuccaccagaucgagaaggaguucuccgaggucgagggccgcauccaggaccucgagaaguacgucgaggacaccaagaucgaccucugguccuacaacgccgagcuccucgucgcccucgagaaccagcacaccaucgaccucaccgacuccgagaugaacaagcucuucgagaagaccaagaagcagcuccgcgagaacgccgaggacaugggcaacggcugcuucaagaucuaccacaagugcgacaacgccugcaucggcuccauccgcaacggcaucuacgaccacgacgucuaccgcgacgaggcccucaacaaccgcuuccagaucaagggcgucgagcucaaguccggcuacaaggacuggauccucuggaucuccuucgccaucuccugcuuccuccucugcgucgcccuccucggcuucaucaugugggccugccagaagggcaacauccgcugcaacaucugcaucuga

SEQ ID NO: 108515 - RNA, 1701 nt, Artificial Sequence
  derived and/or modified CDS sequence (opt2) from hemagglutinin__InfluenzaA__AID70461
augaagaccaucaucgcccucuccuacauccucugccucgucuucgcccagaagcuccccggcaacgacaacuccaccgccacccucugccucggccaccacgccguccccaacggcaccaucgucaagaccaucaccaacgaccagaucgaggucaccaacgccaccgagcucguccaguccuccuccaccggcgagaucugcaacuccccccaccagauccucgacggcgagaacugcacccucaucgacgcccuccucggcgacccccagugcgacggcuuccagaacaagaagugggaccucuucgucgagcgcuccaaggcccacuccaacugcuaccccuacgacguccccgacuacgccucccuccgcucccucgucgccuccuccggcacccucgaguucaacaacgaguccuucaacuggaccggcgucacccagaacggcaccuccuccgccugcauccgccgcuccaacaacuccuucuucucccgccucaacuggcucacccaccucaacuucaaguaccccgcccucaacgucaccaugcccaacaacgagcaguucgacaagcucuacaucuggggcguccaccaccccggcaccgacaaggaccagaucuuccucuacgcccaggccuccggccgcaucaccgucuccaccaagaagucccagcaggccgucauccccaacaucggcucccgcccccgcguccgcaacauccccucccgcgucuccaucuacuggaccaucgucaagcccggcgacauccuccucaucaacuccaccggcaaccucaucgccccccgcggcuacuucaagauccgcuccggcaaguccuccaucaugcgcuccgacgcccccaucggcaagugcaacuccgagugcaucacccccaacggcuccauccccaacgacaagcccuuccagaacgucaaccgcaucaccuacggcgccugcccccgcuacgucaagcagaacacccucaagcucgccaccggcaugcgcaacguccccgagaagcagacccgcggcaucuucggcgccaucgccggcuucaucgagaacggcugggagggcauggucgacggcugguacggcuuccgccaccagaacuccgagggccgcggccaggccgccgaccucaaguccacccaggccgccaucgaccagaucaacggcaagcucaaccgccucaucggcaagaccaucgagaaguuccaccagaucgagaaggaguucuccgaggucgagggccgcauccaggaccucgagaaguacaucgaggacaccaagaucgaccucugguccuacaacgccgagcuccucgucgcccucgagaaccagcacaccaucgaccucaccgacuccgagaugaacaagcucuucgagaagaccaagaagcagcuccgcgagaacgccgaggacaugggcaacggcugcuucaagaucuaccacaagugcgacaacgccugcaucggcuccauccgcaacggcaucuacgaccacgacgucuaccgcgacgaggcccucaacaaccgcuuccagaucaagggcgucgagcucaaguccggcuacaaggacuggauccucuggaucuccuucgccaucuccugcuuccuccucugcgucgcccuccucggcuucaucaugugggccugccagaagggcaacauccgcugcaucaccugcaucuga

SEQ ID NO: 108516 - RNA, 1701 nt, Artificial Sequence
  derived and/or modified CDS sequence (opt2) from hemagglutinin__InfluenzaA__AID70463
augaagaccaucaucgcccucuccuacauccucugccucgucuucgcccagaagauccccggcaacgacaacuccaccgccacccucugccucggccaccacgccguccccaacggcaccaucgucaagaccaucaccaacgaccagaucgaggucaccaacgccaccgagcucguccaguccuccuccaccggcgagaucugcaacuccccccaccagauccucgacggcgagaacugcacccucaucgacgcccuccucggcgacccccagugcgacggcuuccagaacaagaagugggaccucuucgucgagcgcuccaaggcccacuccaacugcuaccccuacgacguccccgacuacgccucccuccgcucccucgucgccuccuccggcacccucgaguucaacaacgaguccuucaacuggaccggcgucacccagaacggcaccuccuccgccugcauccgccgcuccaacaacuccuucuucucccgccucaacuggcucacccaccucaacuucaaguaccccgcccucaacgucaccaugcccaacaacgagcaguucgacaagcucuacaucuggggcguccaccaccccggcaccgacaaggaccagaucuuccucuacgcccaggccuccggccgcaucaccgucuccaccaagaagucccagcaggccgucauccccaacaucggcucccgcccccgcguccgcaacauccccucccgcgucuccaucuacuggaccaucgucaagcccggcgacauccuccucaucaacuccaccggcaaccucaucgccccccgcggcuacuucaagauccgcuccggcaaguccuccaucaugcgcuccgacgcccccaucggcaagugcaacuccgccugcaucacccccaacggcuccauccccaacgacaagcccuuccagaacgucaaccgcaucaccuacggcgccugcccccgcuacgucaagcagaacacccucaagcucgccaccggcaugcgcaacguccccgagaagcagacccgcggcaucuucggcgccaucgccggcuucaucgagaacggcugggagggcauggucgacggcugguacggcuuccgccaccagaacuccgagggccgcggccaggccgccgaccucaaguccacccaggccgccaucgaccagaucaacggcaagcucaaccgccucaucggcaagaccaucgagaaguuccaccagaucgagaaggaguucuccgaggucgagggccgcauccaggaccucgagaaguacgucgaggacaccaagaucgaccucugguccuacaacgccgagcuccucgucgcccucgagaaccagcacaccaucgaccucaccgacuccgagaugaacaagcucuucgagaagaccaagaagcagcuccgcgagaacgccgaggacaugggcaacggcugcuucaagaucuaccacaagugcgacaacgccugcaucggcuccauccgcaacggcaucuacgaccacgacgucuaccgcgacgaggcccucaacaaccgcuuccagaucaagggcgucgagcucaaguccggcuacaaggacuggauccucuggaucuccuucgccaucuccugcuuccuccucugcgucgcccuccucggcuucaucaugugggccugccagaagggcaacauccgcugcaacaucugcaucuga

SEQ ID NO: 108517 - RNA, 1701 nt, Artificial Sequence
  derived and/or modified CDS sequence (opt2) from hemagglutinin__InfluenzaA__AID70464
augaagaccaucaucgcccucuccuacauccucugccucgucuucgcccagaagcuccccggcgacgacaacuccaccgccacccucugccucggccaccacgccguccccaacggcaccaucgucaagaccaucaccaacgaccagaucgaggucaccaacgccaccgagcucguccaguccuccuccaccggcgagaucugcaacuccccccaccagauccucgacggcgagaacugcacccucaucgacgcccuccucggcgacccccagugcgacggcuuccagaacaagaagugggaccucuucgucgagcgcuccaaggcccacuccaacugcuaccccuacgacguccccgacuacgccucccuccgcucccucgucgccuccuccggcacccucgaguucaacaacgaguccuucaacuggaccggcgucacccagaacggcaccuccuccgccugcauccgccgcuccaacaacuccuucuucucccgccucaacuggcucacccaccucaacuucaaguaccccgcccucaacgucaccaugcccaacaacgagcaguucgacaagcucuacaucuggggcguccaccaccccggcaccgacaaggaccagaucuuccucuacgcccaggccuccggccgcaucaccgucuccaccaagaagucccagcaggccgucauccccaacaucggcucccgcccccgcguccgcaacauccccucccgcgucuccaucuacuggaccaucgucaagcccggcgacauccuccucaucaacuccaccggcaaccucaucgccccccgcggcuacuucaagauccgcuccggcaaguccuccaucaugcgcuccgacgcccccaucggcaagugcaacuccgccugcaucacccccaacggcuccauccccaacgacaagcccuuccagaacgucaaccgcaucaccuacggcgccugcccccgcuacgucaagcagaacacccucaagcucgccaccggcaugcgcaacguccccgagaagcagacccgcggcaucuucggcgccaucgccggcuucaucgagaacggcugggagggcauggucgacggcugguacggcuuccgccaccagaacuccgagggccgcggccaggccgccgaccucaaguccacccaggccgccaucgaccagaucaacggcaagcucaaccgccucaucggcaagaccaucgagaaguuccaccagaucgagaaggaguucuccgaggucgagggccgcauccaggaccucgagaaguacgucgaggacaccaagaucgaccucugguccuacaacgccgagcuccucgucgcccucgagaaccagcacaccaucgaccucaccgacuccgagaugaacaagcucuucgagaagaccaagaagcagcuccgcgagaacgccgaggacaugggcaacggcugcuucaagaucuaccacaagugcgacaacgccugcaucggcuccauccgcaacggcaccuacgaccacgacgucuaccgcgacgaggcccucaacaaccgcuuccagaucaagggcgucgagcucaaguccggcuacaaggacuggauccucuggaucuccuucgccaucuccugcuuccuccucugcgucgcccuccucggcuucaucaugugggccugccagaagggcaacauccgcugcaacaucugcaucuga

SEQ ID NO: 108518 - RNA, 1701 nt, Artificial Sequence
  derived and/or modified CDS sequence (opt2) from hemagglutinin__InfluenzaA__AID70465
augaagaccaucaucgcccucuccuacauccucugccucgucuucgcccagaagcuccccggcgacgacaacuccaccgccacccucugccucggccaccacgccguccccaacggcaccaucgucaagaccaucaccaacgaccagaucgaggucaccaacgccaccgagcucguccaguccuccuccaccggcgagaucugcaacuccccccaccagauccucgacggcgagaacugcacccucaucgacgcccuccucggcgacccccagugcgacggcuuccagaacaagaagugggaccucuucgucgagcgcuccaaggcccacuccaacugcuaccccuacgacguccccgacuacgccucccuccgcucccucgucgccuccuccggcacccucgaguucaacaacgaguccuucaacuggaccggcgucacccagaacggcaccuccuccgccugcauccgccgcuccaacaacuccuucuucucccgccucaacuggcucacccaccucaacuucaaguaccccgcccucaacgucaccaugcccaacaacgagcaguucgacaagcucuacaucuggggcguccaccaccccggcaccgacaaggaccagaucuuccucuacgcccaggccuccggccgcaucaccgucuccaccaagaagucccagcaggccgucauccccaacaucggcucccgcccccgcguccgcaacauccccucccgcgucuccaucuacuggaccaucgucaagcccggcgacauccuccucaucaacuccaccggcaaccucaucgccccccgcggcuacuucaagauccgcuccggcaaguccuccaucaugcgcuccgacgcccccaucggcaagugcaacuccgccugcaucacccccaacggcuccauccccaacgacaagcccuuccagaacgucaaccgcaucaccuacggcgccugcccccgcuacgucaagcagaacacccucaagcucgccaccggcaugcgcaacguccccgagaagcagacccgcggcaucuucggcgccaucgccggcuucaucgagaacggcugggagggcauggucgacggcugguacggcuuccgccaccagaacuccgagggccgcggccaggccgccgaccucaaguccacccaggccgccaucgaccagaucaacggcaagcucaaccgccucaucggcaagaccaucgagaaguuccaccagaucgagaaggaguucuccgaggucgagggccgcauccaggaccucgagaaguacgucgaggacaccaagaucgaccucugguccuacaacgccgagcuccucgucgcccucgagaaccaccacgccaucgaccucaccgacuccgagaugaacaagcucuucgagaagaccaagaagcagaugcgcgagaacgccgaggacaugggcaacggcugcuucaagaucuaccucaagugcgacaacgccugcaucggcuccauccgcaacggcaucuacgaccacgacgucuaccgcgacgaggcccucaacaaccgcuuccagaucaagggcgucgagcucaaguccggcuacaaggacuggauccucuggaucuccuucaccgaguccugcuuccuccucugcgucgcccuccucggcuucaucaugugggccugccagaagggcaacauccgcugcaacaucugcaucuga

SEQ ID NO: 108519 - RNA, 1701 nt, Artificial Sequence
  derived and/or modified CDS sequence (opt2) from hemagglutinin__InfluenzaA__AID70466
augaagaccaucaucgcccucuccuacauccucugccucgucuucgcccagaagcuccccggcaacgacaacuccaccgccacccucugccucggccaccacgccguccccaacggcaccaucgucaagaccaucaccaacgaccagaucgaggucaccaacgccaccgagcucguccaguccuccuccaccggcgagaucugcaacuccccccaccagauccucgacggcgagaacugcacccucaucgacgcccuccucggcgacccccagugcgacggcuuccagaacaagaagugggaccucuucgucgagcgcuccaaggcccacuccaacugcuaccccuacgacguccccgacuacgccucccuccgcucccucgucgccuccuccggcacccucgaguucaacaacgaguccuucaacuggaccggcgucacccagaacggcaccuccuccgccugcauccgccgcuccaacaacuccuucuucucccgccucaacuggcucacccaccucaacuucaaguaccccgcccucaacgucaccaugcccaacaacgagcaguucgacaagcucuacaucuggggcguccaccaccccggcaccgacaaggaccagaucuuccucuacgcccaggccuccggccgcaucaccgucuccaccaagaagucccagcaggccgucauccccaacaucggcucccgcccccgcguccgcaacauccccucccgcgucuccaucuacuggaccaucgucaagcccggcgacauccuccucaucaacuccaccggcaaccucaucgccccccgcggcuacuucaagauccgcuccggcaaguccuccaucaugcgcuccgacgcccccaucggcaagugcaacuccgccugcaucacccccaacggcuccauccccaacgacaagcccuuccagaacgucaaccgcaucaccuacggcgccugcccccgcuacgucaagcagaacacccucaagcucgccaccggcaugcgcaacguccccgagaagcagacccgcggcaucuucggcgccaucgccggcuucaucgagaacggcugggagggcauggucgacggcugguacggcuuccgccaccagaacuccgagggccgcggccaggccgccgaccucaaguccacccaggccgccaucgaccagaucaacggcaagcucaaccgccucaucggcaagaccaucgagaaguuccaccagaucgagaacgaguucuccgaggucgagggccgcauccaggaccucgagaaguacgucgaggacaccaagaucgaccucugguccuacaucggcgagcuccucgucgcccucgagaaccagcacaccaucgaccucaccgacuccgagaugaacaagcucuucgagaagaccaagaagcagcuccgcgagaacgccgaggacaugggcaacggcugcuucaagaucuaccacaagugcgacaacgccugcaucggcuccauccgcaacggcaucuacgaccacgacgucuaccgcgacgaggcccucaacaaccgcuuccagaucaagggcgucgagcucaaguccggcuacaaggacuggauccucuggaucuccuucgccaucuccugcuuccuccucugcgucgcccuccucggcuucaucaugugggccugccagaagggcaacauccgcugcaacaucugcaucuga

SEQ ID NO: 108520 - RNA, 1701 nt, Artificial Sequence
  derived and/or modified CDS sequence (opt2) from hemagglutinin__InfluenzaA__AID70467
augaagaccaucaucgcccucuccuacauccucugccucgucuucgcccagaagcuccccggcaacgacaacuccaccgccacccucugccucggccaccacgccguccccaacggcaccaucgucaagaccaucaccaacgaccagaucgaggucaccaacgccaccgagcucguccaguccuccuccaccggcgagaucugcaacuccccccaccagauccucgacggcgagaacugcacccucaucgacgcccuccucggcgacccccagugcgacggcuuccagaacaagaagugggaccucuucgucgagcgcuccaaggcccacuccaacugcuaccccuacgacguccccgacuacgccucccuccgcucccucgucgccuccuccggcacccucgaguucaacaacgaguccuucaacuggaccggcgucacccagaacggcaccuccuccgccugcauccgccgcuccaacaacuccuucuucucccgccucaacuggcucacccaccucaacuucaaguaccccgcccucaacgucaccaugcccaacaacgagcaguucgacaagcucuacaucuggggcguccaccaccccggcaccgacaaggaccagaucuuccucuacgcccaggccuccggccgcaucaccgucuccaccaagaagucccagcaggccgucauccccaacaucggcucccgcccccgcguccgcaacauccccucccgcgucuccaucuacuggaccaucgucaagcccggcgacauccuccucaucaacuccaccggcaaccucaucgccccccgcggcuacuucaagauccgcuccggcaaguccuccaucaugcgcuccgacgcccccaucggcaagugcaacuccgccugcaucacccccaacggcuccauccccaacgacaagcccuuccagaacgucaaccgcaucaccuacggcgccugcccccgcuacgucaagcagaacacccucaagcucgccaccggcaugcgcaacguccccgagaagcagacccgcggcaucuucggcgccaucgccggcuucaucgagaacggcugggagggcauggucgacggcugguacggcuuccgccaccagaacugcgagggccgcggccaggccgccgaccucaaguccacccaggccgccaucgaccagaucaacggcaagcucaaccgccucaucggcaagaccaucgagaaguuccaccagaucgagaacgaguucuccgaggucgagggccgcauccagggccucgagaaguacgucgaggacaccaagaucgaccucugguccuacaucgccgagcucaucgucgcccucgagaaccagcacaccaucgaccucaccgacuccgagaugaacaagcucuucgagaagaccaagaagcagaugcgcgagaacgccgaggacaugggcaacggcugcuucaagaucuaccacaagugcgacaacgccugcaucggcuccauccgcaacggcaucuacgaccacgacgucuaccgcgacgaggcccucaacaaccgcuuccagaucaagggcgucgagcucaaguccggcuacaaggacuggauccucuggaucuccuucgccaucuccugcuuccuccucugcgucgcccuccucggcuucaucaugugggccugccagaagggcaacauccgcugcaacaucugcaucuga

SEQ ID NO: 108521 - RNA, 1701 nt, Artificial Sequence
  derived and/or modified CDS sequence (opt2) from hemagglutinin__InfluenzaA__AID70468
augaagaccaucaucgcccucuccuacauccucugccucgucuucgcccagaagcuccccggcaacgacaacuccaccgccacccucugccucggccaccacgccguccccaacggcaccaucgucaagaccaucaccaacgaccagaucgaggucaccaacgccaccgagcucguccaguccuccuccaccggcgagaucugcaacuccccccaccagauccucgacggcgagaacugcacccucaucgacgcccuccucggcgacccccagugcgacggcuuccagaacaagaagugggaccucuucgucgagcgcuccaaggcccacuccaacugcuaccccuacgacguccccgacuacgccucccuccgcucccucgucgccuccuccggcacccucgaguucaacaacgaguccuucaacuggaccggcgucacccagaacggcaccuccuccgccugcauccgccgcuccaacaacuccuucuucucccgccucaacuggcucacccaccucaacuucaaguaccccgcccucaacgucaccaugcccaacaacgagcaguucgacaagcucuacaucuggggcguccaccaccccggcaccgacaaggaccagaucuuccucuacgcccaggccuccggccgcaucaccgucuccaccaagcgcucccagcaggccgucauccccaacaucggcucccgcccccgcguccgcaacauccccucccgcgucuccaucuacuggaccaucgucaagcccggcgacauccuccucaucaacuccaccggcaaccucaucgccccccgcggcuacuucaagauccgcuccggcaaguccuccaucaugcgcuccgacgcccccaucggcaagugcaacuccgccugcaucacccccaacggcuccauccccaacgacaagcccuuccagaacgucaaccgcaucaccuacggcgccugcccccgcuacgucaagcagaacacccucaagcucgccaccggcaugcgcaacguccccgagaagcagacccgcggcaucuucggcgccaucgccggcuucaucgagaacggcugggagggcauggucgacggcugguacggcuuccgccaccagaacugcgagggccgcggccaggccgccgaccucaaguccacccaggccgccaucgaccagaucaacggcaagcucaaccgccucaugggcaaguccaucgagaaguuccaccagaucgagaacgaguucuccgaggucgagggccgcauccagggccucgagaaguacgucgaggacaccaagaucgaccucugguccuacaacggcgagcucaucgucgcccucgagaaccagcacgccaucgaccucaccgacuccgagaugaacaagcucuucgagaagaccaagaagcagaugcgcgagaacgccgaggacaugggcaacggcugcuucaagaucuaccucaagugcgacaacgccugcaucggcuccauccgcaacggcaucuacgaccacgacgucuaccgcgacgaggcccucaacaaccgcuuccagaucaagggcgucgagcucaaguccggcuacaaggacuggauccucuggaucuccuucaccaucuccugcuuccuccucugcgucgcccuccucggcuucaucaugugggcccgccagaagggcaacauccgcugcaacaucugcaucuga

SEQ ID NO: 108522 - RNA, 1701 nt, Artificial Sequence
  derived and/or modified CDS sequence (opt2) from hemagglutinin__InfluenzaA__AID70469
augaagaccaucaucgcccucuccuacauccucugccucgucuucgcccagaagguccccggcaacgagaacuccaccgccacccucugccucggccaccacgccguccccaacggcaccaucgucaagaccaucaccaacgaccagaucgaggucaccaacgccaccgagcucguccaguccuccuccaccggcgagaucugcaacuccccccaccagauccucgacggcgagaacugcacccucaucgacgcccuccucggcgacccccagugcgacggcuuccagaacaagaagugggaccucuucgucgagcgcuccaaggcccacuccaacugcuaccccuacgacguccccgacuacgccucccuccgcucccucgucgccuccuccggcacccucgaguucaacaacgaguccuucaacuggaccggcgucacccagaacggcaccuccuccgccugcauccgccgcuccaacaacuccuucuucucccgccucaacuggcucacccaccucaacuucaaguaccccgcccucaacgucaccaugcccaacaacgagcaguucgacaagcucuacaucuggggcguccaccaccccggcaccgacaaggaccagaucuuccucuacgcccaggccuccggccgcaucaccgucuccaccaagcgcucccagcaggccgucauccccaacaucggcucccgcccccgcguccgcaacauccccucccgcgucuccaucuacuggaccaucgucaagcccggcgacauccuccucaucaacuccaccggcaaccucaucgccccccgcggcuacuucaagauccgcuccggcaaguccuccaucaugcgcuccgacgcccccaucggcaagugcaacuccgccugcaucacccccaacggcuccauccccaacgacaagcccuuccagaacgucaaccgcaucaccuacggcgccugcccccgcuacgucaagcagaacacccucaagcucgccaccggcaugcgcaacguccccgagaagcagacccgcggcaucuucggcgccaucgccggcuucaucgagaacggcugggagggcauggucgacggcugguacggcuuccgccaccagaacugcgagggccgcggccaggccgccgaccucaaguccacccaggccgccaucgaccagaucaacggcaagcucaaccgccucaucggcaagaccaucgagaaguuccaccagaucgagaaggaguucuccgaggucgagggccgcauccagggccucgagaaguacgucgaggacaccaagaucgaccucugguccuacaacgccgagcuccucgucgcccucgagaaccagcacaccaucgaccucaccgacuccgagaugaacaagcucuucgagaagaccaagaagcagaugcgcgagaacgccgaggacaugggcaacggcugcuucaagaucuaccacaagugcgacaacgccugcaucggcuccauccgcaacggcaucuacgaccacgacgucuaccgcgacgaggcccucaacaaccgcuuccagaucaagggcgucgagcucaaguccggcuacaaggacuggauccucuggaucuccuucaccaucuccugcuuccuccucugcgucgcccuccucggcuucaucaugugggccugccagaagggcaacauccgcugcaacaucugcaucuga

SEQ ID NO: 108523 - RNA, 1701 nt, Artificial Sequence
  derived and/or modified CDS sequence (opt2) from hemagglutinin__InfluenzaA__AID70470
augaagaccaucaucgcccucuccuacauccucugccucgucuucgcccagaagguccccggcaacgagaacuccaccgccacccucugccucggccaccacgccguccccaacggcaccaucgucaagaccaucaccaacgaccagaucgaggucaccaacgccaccgagcucguccaguccuccuccaccggcgagaucugcaacuccccccaccagauccucgacggcgagaacugcacccucaucgacgcccuccucggcgacccccagugcgacggcuuccagaacaagaagugggaccucuucgucgagcgcuccaaggcccacuccaacugcuaccccuacgacguccccgacuacgccucccuccgcucccucgucgccuccuccggcacccucgaguucaacaacgaguccuucaacuggaccggcgucacccagaacggcaccuccuccgccugcauccgccgcuccaacaacuccuucuucucccgccucaacuggcucacccaccucaacuucaaguaccccgcccucaacgucaccaugcccaacaacgagcaguucgacaagcucuacaucuggggcguccaccaccccggcaccgacaaggaccagaucuuccucuacgcccaggccuccggccgcaucaccgucuccaccaagcgcucccagcaggccgucauccccaacaucggcucccgcccccgcguccgcaacauccccucccgcgucuccaucuacuggaccaucgucaagcccggcgacauccuccucaucaacuccaccggcaaccucaucgccccccgcggcuacuucaagauccgcuccggcaaguccuccaucaugcgcuccgacgcccccaucggcaagugcaacuccgccugcaucacccccaacggcuccauccccaacgacaagcccuuccagaacgucaaccgcaucaccuacggcgccugcccccgcuacgucaagcagaacacccucaagcucgccaccggcaugcgcaacguccccgagaagcagacccgcggcaucuucggcgccaucgccggcuucaucgagaacggcugggagggcauggucgacggcugguacggcuuccgccaccagaacugcgagggccgcggccaggccgccgaccucaaguccacccaggccgccaucgaccagaucaacggcaagcucaaccgccucaucggcaagaccaucgagaaguuccaccagaucgagaaggaguucuccgaggucgagggccgcauccagggccucgagaaguacgucgaggacaccaagaucgaccucugguccuacaacggcgagcuccucgucgcccucgagaaccaccacaccaucgaccucaccgacuccgagaugaacaagcucuucgagaagaccaagaagcagaugcgcgagaacgccgaggacaugggcaacggcugcuucaagaucuaccacaagugcgacaacgccugcaucggcuccauccgcaacggcaucuacgaccacgacgucuaccgcgacgaggcccucaacaaccgcuuccagaucaagggcgucgagcucaaguccggcuacaaggacuggauccucuggaucuccuucaccaucuccugcuuccuccucugcgucgcccuccucggcuucaucaugugggccugccagaagggcaacauccgcugcaacaucugcaucuga

SEQ ID NO: 108524 - RNA, 1701 nt, Artificial Sequence
  derived and/or modified CDS sequence (opt2) from hemagglutinin__InfluenzaA__AID70471
augaagaccaucaucgcccucuccuacauccucugccucgucuucacccagaagcuccccggcaacgacaacuccaccgccacccucugccucggccaccacgccguccccaacggcaccaucgucaagaccaucaccaacgaccagaucgaggucaccaacgccaccgagcucguccaguccuccuccaccggcgagaucugcaacuccccccaccagauccucgacggcgagaacugcacccucaucgacgcccuccucggcgacccccagugcgacggcuuccagaacaagaagugggaccucuucgucgagcgcuccaaggcccacuccaacugcuaccccuacgacguccccgacuacgccucccuccgcucccucgucgccuccuccggcacccucgaguucaacaacgaguccuucaacuggaccggcgucacccagaacggcaccuccuccgccugcauccgccgcuccaacaacuccuucuucucccgccucaacuggcucacccaccucaacuucaaguaccccgcccucaacgucaccaugcccaacaacgagcaguucgacaagcucuacaucuggggcguccaccaccccggcaccgacaaggaccagaucuuccucuacgcccaggccuccggccgcaucaccgucuccaccaagaagucccagcaggccgucauccccaacaucggcucccgcccccgcguccgcaacauccccucccgcgucuccaucuacuggaccaucgucaagcccggcgacauccuccucaucaacuccaccggcaaccucaucgccccccgcggcuacuucaagauccgcuccggcaaguccuccaucaugcgcuccgacgcccccaucggcaagugcaacuccgccugcaucacccccaacggcuccauccccaacgacaagcccuuccagaacgucaaccgcaucaccuacggcgccugcccccgcuacgucaagcagaacacccucaagcucgccaccggcaugcgcaacguccccgagaagcagacccgcggcaucuucggcgccaucgccggcuucaucgagaacggcugggagggcauggucgacggcugguacggcuuccgccaccagaacuccgagggccgcggccaggccgccgaccucaaguccacccaggccgccaucgaccagaucaacggcaagcucaaccgccucaucggcaagaccaucgagaaguuccaccagaucgagaacgaguucuccgaggucgagggccgcauccaggaccucgagaaguacgucgaggacaccaagaucgaccucugguccuacaacgccgagcucaucgucgcccucgagaaccaccacaccaucgaccucaccgacuccgagaugaacaagcucuucgagaagaccaagaagcagaugcgcgagaacgccgaggacaugggcaacggcugcuucaagaucuaccacaagugcgacaacgccugcaucggcuccauccgcaacggcaucuacgaccacgacgucuaccgcgacgaggcccucaacaaccgcuuccagaucaagggcgucgagcucaaguccggcuacaaggacuggauccucuggaucuccuucgccaucuccugcuuccucaucugcgucgcccuccucggcuucaucaugugggccugccagaagggcaaccuccgcugcaacaucugcaucuga

SEQ ID NO: 108525 - RNA, 1701 nt, Artificial Sequence
  derived and/or modified CDS sequence (opt2) from hemagglutinin__InfluenzaA__AID70472
augaagaccaucaucgcccucuccuacauccucugccucgucuucgcccagaagcuccccggcaacgacaacuccaccgccacccucugccucggccaccacgccguccccaacggcaccaucgucaagaccaucaccaacgaccagaucgaggucaccaacgccaccgagcucguccaguccuccuccaccggcgagaucugcaacuccccccaccagauccucgacggcgagaacugcacccucaucgacgcccuccucggcgacccccagugcgacggcuuccagaacaagaagugggaccucuucgucgagcgcuccaaggcccacuccaacugcuaccccuacgacguccccgacuacgccucccuccgcucccucgucgccuccuccggcacccucgaguucaacaacgaguccuucaacuggaccggcgucacccagaacggcaccuccuccgccugcauccgccgcuccaacaacuccuucuucucccgccucaacuggcucacccaccucaacuucaaguaccccgcccucaacgucaccaugcccaacaacgagcaguucgacaagcucuacaucuggggcguccaccaccccggcaccgacaaggaccagaucuuccucuacgcccaggccuccggccgcaucaccgucuccaccaagaagucccagcaggccgucauccccaacaucggcucccgcccccgcguccgcaacauccccucccgcgucuccaucuacuggaccaucgucaagcccggcgacauccuccucaucaacuccaccggcaaccucaucgccccccgcggcuacuucaagauccgcuccggcaaguccuccaucaugcgcuccgacgcccccaucggcaagugcaacuccgccugcaucacccccaacggcuccauccccaacgacaagcccuuccagaacgucaaccgcaucaccuacggcgccugcccccgcuacgucaagcagaacacccucaagcucgccaccggcaugcgcaacguccccgagaagcagacccgcggcaucuucggcgccaucgccggcuucaucgagaacggcugggagggcauggucgacggcugguacggcuuccgccaccagaacuccgagggccgcggccaggccgccgaccucaaguccacccaggccgccaucgaccagaucaacggcaagcucaaccgccucaucggcaagaccaucgagaaguuccaccagaucgagaaggaguucuccgaggucgagggccgcauccaggaccucgagaaguacgucgaggacaccaagaucgaccucugguccuacaacgccgagcuccucgucgcccucgagaaccaccacaccaucgaccucaccgacuccgagaugaacaagcucuucgagaagaccaagaagcagaugcgcgagaacgccgaggacaugggcaacggcugcuucaagaucuaccacaagugcgacaacgccugcaucggcuccauccgcaacggcaucuacgaccacgacgucuaccgcgacgaggcccucaacaaccgcuuccagaucaagggcgucgagcucaaguccggcuacaaggacuggauccucuggaucuccuucgccaucuccugcuuccuccucugcgucgcccuccucggcuucaucaugugggccugccagaagggcaacauccgcugcaacaucugcaucuga

SEQ ID NO: 108526 - RNA, 1701 nt, Artificial Sequence
  derived and/or modified CDS sequence (opt2) from hemagglutinin__InfluenzaA__AID70473
augaagaccaucaucgcccucuccuacauccucugccucgucuucgcccagaagcuccccggcaacgacaacuccaccgccacccucugccucggccaccacgccguccccaacggcaccaucgucaagaccaucaccaacgaccagaucgaggucaccaacgccaccgagcucguccaguccuccuccaccggcgagaucugcaacuccccccaccagauccucgacggcgagaacugcacccucaucgacgcccuccucggcgacccccagugcgacggcuuccagaacaagaagugggaccucuucgucgagcgcuccaaggcccacuccaacugcuaccccuacgacguccccgacuacgccucccuccgcucccucgucgccuccuccggcacccucgaguucaacaacgaguccuucaacuggaccggcgucacccagaacggcaccuccuccgccugcauccgccgcuccaacaacuccuucuucucccgccucaacuggcucacccaccucaacuucaaguaccccgcccucaacgucaccaugcccaacaacgagcaguucgacaagcucuacaucuggggcguccaccaccccggcaccgacaaggaccagaucuuccucuacgcccaggccuccggccgcaucaccgucuccaccaagaagucccagcaggccgucauccccaacaucggcucccgcccccgcguccgcaacauccccucccgcgucuccaucuacuggaccaucgucaagcccggcgacauccuccucaucaacuccaccggcaaccucaucgccccccgcggcuacuucaagauccgcuccggcaaguccuccaucaugcgcuccgacgcccccaucggcaagugcaacuccgccugcaucacccccaacggcuccauccccaacgacaagcccuuccagaacgucaaccgcaucaccuacggcgccugcccccgcuacgucaagcagaacacccucaagcucgccaccggcaugcgcaacguccccgagaagcagacccgcggcaucuucggcgccaucgccggcuucaucgagaacggcugggagggcauggucgacggcugguacggcuuccgccaccagaacugcgagggccgcggccaggccgccgaccucaaguccacccaggccgccaucgaccagaucaacggcaagcucaaccgccucaucggcaagaccaucgagaaguuccaccagaucgagaaggaguucuccgaggucgagggccgcauccagggccucgagaaguacgucgaggacaccaagaucgaccucugguccuacaacgccgagcuccucgucgcccucgagaaccagcacaccaucgaccucaccgacuccgagaugaacaagcucuucgagaagaccaagaagcagaugcgcgagaacgccgaggacaugggcaacggcugcuucaagaucuaccacaagugcgacaacgccugcaucggcuccauccgcaacggcaucuacgaccacgacgucuaccgcgacgaggcccucaacaaccgcuuccagaucaagggcgucgagcucaaguccggcuacaaggacuggauccucuggaucuccuucgccaucuccugcuuccuccucugcgucgcccuccucggcuucaucaugugggccugccagaagggcaacauccgcugcaacaucugcaucuga

SEQ ID NO: 108527 - RNA, 1701 nt, Artificial Sequence
  derived and/or modified CDS sequence (opt2) from hemagglutinin__InfluenzaA__AID70474
augaagaccaucaucgcccucuccuacauccucugccucgucuucgcccagaagcuccccggcaacgacaacuccaccgccacccucugccucggccaccacgccguccccaacggcaccaucgucaagaccaucaccaacgaccagaucgaggucaccaacgccaccgagcucguccaguccuccuccaccggcgagaucugcaacuccccccaccagauccucgacggcgagaacugcacccucaucgacgcccuccucggcgacccccagugcgacggcuuccagaacaagaagugggaccucuucgucgagcgcuccaaggcccacuccaacugcuaccccuacgacguccccgacuacgccucccuccgcucccucgucgccuccuccggcacccucgaguucaacaacgaguccuucaacuggaccggcgucacccagaacggcaccuccuccgccugcauccgccgcuccaacaacuccuucuucucccgccucaacuggcucacccaccucaacuucaaguaccccgcccucaacgucaccaugcccaacaacgagcaguucgacaagcucuacaucuggggcguccaccaccccggcaccgacaaggaccagaucuuccucuacgcccaggccuccggccgcaucaccgucuccaccaagaagucccagcaggccgucauccccaacaucggcucccgcccccgcguccgcaacauccccucccgcgucuccaucuacuggaccaucgucaagcccggcgacauccuccucaucaacuccaccggcaaccucaucgccccccgcggcuacuucaagauccgcuccggcaaguccuccaucaugcgcuccgacgcccccaucggcaagugcaacuccgccugcaucacccccaacggcuccauccccaacgacaagcccuuccagaacgucaaccgcaucaccuacggcgccugcccccgcuacgucaagcagaacacccucaagcucgccaccggcaugcgcaacguccccgagaagcagacccgcggcaucuucggcgccaucgccggcuucaucgagaacgucugggagggcauggucgacggcugguucggcuuccgccaccagaucugcgagggccgcggccaggccgccggccucgaguccacccaggccgccaucgaccagaucaacggcaagaugaaccgccucaugggcaagaccaucggcaaguuccaccagaucgucaacgaguucuccgaggucgagggccgcauccaggaccucgagaaguacgucgaggacaccaagaucgaccucugguccuacaucggcgagcuccucgucgcccucgagaaccaccacgccaucgaccucaccgacuccgagaugaacaagcucuucgagaagaccaagaagcagaugcgcgagaacgccgaggacaugggcaacggcugcuucaagaucuaccacaagugcgacaacgccugcaucggcuccauccgcaacggcaucuacgaccgcgacgucuaccgcgacgaggcccucaacaaccgcuuccacaucaagggcgucgagcucaaguccggcuacaaggacuggaucaucuggaucuccuccaccgaguccugcuuccuccucugcgucgcccuccucggcuucaucaugugggccugccagaagggcaacauccgcuccaacaucugcaucuga

SEQ ID NO: 108528 - RNA, 1701 nt, Artificial Sequence
  derived and/or modified CDS sequence (opt2) from hemagglutinin__InfluenzaA__AID70475
augaagaccaucaucgcccucuccuacaugcucugccucgucuucgcccagaagcuccccggcaacgacaacuccaccgccacccucugccucggccaccacgccguccccaacggcaccaucgucaagaccaucaccaacgaccagaucgaggucaccaacgccaccgagcucguccaguccuccuccaccggcgagaucugcaacuccccccaccagauccucgacggcgagaacugcacccucaucgacgcccuccucggcgacccccagugcgacggcuuccagaacaagaagugggaccucuucgucgagcgcuccaaggcccacuccaacugcuaccccuacgacguccccgacuacgccucccuccgcucccucgucgccuccuccggcacccucgaguucaacaacgaguccuucaacuggaccggcgucacccagaacggcaccuccuccgccugcauccgccgcuccaacaacuccuucuucucccgccucaacuggcucacccaccucaacuucaaguaccccgcccucaacgucaccaugcccaacaacgagcaguucgacaagcucuacaucuggggcguccaccaccccggcaccgacaaggaccagaucuuccucuacgcccaggccuccggccgcaucaccgucuccaccaagaagucccagcaggccgucauccccaacaucggcucccgcccccgcguccgcaacauccccucccgcgucuccaucuacuggaccaucgucaagcccggcgacauccuccucaucaacuccaccggcaaccucaucgccccccgcggcuacuucaagauccgcuccggcaaguccuccaucaugcgcuccgacgcccccaucggcaagugcaacuccgccugcaucacccccaacggcuccauccccaacgacaagcccuuccagaacgucaaccgcaucaccuacggcgccugcccccgcuacgucaagcagaacacccucaagcucgccaccggcaugcgcaacguccccgagaagcagacccgcggcaucuucggcgccaucgccggcuucaucgagaacgucugggagggcauggucgacggcugguacggcuuccgccaccagaacugcgagggccgcggccaggccgccgaccucaaguccgcccaggccgccaucgaccccaucaacggcaagcucaaccgccucaugggcaagaccaucggcaaguuccaccagaucgagaaggaguucuccgaggucgagggccgcauccaggaccucgagaaguacgucgaggacaccaagaucgaccucugguccuacaacggcgagcuccucgucgcccucgagaaccagcacgccaucgaccucaccgacuccgagaugaacaaggucuucgagaagaccaagaagcagcuccgcgagaacgccgaggacaugggcaacggcugcuucaagaucuaccacaagugcgacaacgccugcaucggcuccauccgcaacggcaucuacgaccacgacgucuaccgcaacgaggcccucaacaaccgcuuccagaucaagggcgucgagcucaaguccggcuacaaggacuggauccucuggaucuccuucgccaucuccugcuuccuccucuccgucgccucccucggcuucaucaugugggccuaccagaagggcaacauccgcugcaacaucugcaucuga

SEQ ID NO: 108529 - RNA, 1701 nt, Artificial Sequence
  derived and/or modified CDS sequence (opt2) from hemagglutinin__InfluenzaA__AID70476
augaagaccaucaucgcccucuccuacauccucugccucgucuucgcccagaagcuccccggcaacgagaacuccaccgccacccucggccucggccaccacgccguccccaacggcaccaucgucaagaccaucaccaacgaccagaucgaggucaccaacgccaccgagcucguccaguccuccuccaccggcgagaucugcaacuccccccaccagauccucgacggcgagaacugcacccucaucgacgcccuccucggcgacccccagugcgacgacuuccagaacaagaagugggaccucuucgucgagcgcuccaaggcccacuccaacugcuaccccuacgacguccccgacuacgccucccuccgcucccucgucgccuccuccggcacccucgaguucaacaacgaguccuucaacuggaccggcgucacccagaacggcaccuccuccgccugcauccgccgcuccaacaacuccuucuucucccgccucaacuggcucacccaccucaacuucaaguaccccgcccucaacgucaccaugcccaacaacgagcaguucgacaagcucuacaucuggggcguccaccaccccggcaccgacaaggaccagaucuuccucuacgcccaggccuccggccgcaucaccgucuccaccaagaagucccagcaggccgucauccccaacaucggcucccgcccccgcguccgcaacauccccucccgcgucuccaucuacuggaccaucgucaagcccggcgacauccuccucaucaacuccaccggcaaccucaucgccccccgcggcuacuucaagauccgcuccggcaaguccuccaucaugcgcuccgacgcccccaucggcaagugcaacuccgccugcaucacccccaacggcuccauccccaacgacaagcccuuccagaacgucaaccgcaucaccuacggcgccugcccccgcuacgucaagcagaacaaccucaagcucgccaccggcaugcgcaacguccccgagaagcagacccgcggcaucuucggcgccaucgccggcuucaucgagaacggcugggagggcauggucgacggcugguacggcuuccgccaccagaacuccgagggccgcggccaggccgccgaccucaaguccacccaggccgccaucgaccagaucaacggcaagcucaaccgccucaucggcaagaccaucgagaaguuccaccagaucgagaaggaguucuccgaggucgagggccgcauccagggccgcgagaaguacgucgaggacaccaagaucgaccucugguccuacaucggcgaguucaucgucgcccucgagaaccagcacaccaucgaccucaccgacuccgagaugaacaagcucuucgagaagaccaagaagcagaugcgcgagaacgccgaggacaugggcaacggcugcuucaagaucuaccacaagugcgacaacgccugcaucggcuccauccgcaacggcaucuacgaccacgacgucuaccgcgacgaggcccucaacaaccgcuuccagaucaagggcgucgagcucaaguccggcuacaaggacuggauccucuggaucuccuucgccaucuccugcuuccuccucugcgucgcccuccucggcuucaucaugugggccugccagaagggcaacauccgcugcaacaucugcaucuga

SEQ ID NO: 108530 - RNA, 1701 nt, Artificial Sequence
  derived and/or modified CDS sequence (opt2) from hemagglutinin__InfluenzaA__AID70477
augaagaccaucaucgcccucuccuacauccucugccucgucuucgcccagaagcuccccggcaacgacuccuccaccggcacccucugccucggccaccacgccguccccaacggcaccaucgucaagaccaucaccaacgaccagaucgaggucaccaacgccaccgagcucguccaguccuccuccaccggcgagaucugcaaccgcccccaccagauccucgacggcgagaacugcacccucaucgacgcccuccucggcgacccccagugcgacggcuuccagaacaagaagugggaccucuucgucgagcgcuccaaggcccacuccaacugcuaccccuacgacguccccgacuacgccucccuccgcucccucgucgccuccuccggcacccucgaguucaacaacgaguccuucaacuggaccggcgucacccagaacggcaccuccuccgccugcauccgccgcuccaacaacuccuucuucuccauccucaacuggcucacccaccucaacuucaaguaccccgcccucaacgucaccaugcccaacaacgagcaguucgacaagcucuacaucuggggcguccaccaccccggcaccgacaaggaccagaucuuccucuacgcccaggccuccggccgcaucaccgucuccaccaagaagucccagcaggccgucauccccaacaucggcucccgcccccgcguccgcaacauccccucccgcgucuccaucuacuggaccaucgucaagcccggcgagauccuccucaucaacuccaccggcaaccucaucgccccccgcggcuacuucaagauccgcuccggcaaguccuccaucaugcgcuccgacgcccccaucggcaagugcuacuccgccugcaucacccccaacggcuccauccccaacgacaagcccuuccagaacgucaaccgcaucaccuacggcgccugcccccgcuacgucaagcagcacccccucaagcucgccaccggcaugcgcaacguccccgagaagcagacccgcggcaucuucggcgccaucgccggcuucaucgagaacggcugggagggcauggucgacggcugguacggcuuccgccaccagaucugcgagggccgcggccaggccgccgaccucaaguccacccaggccgccaucgaccagaucaacggcaagcucaaccgccucaucggcaagaccaucgagaaguuccaccagaucgagaaggaguucuccgaggucgaguggcgcauccagggccucgagaaguacgucgaggacaccaaggucgaccucugguccuacaacggcgagcucaucgucgcccucgagaaccaccacaccaucgaccucaccgacuccgagaugaacaagcucuucgagaagaccaagaagcagaugcgcgagaacgccgaggacaugggcaacggcugcuucaagaucuaccucaagugcgacaacgccugcaucggcuccauccgcaacggcaucuacgaccacgacgucuaccgcgacgaggcccucaacaaccgcuuccagaucaagggcgucgagcucaaguccggcuacaaggacuggauccucuggaucuccuucaccgaguccugcuuccuccucuccgucgcccuccucggcuucaucaugugggccugccagaagggcaacauccgcugcaacaucugcaucuga

SEQ ID NO: 108531 - RNA, 1701 nt, Artificial Sequence
  derived and/or modified CDS sequence (opt2) from hemagglutinin__InfluenzaA__AID70478
augaagaccaucaucgcccucuccuacauccucugccucgucuucgcccagaagcuccccggcaacgacaacuccaccgccacccucugccucggccaccacgccguccccaacggcaccaucgucaagaccaucaccaacgaccagaucgaggucaccaacgccaccgagcucguccaguccuccuccaccggcgagaucugcaacuccccccaccagauccucgacggcgagaacugcacccucaucgacgcccuccucggcgacccccagugcgacggcuuccagaacaagaagugggaccucuucgucgagcgcuccaaggcccacuccaacugcuaccccuacgacguccccgacuacgccucccuccgcucccucgucgccuccuccggcacccucgaguucaacaacgaguccuucaacuggaccggcgucacccagaacggcaccuccuccgccugcauccgccgcuccaacaacuccuucuucucccgccucaacuggcucacccaccucaacuucaaguaccccgcccucaacgucaccaugcccaacaacgagcaguucgacaagcucuacaucuggggcguccaccaccccggcaccgacaaggaccagaucuuccucuacgcccaggccuccggccgcaucaccgucuccaccaagaagucccagcaggccgucauccccaacaucggcucccgcccccgcguccgcaacauccccucccgcgucuccaucuacuggaccaucgucaagcccggcgacauccuccucaucaacuccaccggcaaccucaucgccccccgcggcuacuucaagauccgcuccggcaaguccuccaucaugcgcuccgacgcccccaucggcaagugcaacuccgccugcaucacccccaacggcuccauccccaacgacaagcccuuccagaacgucaaccgcaucaccuacggcgccugcccccgcuacgucaagcagaacacccucaagcucgccaccggcaugcgcaacguccccgagaagcagacccgcggcaucuucggcgccaucgccggcuucaucgagaacggcugggagggcauggucgacggcugguacggcuuccgccaccagaacugcgagggccgcggccaggccgccgaccucgaguccacccaggccgccaucgaccagaucaacggcaagaugaaccgccucaugggcaagaccaucgagaaguuccaccagaucgagaaggaguucuccgaggucgagggccgcauccagggccgcgagaaguacgucgaggacaccaagaucgaccucugguccuacaacggcgagcuccucgucgaccucgagaaccagcacaccaucgaccucaccgacuccgagaugaacaaggucuucgagaagaccaagaagcagaugcgcgagaacgccgaggacaugggcaacggcugcuucaagaucuaccacaagugcgacaacgccugcaucggcuccauccgcaacggcaucuacgaccacgacgucuaccgcgacgaggcccucaacaaccgcuuccagaucaagggcgucgagcucaaguccggcuacaaggacuggauccaguggaucuccuucaccaucuccugcuuccuccucugcgucucccuccucggcuucaucaugugggccugccagaagggcaacauccgcugcaacaucugcaucuga

SEQ ID NO: 108532 - RNA, 1701 nt, Artificial Sequence; identical to SEQ ID NO: 106076
  derived and/or modified CDS sequence (opt2) from hemagglutinin__InfluenzaA__AID70632

SEQ ID NO: 108533 - RNA, 1683 nt, Artificial Sequence
  derived and/or modified CDS sequence (opt2) from hemagglutinin__InfluenzaA__AID70634
augaacacccagauccucgucuucgcccucaucgccaucauccccaccaacgccgacaagaucugccucggccaccacgccgucuccaacggcaccaaggucaacacccucaccgagcgcggcgucgaggucgucaacgccaccgagaccgucgagcgcaccaacaucccccgcaucugcuccaagggcaagcgcaccgucgaccucggccagugcggccuccucggcaccaucaccggccccccccagugcgaccaguuccucgaguucuccgccgaccucaucaucgagcgccgcgagggcuccgacgucugcuaccccggcaaguucgucaacgaggaggcccuccgccagauccuccgcgaguccggcggcaucgacaaggaggccaugggcuucaccuacuccggcauccgcaccaacggcgccaccuccgccugccgccgcuccggcuccuccuucuacgccgagaugaaguggcuccucuccaacaccgacaacgccgccuucccccagaugaccaaguccuacaagaacacccgcaagucccccgcccucaucgucuggggcauccaccacuccgucuccaccgccgagcagaccaagcucuacggcuccggcaacaagcucgucaccgucggcuccuccaacuaccagcaguccuucguccccucccccggcgcccgcccccaggucaacggccucuccggccgcaucgacuuccacuggcucaugcucaaccccaacgacaccgucaccuucuccuucaacggcgccuucaucgcccccgaccgcgccuccuuccuccgcggcaaguccaugggcauccaguccggcguccaggucgacgccaacugcgagggcgacugcuaccacuccggcggcaccaucaucuccaaccuccccuuccagaacaucgacucccgcgccgucggcaagugcccccgcuacgucaagcagcgcucccuccuccucgccaccggcaugaagaacguccccgagauccccaagggccgcggccucuucggcgccaucgccggcuucaucgagaacggcugggagggccucaucgacggcugguacggcuuccgccaccagaacgcccagggcgagggcaccgccgccgacuacaaguccacccaguccgccaucgaccagaucaccggcaagcucaaccgcaucaucgagaagaccaaccagcaguucgagcucaucgacaacgaguucaacgaggucgagaagcagaucuccaacgucaucaacuggacccgcgacuccaucaccgaggucugguccuacaacgccgagcuccucgucgccauggagaaccagcacaccaucgaccucgccgacuccgagauggacaagcucuacgagcgcgucaagcgccagcuccgcgagaacgccgaggaggacggcaccggcugcuucgagaucuuccacaagugcgacgacgacugcauggccuccauccgcaacaacaccuacgaccacuccaaguaccgcgaggaggccaugcagaaccgcauccagaucgaccccgucaagcucuccuccggcuacaaggacgucauccucugguucuccuucggcgccuccugcuucauccuccucgccaucgucaugggccucgucuucaucugcgucaagaacggcaacaugcgcugcaccaucugcaucuga

SEQ ID NO: 108534 - RNA, 1701 nt, Artificial Sequence
  derived and/or modified CDS sequence (opt2) from hemagglutinin__InfluenzaA__AIF72902
augaagaccaucaucgcccucuccuacauccucugccucgucuucgcccagaagcuccccggcaacgacaacuccaccgccacccucugccucggccaccacgccguccccaacggcaccaucgucaagaccaucaccaacgaccagaucgaggucaccaacgccaccgagcucguccaguccuccuccgccggcgagaucugcgacuccccccaccagauccucgacggcgagaacugcacccucaucgacgcccuccucggcgacccccagugcgacggcuuccagaacaagaagugggaccucuucgucgagcgcucccgcgccuacuccaacugcuaccccuacgacguccccgacuacgccucccuccgcucccucgucgccuccuccggcacccucgaguucaacaacgaguccuucaacuggaccggcgucacccagaacggcaccuccuccgccugcauccgccgcuccaacaacuccuucuucucccgccucaacuggcucacccaccucaacuucaaguaccccgcccucaacgucaccaugcccaacaacgagcaguucgacaagcucuacaucuggggcguccaccaccccggcaccgacaaggaccagaucuuccucuacgcccaggccuccggccgcaucaccgucuccaccaagcgcucccagcaggccgucauccccaacaucggcucccgcccccgcguccgcaacauccccucccgcaucuccaucuacuggaccaucgucaagcccggcgacauccuccucaucaacuccaccggcaaccucaucgccccccgcggcuacuucaagauccgcuccggcaaguccuccaucaugcgcuccgacgcccccaucggcaagugcaacuccgagugcaucacccccaacggcuccauccccaacgacaagcccuuccagaacgucaaccgcaucaccuacggcgccugcccccgcuacgucaagcaguccacccucaagcucgccaccggcaugcgcaacguccccgagaagcagacccgcggcaucuucggcgccaucgccggcuucaucgagaacggcugggagggcauggucgacggcugguacggcuuccgccaccagaacuccgagggccgcggccaggccgccgaccucaaguccacccaggccgccaucgaccagaucaacggcaagcucaaccgccucaucggcaagaccaacgagaaguuccaccagaucgagaaggaguucuccgaggucgagggccgcauccaggaccucgagaaguacgucgaggacaccaagaucgaccucugguccuacaacgccgagcuccucgucgcccucgagaaccagcacaccaucgaccucaccgacuccgagaugaacaagcucuucgagaagaccaagaagcagcuccgcgagaacgccgaggacaugggcaacggcugcuucaagaucuaccacaagugcgacaacgccugcaucggcuccauccgcaacggcaccuacgaccacgacgucuaccgcgacgaggcccucaacaaccgcuuccagaucaagggcgucgagcucaaguccggcuacaaggacuggauccucuggaucuccuucgccaucuccugcuuccuccucugcgucgcccuccucggcuucaucaugugggccugccagaagggcaacauccgcugcaacaucugcaucuga

SEQ ID NO: 108535 - RNA, 1701 nt, Artificial Sequence
  derived and/or modified CDS sequence (opt2) from hemagglutinin__InfluenzaA__AIF72903
augaagaccaucaucgcccucuccuacauccucugccucgucuucgcccaggagcuccccggcaacgacaacuccaccgccacccucugccucggccaccacgccguccccaacggcaccaucgucaagaccaucaccaacgaccagaucgaggucaccaacgccaccgagcucguccaguccuccuccgccggcgagaucugcgacuccccccaccagauccucgacggcgagaacugcacccucaucgacgcccuccucggcgacccccagugcgacggcuuccagaacaagaagugggaccucuucgucgagcgcucccgcgccuacuccaacugcuaccccuacgacguccccgacuacgccucccuccgcucccucgucgccuccuccggcacccucgaguucaacaacgaguccuucaacuggaccggcgucacccagaacggcaccuccuccgccugcauccgccgcuccaacaacuccuucuucucccgccucaacuggcucacccaccucaacuucaaguaccccgcccucaacgucaccaugcccaacaacgagcaguucgacaagcucuacaucuggggcguccaccaccccggcaccgacaaggaccagaucuuccucuacgcccaggccuccggccgcaucaccgucuccaccaagcgcucccagcaggccgucauccccaacaucggcucccgcccccgcguccgcaacauccccucccgcaucuccaucuacuggaccaucgucaagcccggcgacauccuccucaucaacuccaccggcaaccucaucgccccccgcggcuacuucaagauccgcuccggcaaguccuccaucaugcgcuccgacgcccccaucggcaagugcaacuccgagugcaucacccccaacggcuccauccccaacgacaagcccuuccagaacgucaaccgcaucaccuacggcgccugcccccgcuacgucaagcaguccacccucaagcucgccaccggcaugcgcaacguccccgagaagcagacccgcggcaucuucggcgccaucgccggcuucaucgagaacggcugggagggcauggucgacggcugguacggcuuccgccaccagaacuccgagggccgcggccaggccgccgaccucaaguccacccaggccgccaucgaccagaucaacggcaagcucaaccgccucaucggcaagaccaacgagaaguuccaccagaucgagaaggaguucuccgaggucgagggccgcauccaggaccucgagaaguacgucgaggacaccaagaucgaccucugguccuacaacgccgagcuccucgucgcccucgagaaccagcacaccaucgaccucaccgacuccgagaugaacaagcucuucgagaagaccaagaagcagcuccgcgagaacgccgaggacaugggcaacggcugcuucaagaucuaccacaagugcgacaacgccugcaucggcuccauccgcaacggcaccuacgaccacgacgucuaccgcgacgaggcccucaacaaccgcuuccagaucaagggcgucgagcucaaguccggcuacaaggacuggguccucuggaucuccuucgccaucuccugcuuccuccucugcgucgcccuccucggcuucaucaugugggccugccagaagggcaacauccgcugcaacaucugcaucuga

SEQ ID NO: 108536 - RNA, 1701 nt, Artificial Sequence
  derived and/or modified CDS sequence (opt2) from hemagglutinin__InfluenzaA__AIF72904
augaagaccaucaucgcccucuccuacauccucugccucgucuucgcccaggagcuccccggcaacgacaacuccaccgccacccucugccucggccaccacgccguccccaacggcaccaucgucaagaccaucaccaacgaccagaucgaggucaccaacgccaccgagcucguccaguccuccuccgccggcgagaucugcgacuccccccaccagauccucgacggcgagaacugcacccucaucgacgcccuccucggcgacccccagugcgacggcuuccagaacaagaagugggaccucuucgucgagcgcucccgcgccuacuccaacugcuaccccuacgacguccccgacuacgccucccuccgcucccucgucgccuccuccggcacccucgaguucaacaacgaguccuucaacuggaccggcgucacccagaacggcaccuccuccgccugcauccgccgcuccaacaacuccuucuucucccgccucaacuggcucacccaccucaacuucaaguaccccgcccucaacgucaccaugcccaacaacgagcaguucgacaagcucuacaucuggggcguccaccaccccggcaccgacaaggaccagaucuuccucuacgcccaggccuccggccgcaucaccgucuccaccaagcgcucccagcaggccgucauccccaacaucggcucccgcccccgcguccgcaacauccccucccgcaucuccaucuacuggaccaucgucaagcccggcgacauccuccucaucaacuccaccggcaaccucaucgccccccgcggcuacuucaagauccgcuccggcaaguccuccaucaugcgcuccgacgcccccaucggcaagugcaacuccgagugcaucacccccaacggcuccauccccaacgacaagcccuuccagaacgucaaccgcaucaccuacggcgccugcccccgcuacgucaagcaguccacccucaagcucgccaccggcaugcgcaacguccccgagaagcagacccgcggcaucuucggcgccaucgccggcuucaucgagaacggcugggagggcaugauggacggcugguacggcuuccgccaccagaacuccgagggccgcggccaggccgccgaccucaaguccacccaggccgccaucgaccagaucaacggcaagcucaaccgccucaucggcaagaccaacgagaaguuccaccagaucgagaaggaguucuccgaggucgagggccgcauccaggaccucgagaaguacgucgaggacaccaagaucgaccucugguccuacaacgccgagcuccucgucgcccucgagaaccagcacaccaucgaccucaccgacuccgagaugaacaagcucuucgagaagaccaagaagcagcuccgcgagaacgccgaggacaugggcaacggcugcuucaagaucuaccacaagugcgacaacgccugcaucggcuccauccgcaacggcaccuacgaccacgacgucuaccgcgacgaggcccucaacaaccgcuuccagaucaagggcgucgagcucaaguccggcuacaaggacuggguccucuggaucuccuucgccaucuccugcuuccuccucugcgucgcccuccucggcuucaucaugugggccugccagaagggcaacauccgcugcaacaucugcaucuga

SEQ ID NO: 108537 - RNA, 1701 nt, Artificial Sequence
  derived and/or modified CDS sequence (opt2) from hemagglutinin__InfluenzaA__AIF72905
augaagaccaucaucgcccucuccuacauccucugccucgucuucgcccagaagcuccccggcaacgacaacuccaccgccacccucugccucggccaccacgccguccccaacggcaccaucgucaagaccaucaccaacgaccagaucgaggucaccaacgccaccgagcucguccaguccuccuccgccggcgagaucugcgacuccccccaccagauccucgacggcgagaacugcacccucaucgacgcccuccucggcgacccccagugcgacggcuuccagaacaagaagugggaccucuucgucgagcgcucccgcgccuacuccaacugcuaccccuacgacguccccgacuacgccucccuccgcucccucgucgccuccuccggcacccucgaguucaagaacgaguccuucaacuggaccggcgucacccagaacggcaccuccuccgccugcauccgccgcuccaacaacuccuucuucucccgccucaacuggcucacccacuccaacuucaaguaccccgcccucaacgucaccaugcccaacaacgagcaguucgacaagcucuacaucuggggcguccaccaccccggcaccgacaaggaccagaucuuccucuacgcccaggccuccggccgcaucaccgucuccaccaagcgcucccagcaggccgucauccccaacaucggcucccgcccccgcguccgcaacauccccucccgcaucuccaucuacuggaccaucgucaagcccggcgacauccuccucaucaacuccaccggcaaccucaucgccccccgcggcuacuucaagauccgcuccggcaaguccuccaucaugcgcuccgacgcccccaucggcaagugcaacuccgagugcaucacccccaacggcuccauccccaacgacaagcccuuccagaacgucaaccgcaucaccuacggcgccugcccccgcuacgucaagcaguccacccucaagcucgccaccggcaugcgcaacguccccgagaagcagacccgcggcaucuucggcgccaucgccggcuucaucgagaacggcugggagggcaugauggacggcugguacggcuuccgccaccagaacuccgagggccgcggccaggccgccgaccucaaguccacccaggccgccaucgaccagaucaacggcaagcucaaccgccucaucggcaagaccaacgagaaguuccaccagaucgagaaggaguucuccgaggucgagggccgcauccaggaccucgagaaguacgucgaggacaccaagaucgaccucugguccuacaacgccgagcuccucgucgcccucgagaaccagcacaccaucgaccucaccgacuccgagaugaacaagcucuucgagaagaccaagaagcagcuccgcgagaacgccgaggacaugggcaacggcugcuucaagaucuaccacaagugcgacaacgccugcaucggcuccauccgcaacggcaccuacgaccacgacgucuaccgcgacgaggcccucaacaaccgcuuccagaucaagggcgucgagcucaaguccggcuacaaggacuggauccucuggaucuccuucgccaucuccugcuuccuccucugcgucgcccuccucggcuucaucaugugggccugccagaagggcaacauccgcugcaacaucugcaucuga

SEQ ID NO: 108538 - RNA, 1701 nt, Artificial Sequence; identical to SEQ ID NO: 99447
  derived and/or modified CDS sequence (opt2) from hemagglutinin__InfluenzaA__AIF72906

SEQ ID NO: 108539 - RNA, 1701 nt, Artificial Sequence; identical to SEQ ID NO: 99447
  derived and/or modified CDS sequence (opt2) from hemagglutinin__InfluenzaA__AIF72907

SEQ ID NO: 108540 - RNA, 1701 nt, Artificial Sequence; identical to SEQ ID NO: 99447
  derived and/or modified CDS sequence (opt2) from hemagglutinin__InfluenzaA__AIF72908

SEQ ID NO: 108541 - RNA, 1701 nt, Artificial Sequence
  derived and/or modified CDS sequence (opt2) from hemagglutinin__InfluenzaA__AIF72909
augaagaccaucaucgcccucuccuacauccucugccucgucuucgcccagaagcuccccggcaacgacaacuccaccgccacccucugccucggccaccacgccguccccaacggcaccaucgucaagaccaucaccaacgaccagaucgaggucaccaacgccaccgagcucguccaguccuccuccgccggcgagaucugcgacggcccccaccagauccucgacggcgagaacugcacccucaucgacgcccuccucggcgacccccagugcgacggcuuccagaacaagaagugggaccucuucgucgagcgcucccgcgccuacuccaacugcuaccccuacgacguccccgacuacgccucccuccgcucccucgucgccuccuccggcacccucgaguucaacaacgaguccuucaacuggaccggcaccacccagaacggcaccuccuccgccugcauccgccgcuccaacaacuccuucuucucccgccucaacuggcucacccaccucaacuucaaguaccccgcccucaacgucaccaugcccaacaacgagcaguucgacaagcucuacaucuggggcguccaccaccccggcaccgacaaggaccagaucuuccucuacgcccaggccuccggccgcaucaccgucuccaccaagcgcucccagcaggccgucauccccaacaucggcucccgcccccgcguccgcaacauccccucccgcaucuccaucuacuggaccaucgucaagcccggcgacauccuccucaucaacuccaccggcaaccucaucgccccccgcggcuacuucaagauccgcuccggcaaguccuccaucaugcgcuccgacgcccccaucggcaagugcaacuccgagugcaucacccccaacggcuccauccccaacgacaagcccuuccagaacgucaaccgcaucaccuacggcgccugcccccgcuacgucaagcaguccacccucaagcucgccaccggcaugcgcaacguccccgagaagcagacccgcggcaucuucggcgccaucgccggcuucaucgagaacggcugggagggcauggucgacggcugguacggcuuccgccaccagaacuccgagggccgcggccaggccgccgaccucaaguccacccaggccgccaucgaccagaucaacggcaagcucaaccgccucaucggcaagaccaacgagaaguuccaccagaucgagaaggaguucuccgaggucgagggccgcauccaggaccucgagaaguacgucgaggacaccaagaucgaccucugguccuacaacgccgagcuccucgucgcccucgagaaccagcacaccaucgaccucaccgacuccgagaugaacaagcucuucgagaagaccaagaagcagcuccgcgagaacgccgaggacaugggcaacggcugcuucaagaucuaccacaagugcgacaacgccugcaucggcuccauccgcaacggcaccuacgaccacgacgucuaccgcgacgaggcccucaacaaccgcuuccagaucaagggcgucgagcucaaguccggcuacaaggacuggauccucuggaucuccuucgccaucuccugcuuccuccucugcgucgcccuccucggcuucaucaugugggccugccagaagggcaacauccgcugcaacaucugcaucuga

SEQ ID NO: 108542 - RNA, 1701 nt, Artificial Sequence; identical to SEQ ID NO: 99447
  derived and/or modified CDS sequence (opt2) from hemagglutinin__InfluenzaA__AIF72910

SEQ ID NO: 108543 - RNA, 1701 nt, Artificial Sequence; identical to SEQ ID NO: 99447
  derived and/or modified CDS sequence (opt2) from hemagglutinin__InfluenzaA__AIF72911

SEQ ID NO: 108544 - RNA, 1701 nt, Artificial Sequence; identical to SEQ ID NO: 108534
  derived and/or modified CDS sequence (opt2) from hemagglutinin__InfluenzaA__AIF72912

SEQ ID NO: 108545 - RNA, 1701 nt, Artificial Sequence; identical to SEQ ID NO: 99447
  derived and/or modified CDS sequence (opt2) from hemagglutinin__InfluenzaA__AIF72913

SEQ ID NO: 108546 - RNA, 1701 nt, Artificial Sequence
  derived and/or modified CDS sequence (opt2) from hemagglutinin__InfluenzaA__AIF72914
augaagaccaucaucgcccucuccuacauccucugccucgucuucgcccagaagcuccccggcaacgacaacuccaccgccacccucugccucggccaccacgccguccccaacggcaccaucgucaagaccaucaccaacgaccagaucgaggucaccaacgccaccgagcucguccaguccuccuccaccggcgagaucugcgacuccccccaccagauccucgacggcgagaacugcacccucaucgacgcccuccucggcgacccccagugcgacggcuuccagaacaagaagugggaccucuucgucgagcgcuccaaggccuacuccaacugcuaccccuacgacguccccgacuacgccucccuccgcucccucgucgccuccuccggcacccucgaguucaacaacgaguccuucaacuggaccggcgucacccagaacggcaccuccuccgccugcauccgccgcuccaacaacuccuucuucucccgccucaacuggcucacccaccucaacuucaaguaccccgcccucaacgucaccaugcccaacaacgagcaguucgacaagcucuacaucuggggcguccaccaccccggcaccgacaaggaccagaucuuccucuacgcccaggccuccggccgcaucaccgucuccaccaagcgcucccagcaggccgucauccccaacaucggcucccgcccccgcguccgcaacauccccucccgcaucuccaucuacuggaccaucgucaagcccggcgacauccuccucaucaacuccaccggcaaccucaucgccccccgcggcuacuucaagauccgcggcggcaaguccuccaucaugcgcuccgacgcccccaucggcaagugcaacuccgagugcaucacccccaacggcuccauccccaacgacaagcccuuccagaacgucaaccgcaucaccuacggcgccugcccccgcuacgucaagcagaacacccucaagcucgccaccggcaugcgcaacguccccgagaagcagacccgcggcaucuucggcgccaucgccggcuucaucgagaacggcugggagggcauggucgacggcugguacggcuuccgccaccagaacuccgagggccgcggccaggccgccgaccucaaguccacccaggccgccaucgaccagaucaacggcaagcucaaccgccucaucggcaagaccaacgagaaguuccaccagaucgagaaggaguucuccgaggucgagggccgcauccacgaccucgagaaguacgucgaggacacccucuucgaccucugggucuacaacuccgagcuccucgucgcccuccagaaccagcacaccaucgaccuccccgacuccgagaugaacaagcucuucgagaagaccaagaagcagcuccgcgagaacgccgaggacaugggcaacggcugcuucaagaucuaccacaagugcgacaacgccugcaucggcuccauccgcaacggcaccuacgaccacgacgucuaccgcgacgaggcccucaacaaccgcuuccagaucaagggcgucgagcucaaguccggcuacaaggacuggauccucuggaucuccuucgccaucuccugcuuccuccucugcgucgcccuccucggcuucaucaugugggccugccagaagggcaacauccgcugcaacaucugcaucuga

SEQ ID NO: 108547 - RNA, 1701 nt, Artificial Sequence
  derived and/or modified CDS sequence (opt2) from hemagglutinin__InfluenzaA__AIF72915
augaagaccaucaucgcccucuccuacauccucugccucgucuucgcccagaagcuccccggcaacgacaacuccaccgccacccucugccucggccaccacgccguccccaacggcaccaucgucaagaccaucaccaacgaccagaucgaggucaccaacgccaccgagcucguccaguccuccuccaccggcgagaucugcgacuccccccuccagauccucgacggcgagaacugcacccucaucgacgcccuccucggcgacccccagugcgacggcuuccagaacaagaagugggaccucuucgucgagcgcuccaaggccuacuccaacugcuaccccuacgacguccccgacuacgccucccuccgcucccucgucgccuccuccggcacccucgaguucaacaacgaguccuucaacuggaccggcgucacccagaacggcaccuccuccgccugcauccgccgcuccaacaacuccuucuucucccgccucaacuggcucacccaccucaacuucaaguaccccgcccucaacgucaccaugcccaacaacgagcaguucgacaagcucuacaucuggggcguccaccaccccggcaccgacaaggaccagaucuuccucuacgcccaggccuccggccgcaucaccgucuccaccaagcgcucccagcaggccgucauccccaacaucggcucccgcccccgcguccgcaacauccccucccgcaucuccaucuacuggaccaucgucaagcccggcgacauccuccucaucaacuccaccggcaaccucaucgccccccgcggcuacuucaagauccgcuccggcaaguccuccaucaugcgcuccaacgcccccaucggcaagugcaacuccgagugcaucacccccaacggcuccauccccaacgacaagcccuuccagaacgucaaccgcaucaccuacggcgccugcccccgcuacgucaagcagaacacccucaagcucgccaccggcaugcgcaacguccccgagaagcagacccgcggcaucuucggcgccaucgccggcuucaucgagaacggcugggagggcauggucgacggcugguacggcuuccgccaccagaacuccgagggccgcggccaggccgccgaccucaaguccacccaggccgccaucgaccagaucaacggcaagcucaaccgccucaucggcaagaccaacgagaaguuccaccagaucgagaaggaguucuccgaggucgagggccgcauccaggaccucgagaaguacgucgaggacaccaagaucgaccucugguccuacaacgccgagcuccucgucgcccucgagaaccagcacaccaucgaccucaccgacuccgagaugaacaagcucuucgagaagaccaagaagcagcuccgcgagaacgccgaggacaugggcaacggcugcuucaagaucuaccacaagugcgacaacgccugcaucggcuccauccgcaacggcaccuacgaccacgacgucuaccgcgacgaggcccucaacaaccgcuuccagaucaagggcgucgagcucaaguccggcuacaaggacuggauccucuggaucuccuucgccaucuccugcuuccuccucugcgucgcccuccucggcuucaucaugugggccugccagaagggcaacauccgcugcaacaucugcaucuga

SEQ ID NO: 108548 - RNA, 1701 nt, Artificial Sequence; identical to SEQ ID NO: 99447
  derived and/or modified CDS sequence (opt2) from hemagglutinin__InfluenzaA__AIF72916

SEQ ID NO: 108549 - RNA, 1701 nt, Artificial Sequence
  derived and/or modified CDS sequence (opt2) from hemagglutinin__InfluenzaA__AIF72917
augaagaccaucaucgcccucuccuacauccucugccucgucuucgcccagaagcucccccgcaacgacaacuccaccgccacccucugccucggccaccacgccguccccaacggcaccaucgucaagaccaucaccaacgaccagaucgaggucaccaacgccaccgagcucguccaguccuccuccaccggcgagaucugcgacuccccccaccagauccucgacggcgagaacugcacccucaucgacgcccuccucggcgacccccagugcgacggcuuccagaacaagaagugggaccucuucgucgagcgcuccaaggccuacuccaacugcuaccccuacgacguccccgacuacgccucccuccgcucccucgucgccuccuccggcacccucgaguucaagaacgaguccuucaacuggaccggcgucacccagaacggcaccuccuccgccugcauccgccgcuccaacaacuccuucuucucccgccucaacuggcucacccaccucaacuucaaguaccccgcccucaacgucaccaugcccaacaacgagcaguucgacaagcucuacaucuggggcguccaccaccccggcaccgacaaggaccagaucuuccucuacgcccaggccuccggccgcaucaccgucuccaccaagcgcucccagcaggccgucauccccaacaucggcucccgcccccgcguccgcaacauccccucccgcaucuccaucuacuggaccaucgucaagcccggcgacauccuccucaucaacuccaccggcaaccucaucgccccccgcggcuacuucaagauccgcuccggcaaguccuccaucaugcgcuccgacgcccccaucggcaagugcaacuccgagugcaucacccccaacggcuccauccccaacgacaagcccuuccagaacgucaaccgcaucaccuacggcgccugcccccgcuacgucaagcagaacacccucaagcucgccaccggcaugcgcaacguccccgagaagcagacccgcggcaucuucggcgccaucgccggcuucaucgagaacggcugggagggcauggucgacggcugguacggcuuccgccaccagaacuccgagggccgcggccaggccgccgaccucaaguccacccaggccgccaucgaccagaucaacggcaagcucaaccgccucaucggcaagaccaacgagaaguuccaccagaucgagaaggaguucuccgaggucgagggccgcauccaggaccucgagaaguacgucgaggacaccaagaucgaccucugguccuacaacgccgagcuccucgucgcccucgagaaccagcacaccaucgaccucaccgacuccgagaugaacaagcucuucgagaagaccaagaagcagcuccgcgagaacgccgaggacaugggcaacggcugcuucaagaucuaccacaagugcgacaacgccugcaucggcuccauccgcaacggcaccuacgaccacgacgucuaccgcgacgaggcccucaacaaccgcuuccagaucaagggcgucgagcucaaguccggcuacaaggacuggauccucuggaucuccuucgccaucuccugcuuccuccucugcgucgcccuccucggcuucaucaugugggccugccagaagggcaacauccgcugcgacaucugcaucuga

SEQ ID NO: 108550 - RNA, 1683 nt, Artificial Sequence
  derived and/or modified CDS sequence (opt2) from hemagglutinin__InfluenzaA__AIG44693
auggagaccgccucccucaucaccauccuccucgucgucaccgucuccaacgccgacaagaucugcaucggcuaccaguccaccaacuccaccgagaccgucgacacccucaccgagaacaacguccccgucacccacgccaaggagcuccuccacaccgagcacaacggcaugcucugcgccaccucccucggccagccccucauccucgacaccugcaccaucgagggccucaucuacggcaaccccuccugcgaccuccuccucggcggccgcgagugguccuacaucgucgagcgccccuccgccgucaacggccucugcuaccccggcaacgucgagaaccucgaggagcuccgcucccucuucuccuccgcccgcuccuaccagcgcauccagaucuuccccgacaccaucuggaacgucuccuacuccggcaccuccaaggccugcuccgacuccuucuaccgcuccaugcgcuggcucacccagaaggacaacgccuaccccauccaggacgcccaguacaccaacaaccaggagaagaacauccucuucauguggggcaucaaccacccccccaccgacaccgcccagaccaaccucuacacccgcaccgacaccaccaccuccgucgccaccgaggagaucaaccgcaccuucaagccccucaucggcccccgcccccucguccacggccucaugggccgcaucaacuacuacugguccguccucaagcccggccagacccuccgcaucaaguccaacggcaaccucaucgcccccugguacggccacauccucuccggcaagucccacggccgcauccucaagaccgaccucaagcgcggcaacugcaccguccagugccagaccgagaagggcggccucaacaccacccuccccuuccagaacgucuccaaguacgccuucggcaacugcuccaaguacaucggcaucaagucccucaagcucgccgucggccuccgcaacguccccucccgcuccucccgcggccucuucggcgccaucgccggcuucaucgagggcggcugguccggccucgucgccggcugguacggcuuccagcacuccaacgaccagggcgucggcauggccgccgaccgcgacuccacccagaaggccaucgacaagaucaccuccaaggucaacaacaucgucgacaagaugaacaagcaguacgagaucaucgaccacgaguucuccgaggucgagacccgccucaacaugaucaacaacaagaucgacgaccagauccaggacaucugggccuacaacgccgagcuccucguccuccucgagaaccagaagacccucgacgagcacgacgccaacgucaacaaccucuacaacaaggucaagcgcgcccucggcuccaacgccgucgaggacggcaagggcugcuucgagcucuaccacaagugcgacgaccagugcauggagaccauccgcaacggcaccuacaaccgccgcaaguaccaggaggaguccaagcucgagaagcagaagaucgagggcgucaagcucgaguccgagggcaccuacaagauccucaccaucuacuccaccgucgccuccucccucgucaucgccaugggcuucgccgccuuccucuucugggccauguccaacggcuccugccgcugcaacaucugcaucuga

SEQ ID NO: 108551 - RNA, 1701 nt, Artificial Sequence; identical to SEQ ID NO: 103018
  derived and/or modified CDS sequence (opt2) from hemagglutinin__InfluenzaA__AIJ10728

SEQ ID NO: 108552 - RNA, 1701 nt, Artificial Sequence
  derived and/or modified CDS sequence (opt2) from hemagglutinin__InfluenzaA__AIJ10729
augaagaccaucaucgcccucuccuacauccucugccucgucuucgcccagaagcuccccggccacgacaacuccaccgccacccucugccucggccaccacgccguccccaacggcaccaucgucaagaccaucaccaacgaccagaucgaggucaccaacgccaccgagcucguccaguccuccuccaccggcgagaucugcaacuccccccaccagauccucgacggcgagaacugcacccucaucgacgcccuccucggcgacccccagugcgacggcuuccagaacaagaagugggaccucuucgucgagcgcuccaaggcccacuccaacugcuaccccuacgacguccccgacuacgccucccuccgcucccucgucgccuccuccggcacccucgaguucaacaacgaguccuucaacuggaccggcgucacccagaacggcaccuccuccgccugcauccgccgcuccaacaacuccuucuucucccgccucaacuggcucacccaccucaacuucaaguaccccgcccucaacgucaccaugcccaacaacgagcaguucgacaagcucuacaucuggggcguccaccaccccggcaccgacaaggaccagaucuuccucuacgcccaggccuccggccgcaucaccgucuccaccaagcgcucccagcaggccgucauccccaacaucggcucccgcccccgcguccgcaacauccccucccgcgucuccaucuacuggaccaucgucaagcccggcgacauccuccucaucaacuccaccggcaaccucaucgccccccgcggcuacuucaagauccgcuccggcaaguccuccaucaugcgcuccgacgcccccaucggcaagugcaacuccgccugcaucacccccaacggcuccauccccaacgacaagcccuuccagaacgucaaccgcaucaccuacggcgccugcccccgcuacgucaagcagaacacccucaagcucgccaccggcaugcgcaacguccccgagaagcagaccaagggcaucuucggcgccaucgccggcuucaucgagaacggcugggagggcauggucgacggcugguacggcuuccgccaccagaacuccgagggccgcggccaggccgccgaccucaaguccacccaggccgccaucgaccagaucaacggcaagcucaaccgccucaucggcaagaccaacgagaaguuccaccagaucgagaaggaguucuccgaggucgagggccgcauccaggaccucgagaaguacgucgaggacaccaagaucgaccucugguccuacaacgccgagcuccucgucgcccucgagaaccagcacaccaucgaccucaccgacuccgagaugaacaagcucuucgagaagaccaagaagcagcuccgcgagaacgccgaggacaugggcaacggcugcuucaagaucuaccacaagugcgacaacgccugcaucggcuccauccgcaacggcaccuacgaccacgacgucuaccgcgacgaggcccucaacaaccgcuuccagaucaagggcgucgagcucaaguccggcuacaaggacuggauccucuggaucuccuucgccaucuccugcuuccuccucugcgucgcccuccucggcuucaucaugugggccugccagaagggcaacauccgcugcaacaucugcaucuga

SEQ ID NO: 108553 - RNA, 1701 nt, Artificial Sequence; identical to SEQ ID NO: 103018
  derived and/or modified CDS sequence (opt2) from hemagglutinin__InfluenzaA__AIJ10730

SEQ ID NO: 108554 - RNA, 1701 nt, Artificial Sequence; identical to SEQ ID NO: 103018
  derived and/or modified CDS sequence (opt2) from hemagglutinin__InfluenzaA__AIJ10731

SEQ ID NO: 108555 - RNA, 1701 nt, Artificial Sequence
  derived and/or modified CDS sequence (opt2) from hemagglutinin__InfluenzaA__AIJ10732
augaagaccaucaucgcccucuccuacauccucugccucgucuucgcccaggagcuccccggcaacgacaacuccaccgccacccucugccucggccaccacgccguccccaacggcaccaucgucaagaccaucaccaacgaccagaucgaggucaccaacgccaccgagcucguccaguccuccuccaccggcgagaucugcaacuccccccaccagauccucgacggcgagaacugcacccucaucgacgcccuccucggcgacccccagugcgacggcuuccagaacaagaagugggaccucuucgucgagcgcuccaaggcccacuccaacugcuaccccuacgacguccccgacuacgccucccuccgcucccucgucgccuccuccggcacccucgaguucaacaacgaguccuucaacuggaccggcgucacccagaacggcaccuccuccgccugcauccgccgcuccaacaacuccuucuucucccgccucaacuggcucacccaccucaacuuccgcuaccccgcccucaacgucaccaugcccaacaacgagcaguucgacaagcucuacaucuggggcguccaccaccccggcaccgacaaggaccagaucuuccucuacgcccaggccuccggccgcaucaccgucuccaccaagcgcucccagcaggccgucauccccaacaucggcucccgcccccgcguccgcaacauccccucccgcgucuccaucuacuggaccaucgucaagcccggcgacauccuccucaucaacuccaccggcaaccucaucgccccccgcggcuacuucaagauccgcuccggcaaguccuccaucaugcgcuccgacgcccccaucggcaagugcaacuccgccugcaucacccccaacggcuccauccccaacgacaagcccuuccagaacgucaaccgcaucaccuacggcgccugcccccgcuacgucaagcagaacacccucaagcucgccaccggcaugcgcaacguccccgagaagcagacccgcggcaucuucggcgccaucgccggcuucaucgagaacggcugggagggcauggucgacggcugguacggcuuccgccaccagaacuccgagggccgcggccaggccgccgaccucaaguccacccaggccgccaucgaccagaucaacggcaagcucaaccgccucaucggcaagaccaacgagaaguuccaccagaucgagaaggaguucuccgaggucgagggccgcauccaggaccucgagaaguacgucgaggacaccaagaucgaccucugguccuacaacgccgagcuccucgucgcccucgagaaccagcacaccaucgaccucaccgacuccgagaugaacaagcucuucgagaagaccaagaagcagcuccgcgagaacgccgaggacaugggcaacggcugcuucaagaucuaccacaagugcgacaacgccugcaucggcuccauccgcaacggcaccuacgaccacgacgucuaccgcgacgaggcccucaacaaccgcuuccagaucaagggcgucgagcucaaguccggcuacaaggacuggauccucuggaucuccuucgccaucuccugcuuccuccucugcgucgcccuccucggcuucaucaugugggccugccagaagggcaacauccgcugcaacaucugcaucuga

SEQ ID NO: 108556 - RNA, 1701 nt, Artificial Sequence
  derived and/or modified CDS sequence (opt2) from hemagglutinin__InfluenzaA__AIJ10733
augaagaccaucaucgcccucuccuacauccucugccucgucuucgcccaggagcuccccggcaacgacaacuccaccgccacccucugccucggccaccacgccguccccaacggcaccaucgucaagaccaucaccaacgaccagaucgaggucaccaacgccaccgagcucguccaguccuccuccaccggcgagaucugcaacuccccccaccagauccucgacggcgagaacugcacccucaucgacgcccuccucggcgacccccagugcgacggcuuccagaacaagaagugggaccucuucgucgagcgcuccaaggcccacuccaacugcuaccccuacgacguccccgacuacgccucccuccgcucccucgucgccuccuccggcacccucgaguucaacaacgaguccuucaacuggaccggcgucacccagaacggcaccuccuccgccugcauccgccgcuccaacaacuccuucuucucccgccucaacuggcucacccaccucaacuuccgcuaccccgcccucaacgucaccaugcccaacaacgagcaguucgacaagcucuacaucuggggcguccaccaccccggcaccgacaaggaccagaucuuccucuacgcccaggccuccggccgcaucaccgucuccaccaagcgcucccagcaggccgucauccccaacaucggcucccgcccccgcguccgcaacauccccucccgcgucuccaucuacuggaccaucgucaagcccggcgacauccuccucaucaacuccaccggcaaccucaucgccccccgcggcuacuucaagauccgcuccggcaaguccuccaucaugcgcuccgacgcccccaucggcaagugcaaguccgccugcaucacccccaacggcuccauccccaacgacaagcccuuccagaacgucaaccgcaucaccuacggcgccugcccccgcuacgucaagcagaacacccucaagcucgccaccggcaugcgcaacguccccgagaagcagacccgcggcaucuucggcgccaucgccggcuucaucgagaacggcugggagggcauggucgacggcugguacggcuuccgccaccagaacuccgagggccgcggccaggccgccgaccucaaguccacccaggccgccaucgaccagaucaacggcaagcucaaccgccucaucggcaagaccaacgagaaguuccaccagaucgagaaggaguucuccgaggucgagggccgcauccaggaccucgagaaguacgucgaggacaccaagaucgaccucugguccuacaacgccgagcuccucgucgcccucgagaaccagcacaccaucgaccucaccgacuccgagaugaacaagcucuucgagaagaccaagaagcagcuccgcgagaacgccgaggacaugggcaacggcugcuucaagaucuaccacaagugcgacaacgccugcaucggcuccauccgcaacggcaccuacgaccacgacgucuaccgcgacgaggcccucaacaaccgcuuccagaucaagggcgucgagcucaaguccggcuacaaggacuggauccucuggaucuccuucgccaucuccugcuuccuccucugcgucgcccuccucggcuucaucaugugggccugccagaagggcaacauccgcugcaacaucugcaucuga

SEQ ID NO: 108557 - RNA, 1701 nt, Artificial Sequence
  derived and/or modified CDS sequence (opt2) from hemagglutinin__InfluenzaA__AIJ10734
augaagaccaucaucgcccucuccuacauccucugccucgucuucgcccagaagcuccccgagaacgacaacuccaccgccacccucugccucggccaccacgccguccccaacggcaccaucgucaagaccaucaccaacgaccagaucgaggucaccaacgccaccgagcucguccaguccuccuccaccggcgagaucugcaacuccccccaccagauccucgacggcgagaacugcacccucaucgacgcccuccucggcgacccccagugcgacggcuuccagaacaagaagugggaccucuucgucgagcgcuccaaggcccacuccaacugcuaccccuacgacguccccgacuacgccucccuccgcucccucgucgccuccuccggcacccucgaguucaacaacgaguccuucaacuggaccggcgucacccagaacggcaccuccuccgccugcauccgccgcuccaacaacuccuucuucucccgccucaacuggcucacccaccucaacuucaaguaccccgcccucaacgucaccaugcccaacaacgagcaguucgacaagcucuacaucuggggcguccaccaccccggcaccgacaaggaccagaucuuccucuacgcccaggccuccggccgcaucaccgucuccaccaagcgcucccagcaggccgucauccccaacaucggcucccgcccccgcguccgcaacauccccucccgcaucuccaucuacuggaccaucgucaagcccggcgacauccuccucaucaacuccaccggcaaccucaucgccccccgcggcuacuucaagauccgcuccggcaaguccuccaucaugcgcuccgacgcccccaucggcaagugcaacuccaccugcaucacccccaacggcuccauccccaacgacaagcccuuccagaacgucaaccgcaucaccuacggcgccugcccccgcuacgucaagcagaacacccucaagcucgccaccggcaugcgcaacguccccgagaagcagacccgcggcaucuucggcgccaucgccggcuucaucgagaacggcugggagggcauggucgacggcugguacggcuuccgccaccagaacuccgagggccgcggccaggccgccgaccucaaguccacccaggccgccaucgaccagaucaacggcaagcucaaccgccucaucggcaagaccaacgagaaguuccaccagaucgagaaggaguucuccgaggucgagggccgcauccaggaccucgagaaguacgucgaggacaccaagaucgaccucugguccuacaacgccgagcuccucgucgcccucgagaaccagcacaccaucgaccucaccgacuccgagaugaacaagcucuucgagaagaccaagaagcagcuccgcgagaacgccgaggacaugggcaacggcugcuucaagaucuaccacaagugcgacaacgccugcaucggcuccauccgcaacggcaccuacgaccacgacgucuaccgcgacgaggcccucaacaaccgcuuccagaucaagggcgucgagcucaaguccggcuacaaggacuggauccucuggaucuccuucgccaucuccugcuuccuccucugcgucgcccuccucggcuucaucaugugggccugccagaagggcaacauccgcugcaacaucugcaucuga

SEQ ID NO: 108558 - RNA, 1701 nt, Artificial Sequence
  derived and/or modified CDS sequence (opt2) from hemagglutinin__InfluenzaA__AIJ10735
augaagaccaucaucgcccucuccuacauccucugccucaucuucgcccagaagcuccccgagaacgacaacuccaccgccacccucugccucggccaccacgccguccccaacggcaccaucgucaagaccaucaccaacgaccagaucgaggucaccaacgccaccgagcucguccaguccuccuccaccggcgagaucugcaacuccccccaccagauccucgacggcgagaacugcacccucaucgacgcccuccucggcgacccccagugcgacggcuuccagaacaagaagugggaccucuucgucgagcgcuccaaggcccacuccaacugcuaccccuacgacguccccgacuacgccucccuccgcucccucgucgccuccuccggcacccucgaguucaacaacgaguccuucaacuggaccggcgucacccagaacggcaccuccuccgccugcauccgccgcuccaacaacuccuucuucucccgccucaacuggcucacccaccucaacuucaaguaccccgcccucaacgucaccaugcccaacaacgagcaguucgacaagcucuacaucuggggcguccaccaccccggcaccgacaaggaccagaucuuccucuacgcccaggccuccggccgcaucaccgucuccaccaagcgcucccagcaggccgucauccccaacaucggcucccgcccccgcguccgcaacauccccucccgcgucuccaucuacuggaccaucgucaagcccggcgacauccuccucaucaacuccaccggcaaccucaucgccccccgcggcuacuucaagauccgcuccggcaaguccuccaucaugcgcuccgacgcccccaucggcaagugcaacuccaccugcaucacccccaacggcuccauccccaacgacaagcccuuccagaacgucaaccgcaucaccuacggcgccugcccccgcuacgucaagcagaacacccucaagcucgccaccggcaugcgcaacguccccgagaagcagacccgcggcaucuucggcgccaucgccggcuucaucgagaacggcugggagggcauggucgacggcugguacggcuuccgccaccagaacuccgagggcaagggccaggccgccgaccucaaguccacccaggccgccaucgaccagaucaacggcaagcucaaccgccucaucggcaagaccaacgagaaguuccaccagaucgagaaggaguucuccgaggucgagggccgcauccaggaccucgagaaguacgucgaggacaccaagaucgaccucugguccuacaacgccgagcuccucgucgcccucgagaaccagcacaccaucgaccucaccgacuccgagaugaacaagcucuucgagaagaccaagaagcagcuccgcgagaacgccgaggacaugggcaacggcugcuucaagaucuaccacaagugcgacaacgccugcaucggcuccauccgcaacggcaccuacgaccacgacgucuaccgcgacgaggcccucaacaaccgcuuccagaucaagggcgucgagcucaaguccggcuacaaggacuggauccucuggaucuccuucgccaucuccugcuuccuccucugcgucgcccuccucggcuucaucaugugggccugccagaagggcaacauccgcugcaacaucugcaucuga

SEQ ID NO: 108559 - RNA, 1701 nt, Artificial Sequence
  derived and/or modified CDS sequence (opt2) from hemagglutinin__InfluenzaA__AIJ10736
augaagaccaucaucgcccucuccuacauccucugccucgucuucgcccagaagcuccccggcaacgacaacuccaccgccacccucugccucggccaccacgccguccccaacggcaccaucgucaagaccaucaccaacgaccgcaucgaggucaccaacgccaccgagcucguccagaacuccaccaucggcgagaucugcgacuccccccaccagauccucgacggcgagaacugcacccucaucgacgcccuccucggcgacccccagugcgacggcuuccagaacaagaagugggaccucuucgucgagcgcuccaaggccuacuccaacugcuaccccuacgacguccccgacuacgccucccuccgcucccucgucgccuccuccggcacccucgaguucaacaacgaguccuucaacuggaccggcgucacccagaacggcaccuccuccgccugcauccgccgcuccaacaacuccuucuucucccgccucaacuggcucacccaccucaacuucaaguaccccgcccucaacgucaccaugcccaacaacgagcaguucgacaagcucuacaucuggggcguccaccaccccggcaccgacaaggaccagaucuuccucuacgcccaguccuccggccgcaucaccgucuccaccaagcgcucccagcaggccgucauccccaacaucggcucccgcccccgcauccgcaacauccccucccgcaucuccaucuacuggaccaucgucaagcccggcgacauccuccucaucaacuccaccggcaaccucaucgccccccgcggcuacuucaagauccgcuccggcaaguccuccaucaugcgcuccgacgcccccaucggcaagugcaaguccgagugcaucacccccaacggcuccauccccaacgacaagcccuuccagaacgucaaccgcaucaccuacggcgccugcccccgcuacgucaagcaguccacccucaagcucgccaccggcaugcgcaacguccccgagaagcagacccgcggcaucuucggcgccaucgccggcuucaucgagaacggcugggagggcauggucgacggcugguacggcuuccgccaccagaacuccgagggccgcggccaggccgccgaccucaaguccacccaggccgccaucgaccagaucaacggcaagcucaaccgccucaucggcaagaccaacgagaaguuccaccagaucgagaaggaguucuccgaggucgagggccgcauccaggaccucgagaaguacgucgaggacaccaagaucgaccucugguccuacaacgccgagcuccucgucgcccucgagaaccagcacaccaucgaccucaccgacuccgagaugaacaagcucuucgagaagaccaagaagcagcuccgcgagaacgccgaggacaugggcaacggcugcuucaagaucuaccacaagugcgacaacgccugcaucggcuccauccgcaacggcaccuacgaccacgacgucuaccgcgacgaggcccucaacaaccgcuuccagaucaagggcgucgagcucaaguccggcuacaaggacuggauccucuggaucuccuucgccaucuccugcuuccuccucugcgucgcccuccucggcuucaucaugugggccugccagaagggcaacauccgcugcaacaucugcaucuga

SEQ ID NO: 108560 - RNA, 1701 nt, Artificial Sequence
  derived and/or modified CDS sequence (opt2) from hemagglutinin__InfluenzaA__AIJ10737
augaagaccaucaucgcccucuccuacauccucugccucgucgucgcccagaagcuccccggcaacgacaacuccaccgccacccucugccucggccaccacgccguccccaacggcaccaucgucaagaccaucaccaacgaccgcaucgaggucaccaacgccaccgagcucguccagaacuccuccaucggcgagaucugcgacuccccccaccagauccucgacggcgagaacugcacccucaucgacgcccuccucggcgacccccagugcgacggcuuccagaacaagaagugggaccucuucgucgagcgcuccaaggccuacuccaacugcuaccccuacgacguccccgacuacgccucccuccgcucccucgucgccuccuccggcacccucgaguucaacaacgaguccuucaacuggaccggcgucacccagaacggcaccuccuccgccugcauccgccgcuccaacaacuccuucuucucccgccucaacuggcucacccaccucaacuucaaguaccccgcccucaacgucaccaugcccaacaacgagcaguucgacaagcucuacaucuggggcguccaccaccccggcaccgacaaggaccagaucuuccucuacgcccaguccuccggccgcaucaccgucuccaccaagcgcucccagcaggccgucauccccaacaucggcucccgcccccgcauccgcaacauccccucccgcaucuccaucuacuggaccaucgucaagcccggcgacauccuccucaucaacuccaccggcaaccucaucgccccccgcggcuacuucaagauccgcuccggcaaguccuccaucaugcgcuccgacgcccccaucggcaagugcaaguccgagugcaucacccccaacggcuccauccccaacgacaagcccuuccagaacgucaaccgcaucaccuacggcgccugcccccgcuacgucaagcaguccacccucaagcucgccaccggcaugcgcaacguccccgagaagcagacccgcggcaucuucggcgccaucgccggcuucaucgagaacggcugggagggcauggucgacggcugguacggcuuccgccaccagaacuccgagggccgcggccaggccgccgaccucaaguccacccaggccgccaucgaccagaucaacggcaagcucaaccgccucaucggcaagaccaacgagaaguuccaccagaucgagaaggaguucuccgaggucgagggccgcauccaggaccucgagaaguacgucgaggacaccaagaucgaccucugguccuacaacgccgagcuccucgucgcccucgagaaccagcacaccaucgaccucaccgacuccgagaugaacaagcucuucgagaagaccaagaagcagcuccgcgagaacgccgaggacaugggcaacggcugcuucaagaucuaccacaagugcgacaacgccugcaucggcuccauccgcaacggcaccuacgaccacgacgucuaccgcgacgaggcccucaacaaccgcuuccagaucaagggcgucgagcucaaguccggcuacaaggacuggauccucuggaucuccuucgccaucuccugcuuccuccucugcgucgcccuccucggcuucaucaugugggccugccagaagggcaacauccgcugcaacaucugcaucuga

SEQ ID NO: 108561 - RNA, 1701 nt, Artificial Sequence
  derived and/or modified CDS sequence (opt2) from hemagglutinin__InfluenzaA__AIJ10738
augaagaccaucaucgcccucuccuacauccucugccucgucuucgcccagaagcuccccggcaacgacaacuccaccgccacccucugccucggccaccacgccguccccaacggcaccaucgucaagaccaucaccaacgaccgcaucgaggucaccaacgccaccgagcucguccagaacuccuccaucggcgagaucugcgacuccccccaccagauccucgacggcgagaacugcacccucaucgacgcccuccucggcgacccccagugcgacggcuuccagaacaagaagugggaccucuucgucgagcgcuccaaggccuacuccaacugcuaccccuacgacguccccgacuacgccucccuccgcucccucgucgccuccuccggcacccucgaguucaacaacgaguccuucaacuggaccggcgucacccagaacggcaccuccuccgccugcauccgccgcuccaacaacuccuucuucucccgccucaacuggcucacccaccucaacuucaaguaccccgcccucaacgucaccaugcccaacaacgagcacuucgacaagcucuacaucuggggcguccaccaccccggcaccgacaaggaccagaucuuccucuacgcccaguccuccggccgcaucaccgucuccaccaagcgcucccagcaggccgucauccccaacaucggcucccgcccccgcauccgcaacauccccucccgcaucuccaucuacuggaccaucgucaagcccggcgacauccuccucaucaacuccaccggcaaccucaucgccccccgcggcuacuucaagauccgcuccggcaaguccuccaucaugcgcuccgacgcccccaucggcaagugcaaguccgagugcaucacccccaacggcuccauccccaacgacaagcccuuccagaacgucaaccgcaucaccuacggcgccugcccccgcuacgucaagcaguccacccucaagcucgccaccggcaugcgcaacguccccgagaagcagacccgcggcaucuucggcgccaucgccggcuucaucgagaacggcugggagggcauggucgacggcugguacggcuuccgccaccagaacuccgagggccgcggccaggccgccgaccucaaguccacccaggccgccaucgaccagaucaacggcaagcucaaccgccucaucggcaagaccaacgagaaguuccaccagaucgagaaggaguucuccgaggucgagggccgcauccaggaccucgagaaguacgucgaggacaccaagaucgaccucugguccuacaacgccgagcuccucgucgcccucgagaaccagcacaccaucgaccucaccgacuccgagaugaacaagcucuucgagaagaccaagaagcagcuccgcgagaacgccgaggacaugggcaacggcugcuucaagaucuaccacaagugcgacaacgccugcaucggcuccauccgcaacggcaccuacgaccacgacgucuaccgcgacgaggcccucaacaaccgcuuccagaucaagggcgucgagcucaaguccggcuacaaggacuggauccucuggaucuccuucgccaucuccugcuuccuccucugcgucgcccuccucggcuucaucaugugggccugccagaagggcaacauccgcugcaacaucugcaucuga

SEQ ID NO: 108562 - RNA, 1701 nt, Artificial Sequence; identical to SEQ ID NO: 105489
  derived and/or modified CDS sequence (opt2) from hemagglutinin__InfluenzaA__AIJ10740

SEQ ID NO: 108563 - RNA, 1701 nt, Artificial Sequence; identical to SEQ ID NO: 105489
  derived and/or modified CDS sequence (opt2) from hemagglutinin__InfluenzaA__AIJ10741

SEQ ID NO: 108564 - RNA, 1701 nt, Artificial Sequence
  derived and/or modified CDS sequence (opt2) from hemagglutinin__InfluenzaA__AIJ10742
augaagaccaucaucgcccucuccuacauccucugccucgucuucgcccagaagcuccccggcaacgacaacuccaccgccacccucugccucggccaccacgccguccccaacggcaccaucgucaagaccaucaccaacgaccgcaucgaggucaccaacgccaccgagcucguccagaacuccuccaucggcgagaucugcgacuccccccaccagauccucgacggcgagaacugcacccucaucgacgcccuccucggcgacccccagugcgacggcuuccagaacaagaagugggaccucuucgucgagcgcuccaaggccuacuccaacugcuaccccuacgacguccccgacuacgccucccuccgcucccucgucgccuccuccggcacccucgaguucaacaacgaguccuucaacuggaccggcgucacccagaacggcaccuccuccgccugcauccgccgcuccaacaacuccuucuucucccgccucaacuggcucacccaccucaacuucaaguaccccgcccucaacgucaccaugcccaacaacgagcaguucgacaagcucuacaucuggggcguccaccaccccggcaccgacaaggaccagaucuuccucuacgcccaguccuccggccgcaucaccgucgccaccaagcgcucccagcaggccgucauccccaacaucggcucccgcccccgcauccgcaacauccccucccgcaucuccaucuacuggaccaucgucaagcccggcgacauccuccucaucaacuccaccggcaaccucaucgccccccgcggcuacuucaagauccgcuccggcaaguccuccaucaugcgcuccgacgcccccaucggcaagugcaaguccgagugcaucacccccaacggcuccauccccaacgacaagcccuuccagaacgucaaccgcaucaccuacggcgccugcccccgcuacgucaagcaguccacccucaagcucgccaccggcaugcgcaacguccccgagaagcagacccgcggcaucuucggcgccaucgccggcuucaucgagaacggcugggagggcauggucgacggcugguacggcuuccgccaccagaacuccgagggccgcggccaggccgccgaccucaaguccacccaggccgccaucgaccagaucaacggcaagcucaaccgccucaucggcaagaccaacgagaaguuccaccagaucgagaaggaguucuccgaggucgagggccgcauccaggaccucgagaaguacgucgaggacaccaagaucgaccucugguccuacaacgccgagcuccucgucgcccucgagaaccagcacaccaucgaccucaccgacuccgagaugaacaagcucuucgagaagaccaagaagcagcuccgcgagaacgccgaggacaugggcaacggcugcuucaagaucuaccacaagugcgacaacgccugcaucggcuccauccgcaacggcaccuacgaccacgacgucuaccgcgacgaggcccucaacaaccgcuuccagaucaagggcgucgagcucaaguccggcuacaaggacuggauccucuggaucuccuucgccaucuccugcuuccuccucugcgucgcccuccucggcuucaucaugugggccugccagaagggcaacauccgcugcaacaucugcaucuga

SEQ ID NO: 108565 - RNA, 1701 nt, Artificial Sequence
  derived and/or modified CDS sequence (opt2) from hemagglutinin__InfluenzaA__AIJ10743
augaagaccaucaucgcccucuccuacauccucugccucgucuucgcccagaagcuccccggcaacgacaacuccaccgccacccucugccucggccaccacgccguccccaacggcaccaucgucaagaccaucaccaacgaccgcaucgaggucaccaacgccaccgagcucguccagaacuccuccaucggcgagaucugcgacuccccccaccagauccucgacggcgagaacugcacccucaucgacgcccuccucggcgacccccagugcgacggcuuccagaacaagaagugggaccucuucgucgagcgcuccaaggccuacuccaacugcuaccccuacgacguccccgacuacgccucccuccgcucccucgucgccuccuccggcacccucgaguucaacaacgaguccuucaacuggaccggcgucacccagaacggcaccuccuccgccugcauccgccgcuccaacaacuccuucuucucccgccucaacuggcucacccaccucaacuucaaguaccccgcccucaacgucaccaugcccaacaacgagcaguucgacaagcucuacaucuggggcguccaccaccccggcaccgacaaggaccagaucuuccucuacgcccaguccuccggccgcaucaccgucuccaccaagcgcucccagcaggccgucauccccaacaucggcucccgcccccgcauccgcaacauccccucccgcaucuccaucuacuggaccaucgucaagcccggcgacauccuccucaucaacuccaccggcaaccucaucgccccccgcggcuacuucaagauccgcuccggcaaguccuccaucaugcgcuccgacgcccccaucggcaagugcaaguccgagugcaucacccccaacggcuccauccccaacgacaagcccuuccagaacgucaaccgcaucaccuacggcgccugcccccgcuacgucaagcaguccacccucaagcucgccaccggcaugcgcaacguccccgagaagcagacccgcggcaucuucggcgccaucgccggcuucaucgagaacggcugggagggcauggucgacggcugguacggcuuccgccaccagaacuccgagggccgcggccaggccgccgaccucaaguccacccaggccgccaucgaccagaucaacggcaagcucaaccgccucaucggcaagaccaacgagaaguuccaccagaucgagaaggaguucuccgaggucgagggccgcauccaggaccucgagaaguacgucgaggacaucaagaucgaccucugguccuacaacgccgagcuccucgucgcccucgagaaccagcacaccaucgaccucaccgacuccgagaugaacaagcucuucgagaagaccaagaagcagcuccgcgagaacgccgaggacaugggcaacggcugcuucaagaucuaccacaagugcgacaacgccugcaucggcuccauccgcaacggcaccuacgaccacgacgucuaccgcgacgaggcccucaacaaccgcuuccagaucaagggcgucgagcucaaguccggcuacaaggacuggauccucuggaucuccuucgccaucuccugcuuccuccucugcgucgcccuccucggcuucaucaugugggccugccagaagggcaacauccgcugcaacaucugcaucuga

SEQ ID NO: 108566 - RNA, 1701 nt, Artificial Sequence
  derived and/or modified CDS sequence (opt2) from hemagglutinin__InfluenzaA__AIJ10744
augaagaccaucaucgcccucuccuacauccucugccucgucuucgcccagaagcuccccggcaacgacaacuccaccgccacccucugccucggccaccacgccguccccaacggcaccaucgucaagaccaucaccaacgaccgcaucgaggucaccaacgccaccgagcucguccagaacuccuccaucggcgagaucugcgacuccccccaccagauccucgacggcgagaacugcacccucaucgacgcccuccucggcgacccccagugcgacggcuuccagaacaagaagugggaccucuucgucgagcgcuccaaggccuacuccaacugcuaccccuacgacguccccgacuacgccucccuccgcucccucgucgccuccuccggcacccucgaguucaacaacgaguccuucaacuggaccggcgucacccagaacggcaccuccuccgccugcauccgccgcuccaacaacuccuucuucucccgccucaacuggcucacccaccucaacuucaaguaccccgcccucaacgucaccaugcccaacaacgagcaguucgacaagcucuacaucuggggcguccaccaccccggcaccgacaaggaccagaucuuccucuacgcccaguccuccggccgcaucaccgucuccaccaagcgcucccagcaggccgucauccccaacaucggcucccgcccccgcauccgcaacauccccucccgcaucuccaucuacuggaccaucgucaagcccggcgacauccuccucaucaacuccaccggcaaccucaucgccccccgcggcuacuucaagauccgcuccggcaaguccuccaucaugcgcuccgacgcccccaucggcaagugcaaguccgagugcaucacccccaacggcuccauccccaacgacaagcccuuccagaacgucaaccgcaucaccuacggcgccugcccccgcuacgucaagcagcgcacccucaagcucgccaccggcaugcgcaacguccccgagaagcagacccgcggcaucuucggcgccaucgccggcuucaucgagaacggcugggagggcauggucgacggcugguacggcuuccgccaccagaacuccgagggccgcggccaggccgccgaccucaaguccacccaggccgccaucgaccagaucaacggcaagcucaaccgccucaucggcaagaccaacgagaaguuccaccagaucgagaaggaguucuccgaggucgagggccgcauccaggaccucgagaaguacgucgaggacaccaagaucgaccucugguccuacaacgccgagcuccucgucgcccucgagaaccagcacaccaucgaccucaccgacuccgagaugaacaagcucuucgagaagaccaagaagcagcuccgcgagaacgccgaggacaugggcaacggcugcuucaagaucuaccacaagugcgacaacgccugcaucggcuccauccgcaacggcaccuacgaccacgacgucuaccgcgacgaggcccucaacaaccgcuuccagaucaagggcgucgagcucaaguccggcuacaaggacuggauccucuggaucuccuucgccaucuccugcuuccuccucugcgucgcccuccucggcuucaucaugugggccugccagaagggcaacauccgcugcaacaucugcaucuga

SEQ ID NO: 108567 - RNA, 1701 nt, Artificial Sequence; identical to SEQ ID NO: 106030
  derived and/or modified CDS sequence (opt2) from hemagglutinin__InfluenzaA__AIJ10745

SEQ ID NO: 108568 - RNA, 1701 nt, Artificial Sequence
  derived and/or modified CDS sequence (opt2) from hemagglutinin__InfluenzaA__AIJ10747
augaagaccaucaucgcccucuccuacauccucugccucgucuucgcccagaagcuccccggcaacgacaacuccaccgccacccucugccucggccaccacgccguccccaacggcaccaucgucaagaccaucaccaacgaccgcaucgaggucaccaacgccaccgagcucguccagaacuccuccaucggcgagaucugcgacuccccccaccagauccucgacggcgagaacugcacccucaucgacgcccuccucggcgacccccagugcgacgacuuccagaacaagaagugggaccucuucgucgagcgcuccaaggccuacuccaacugcuaccccuacgacguccccgacuacgccucccuccgcucccucgucgccuccuccggcacccucgaguucaacaacgagaacuucaacuggaccggcgucacccagaacggcaccuccuccgccugcauccgccgcuccaacaacuccuucuucucccgccucaacuggcucacccaccucaacuucaaguaccccgcccucaacgucaccaugcccaacaacgagcaguucgacaagcucuacaucuggggcguccaccaccccggcaccgacaaggaccagaucuuccucuacgcccaguccuccggccgcaucaccgucuccaccaagcgcucccagcaggccgucauccccaacaucggcucccgcccccgcauccgcaacauccccucccgcaucuccaucuacuggaccaucgucaagcccggcgacauccuccucaucaacuccaccggcaaccucaucgccccccgcggcuacuucaagauccgcuccggcaaguccuccaucaugcgcuccgacgcccccaucggcaagugcaaguccgagugcaucacccccaacggcuccauccccaacgacaagcccuuccagaacgucaaccgcaucaccuacggcgccugcccccgcuacgucaagcaguccacccucaagcucgccaccggcaugcgcaacguccccgagaagcagacccgcggcaucuucggcgccaucgccggcuucaucgagaacggcugggagggcauggucgacggcugguacggcuuccgccaccagaacuccgagggccgcggccaggccgccgaccucaaguccacccaggccgccaucgaccagaucaacggcaagcucaaccgccucaucggcaagaccaacgagaaguuccaccagaucgagaaggaguucuccgaggucgagggccgcauccaggaccucgagaaguacgucgaggacaccaagaucgaccucugguccuacaacgccgagcuccucgucgcccucgagaaccagcacaccaucgaccucaccgacuccgagaugaacaagcucuucgagaagaccaagaagcagcuccgcgagaacgccgaggacaugggcaacggcugcuucaagaucuaccacaagugcgacaacgccugcaucggcuccauccgcaacggcaccuacgaccacgacgucuaccgcgacgaggcccucaacaaccgcuuccagaucaagggcgucgagcucaaguccggcuacaaggacuggauccucuggaucuccuucgccaucuccugcuuccuccucugcgucgcccuccucggcuucaucaugugggccugccagaagggcaacauccgcugcaacaucugcaucuga

SEQ ID NO: 108569 - RNA, 1701 nt, Artificial Sequence; identical to SEQ ID NO: 108568
  derived and/or modified CDS sequence (opt2) from hemagglutinin__InfluenzaA__AIJ10748

SEQ ID NO: 108570 - RNA, 1701 nt, Artificial Sequence
  derived and/or modified CDS sequence (opt2) from hemagglutinin__InfluenzaA__AIJ10750
augaagaccaucaucgcccucuccuacauccucugccucgucuucgcccagaagcuccccggcaacgacaacuccaccgccacccucugccucggccaccacgccguccccaacggcaccaucgucaagaccaucaccaacgaccgcaucgaggucaccaacgccaccgagcucguccagaacuccuccaucggcgagaucugcgacuccccccaccagauccucgacggcgagaacugcacccucaucgacgcccuccucggcgacccccagugcgacggcuuccagaacaagaagugggaccucuucgucgagcgcuccaaggccuacuccaacugcuaccccuacgacguccccgacuacgccucccuccgcucccucgucgccuccuccggcacccucgaguucaacaacgaguccuucaacuggaccggcgucacccagaacggcaccuccuccgccugcauccgccgcuccaacuccuccuucuucucccgccucaacuggcucacccaccucaacuucaaguaccccgcccucaacgucaccaugcccaacaacgagcaguucgacaagcucuacaucuggggcguccaccaccccggcaccgacaaggaccagaucuuccucuacgcccaguccuccggccgcaucaccgucuccaccaagcgcucccagcaggccgucauccccaacaucggcucccgcccccgcauccgcaacauccccucccgcaucuccaucuacuggaccaucgucaagcccggcgacauccuccucaucaacuccaccggcaaccucaucgccccccgcggcuacuucaagauccgcuccggcaaguccuccaucauccgcuccgacgcccccaucggcaagugcaaguccgagugcaucacccccaacggcuccauccccaacgacaagcccuuccagaacgucaaccgcaucaccuacggcgccugcccccgcuacgucaagcaguccacccucaagcucgccaccggcaugcgcaacguccccgagaagcagacccgcggcaucuucggcgccaucgccggcuucaucgagaacggcugggagggcauggucgacggcugguacggcuuccgccaccagaacuccgagggccgcggccaggccgccgaccucaaguccacccaggccgccaucgaccagaucaacggcaagcucaaccgccucaucggcaagaccaacgagaaguuccaccagaucgagaaggaguucuccgaggucgagggccgcauccaggaccucgagaaguacgucgaggacaccaagaucgaccucugguccuacaacgccgagcuccucgucgcccucgagaaccagcacaccaucgaccucaccgacuccgagaugaacaagcucuucgagaagaccaagaagcagcuccgcgagaacgccgaggacaugggcaacggcugcuucaagaucuaccacaagugcgacaacgccugcaucggcuccauccgcaacggcaccuacgaccacaacgucuaccgcgacgaggcccucaacaaccgcuuccagaucaagggcgucgagcucaaguccggcuacaaggacuggauccucuggaucuccuucgccaucuccugcuuccuccucugcgucgcccuccucggcuucaucaugugggccugccagaagggcaacauccgcugcaacaucugcaucuga

SEQ ID NO: 108571 - RNA, 1701 nt, Artificial Sequence
  derived and/or modified CDS sequence (opt2) from hemagglutinin__InfluenzaA__AIJ10752
augaagaccaucaucgcccucuccuacauccucugccucgucuucgcccagaagcuccccggcaacgacaacuccaccgccacccucugccucggccaccacgccguccccaacggcaccaucgucaagaccaucaccaacgaccgcaucgaggucaccaacgccaccgagcucguccagaacuccuccaucggcgagaucugcgacuccccccaccagauccucgacggcgagaacugcacccucaucgacgcccuccucggcgacccccagugcgacggcuuccagaacaagaagugggaccucuucgucgagcgcuccaaggccuacuccaacugcuaccccuacgacguccccgacuacgccucccuccgcucccucgucgccuccuccggcacccucgaguucaacaacgaguccuucaacuggaccggcgucacccagaacggcaccuccuccgccugcauccgccgcuccaacuccuccuucuucucccgccucaacuggcucacccaccucaacuucaaguaccccgcccucaacgucaccaugcccaacaacgagcaguucgacaagcucuacaucuggggcguccaccaccccggcaccgacaaggaccagaucuuccucuacgcccaguccuccggccgcaucaccgucuccaccaagcgcucccagcaggccgucauccccaacaucggcucccgcccccgcauccgcaacauccccucccgcaucuccaucuacuggaccaucgucaagcccggcgacauccuccucaucaacuccaccggcaaccucaucgccccccgcggcuacuucaagauccgcuccggcaaguccuccaucaugcgcuccgacgcccccaucggcaagugcaaguccgagugcaucacccccaacggcuccauccccaacgacaagcccuuccagaacgucaaccgcaucaccuacggcgccugcccccgcuacgucaagcaguccacccucaagcucgccaccggcaugcgcaacguccccgagaagcagacccgcggcaucuucggcgccaucgccggcuucaucgagaacggcugggagggcauggucgacggcugguacggcuuccgccaccagaacuccgagggccgcggccaggccgccgaccucaaguccacccaggccgccaucgaccagaucaacggcaagcucaaccgccucaucggcaagaccaacgagaaguuccaccagaucgagaaggaguucuccgaggucgagggccgcauccaggaccucgagaaguacgucgaggacaccaagaucgaccucugguccuacaacgccgagcuccucgucgcccucgagaaccagcacaccaucgaccucaccgacuccgagaugaacaagcucuucgagaagaccaagaagcagcuccgcgagaacgccgaggacaugggcaacggcugcuucaagaucuaccacaagugcgacaacgccugcaucggcuccauccgcaacggcaccuacgaccacgacgucuaccgcgacgaggcccucaacaaccgcuuccagaucaagggcgucgagcucaaguccggcuacaaggacuggauccucuggaucuccuucgccauguccugcuuccuccucugcgucgcccuccucggcuucaucaugugggccugccagaagggcaacauccgcugcaacaucugcaucuga

SEQ ID NO: 108572 - RNA, 1701 nt, Artificial Sequence
  derived and/or modified CDS sequence (opt2) from hemagglutinin__InfluenzaA__AIJ10753
augaagaccaucaucgcccucuccuacauccucugccucgucuucgcccagaagcuccccggcaacgacaacuccaccgccacccucugccucggccaccacgccguccccaacggcaccaucgucaagaccaucaccaacgaccgcaucgaggucaccaacgccaccgagcucguccagaacuccuccaucggcgagaucugcgacuccccccaccagauccucgacggcgagaacugcacccucaucgacgcccuccucggcgacccccagugcgacggcuuccagaacaagaagugggaccucuucgucgagcgcuccaaggccuacuccaacugcuaccccuacgacguccccgacuacgccucccuccgcucccucgucgccuccuccggcacccucgaguucaacaacgaguccuucaacugggccggcgucacccagaacggcaccuccuccuccugcauccgcggcuccaacaacuccuucuucucccgccucaacuggcucacccaccucaacuucaaguaccccgcccucaacgucaccaugcccaacaacgagcaguucgacaagcucuacaucuggggcguccaccaccccggcaccgacaaggaccagaucuuccucuacgcccaguccuccggccgcaucaccgucuccaccaagcgcucccagcaggccgucauccccaacaucggcucccgcccccgcauccgcaacauccccucccgcaucuccaucuacuggaccaucgucaagcccggcgacauccuccucaucaacuccaccggcaaccucaucgccccccgcggcuacuucaagauccgcuccggcaaguccuccaucaugcgcuccgacgcccccaucggcaagugcaaguccgagugcaucacccccaacggcuccauccccaacgacaagcccuuccagaacgucaaccgcaucaccuacggcgccugcccccgcuacgucaagcaguccacccucaagcucgccaccggcaugcgcaacguccccgagaagcagacccgcggcaucuucggcgccaucgccggcuucaucgagaacggcugggagggcaugauggacggcugguacggcuuccgccaccagaacuccgagggccgcggccaggccgccgaccucaaguccacccaggccgccaucgaccagaucaacggcaagcucaaccgccucaucggcaagaccaacgagaaguuccaccagaucgagaaggaguucuccgaggucgagggccgcauccaggaccucgagaaguacgucgaggacaccaagaucgaccucugguccuacaacgccgagcuccucgucgcccucgagaaccagcacaccaucgaccucaccgacuccgagaugaacaagcucuucgagaagaccaagaagcagcuccgcgagaacgccgaggacaugggcaacggcugcuucaagaucuaccacaagugcgacaacgccugcaucggcuccauccgcaacggcaccuacgaccacgacgucuaccgcgacgaggcccucaacaaccgcuuccagaucaagggcgucgagcucaaguccggcuacaaggacuggauccucuggaucuccuucgccaucuccugcuuccuccucugcgucgcccuccucggcuucaucaugugggccugccagaagggcaacauccgcugcaacaucugcaucuga

SEQ ID NO: 108573 - RNA, 1701 nt, Artificial Sequence; identical to SEQ ID NO: 106030
  derived and/or modified CDS sequence (opt2) from hemagglutinin__InfluenzaA__AIJ10754

SEQ ID NO: 108574 - RNA, 1701 nt, Artificial Sequence
  derived and/or modified CDS sequence (opt2) from hemagglutinin__InfluenzaA__AIJ10755
augaagaccaucaucgcccucuccuacauccucugccucgucuucgcccagaagcuccccggcaacgacaacuccaccgccacccucugccucggccaccacgccguccccaacggcaccaucgucaagaccaucaccaacgaccgcaucgaggucaccaacgccaccgagcucguccagaacuccuccaucggcgagaucugcgacuccccccaccagauccucgacggcgagaacugcacccucaucgacgcccuccucggcgacccccagugcgacggcuuccagaacaagaagugggaccucuucgucgagcgcuccaaggccuacuccaacugcuaccccuacgacguccccgacuacgccucccuccgcucccucgucgccuccuccggcacccucgaguucaacaacgaguccuucaacugggccggcgucacccagaacggcaccuccuccgccugcauccgcggcuccaacuccuccuucuucucccgccucaacuggcucacccaccucaacuucaaguaccccgcccucaacgucaccaugcccaacaacgagcaguucgacaagcucuacaucuggggcguccaccaccccggcaccgacaaggaccagaucuuccucuacgcccaguccuccggccgcaucaccgucuccaccaagcgcucccagcaggccgucauccccaacaucggcucccgcccccgcauccgcaacauccccucccgcaucuccaucuacuggaccaucgucaagcccggcgacauccuccucaucaacuccaccggcaaccucaucgccccccgcggcuacuucaagauccgcuccggcaaguccuccaucaugcgcuccgacgcccccaucggcaagugcaaguccgagugcaucacccccaacggcuccauccccaacgacaagcccuuccagaacgucaaccgcaucaccuacggcgccugcccccgcuacgucaagcaguccacccucaagcucgccaccggcaugcgcaacguccccgagaagcagacccgcggcaucuucggcgccaucgccggcuucaucgagaacggcugggagggcauggucgacggcugguacggcuuccgccaccagaacuccgagggccgcggccaggccgccgaccucaaguccacccaguccgccaucgaccagaucaacggcaagcucaaccgccucaucggcaagaccaacgagaaguuccaccagaucgagaaggaguucuccgaggucgagggccgcauccaggaccucgagaaguacgucgaggacaccaagaucgaccucugguccuacaacgccgagcuccucgucgcccucgagaaccagcacaccaucgaccucaccgacuccgagaugaacaagcucuucgagaagaccaagaagcagcuccgcgagaacgccgaggacaugggcaacggcugcuucaagaucuaccacaagugcgacaacgccugcaucggcuccauccgcaacggcaccuacgaccacgacgucuaccgcgacgaggcccucaacaaccgcuuccagaucaagggcgucgagcucaaguccggcuacaaggacuggauccucuggaucuccuucgccaucuccugcuuccuccucugcgucgcccuccucggcuucaucaugugggccugccagaagggcaacauccgcugcaacaucugcaucuga

SEQ ID NO: 108575 - RNA, 1701 nt, Artificial Sequence; identical to SEQ ID NO: 106030
  derived and/or modified CDS sequence (opt2) from hemagglutinin__InfluenzaA__AIJ10756

SEQ ID NO: 108576 - RNA, 1701 nt, Artificial Sequence
  derived and/or modified CDS sequence (opt2) from hemagglutinin__InfluenzaA__AIJ10757
augaagaccaucaucgcccucuccuacauccucugccucgucaucgcccagaagcuccccggcaacgacaacuccaccgccacccucugccucggccaccacgccguccccaacggcaccaucgucaagaccaucaccaacgaccgcaucgaggucaccaacgccaccgagcucguccagaacuccuccaucggcgagaucugcgacuccccccaccagauccucgacggcgagaacugcacccucaucgacgcccuccucggcgacccccagugcgacggcuuccagaacaagaagugggaccucuucgucgagcgcuccaaggccuacuccaacugcuaccccuacgacguccccgacuacgccucccuccgcucccucgucgccuccuccggcacccucgaguucaacaacgaguccuucaacugggccggcgucacccagaacggcaccuccuccgccugcauccgcggcuccaacuccuccuucuucucccgccucaacuggcucacccaccucaacuucaaguaccccgcccucaacgucaccaugcccaacaacgagcaguucgacaagcucuacaucuggggcguccaccaccccggcaccgacaaggaccagaucuuccucuacgcccaguccuccggccgcaucaccgucuccaccaagcgcucccagcaggccgucauccccaacaucggcucccgcccccgcauccgcaacauccccucccgcaucuccaucuacuggaccaucgucaagcccggcgacauccuccucaucaacuccaccggcaaccucaucgccccccgcggcuacuucaagauccgcuccggcaaguccuccaucaugcgcuccgacgcccccaucggcaagugcaaguccgagugcaucacccccaacggcuccauccccaacgacaagcccuuccagaacgucaaccgcaucaccuacggcgccugcccccgcuacgucaagcaguccacccucaagcucgccaccggcaugcgcaacguccccgagaagcagacccgcggcaucuucggcgccaucgccggcuucaucgagaacggcugggagggcauggucgacggcugguacggcuuccgccaccagaacuccgagggccgcggccaggccgccgaccucaaguccacccaggccgccaucgaccagaucaacggcaagcucaaccgccucaucggcaagaccaacgagaaguuccaccagaucgagaaggaguucuccgaggucgagggccgcauccaggaccucgagaaguacgucgaggacaccaagaucgaccucugguccuacaacgccgagcuccucgucgcccucgagaaccagcacaccaucgaccucaccgacuccgagaugaacaagcucuucgagaagaccaagaagcagcuccgcgagaacgccgaggacaugggcaacggcugcuucaagaucuaccacaagugcgacaacgccugcaucggcuccauccgcaacggcaccuacgaccacgacgucuaccgcgacgaggcccucaacaaccgcuuccagaucaagggcgucgagcucaaguccggcuacaaggacuggauccucuggaucuccuucgccaucuccugcuuccuccucugcgucguccuccucggcuucaucaugugggccugccagaagggcaacauccgcugcaacaucugcaucuga

SEQ ID NO: 108577 - RNA, 1701 nt, Artificial Sequence
  derived and/or modified CDS sequence (opt2) from hemagglutinin__InfluenzaA__AIJ10758
augaagaccaucaucgcccucuccuacauccucugccucgucuucgcccagaagcuccccggcaacgacaacuccaccgccacccucugccucggccaccacgccguccccaacggcaccaucgucaagaccaucaccaacgaccgcaucgaggucaccaacgccaccgagcucguccagaacuccuccaucggcgagaucugcgacuccccccaccagauccucgacggcgagaacugcacccucaucgacgcccuccucggcgacccccagugcgacggcuuccagaacaagaagugggaccucuucgucgagcgcuccaaggccuacuccaacugcuaccccuacgacguccccgacuacgccucccuccgcucccucgucgccuccuccggcacccucgaguucaacaacgaguccuucaacugggccggcgucacccagaacggcaccuccuccgccugcauccgcggcuccaacuccuccuucuucucccgccucaacuggcucacccacuccaacuucaaguaccccgcccucaacgucaccaugcccaacaacgagcaguucgacaagcucuacaucuggggcguccaccaccccggcaccgacaaggaccagaucuuccucuacgcccaguccuccggccgcaucaccgucuccaccaagcgcucccagcaggccgucauccccaacaucggcucccgcccccgcauccgcaacauccccucccgcaucuccaucuacuggaccaucgucaagcccggcgacauccuccucaucaacuccaccggcaaccucaucgccccccgcggcuacuucaagauccgcuccggcaaguccuccaucaugcgcuccgacgcccccaucggcaagugcaaguccgagugcaucacccccaacggcuccauccccaacgacaagcccuuccagaacgucaaccgcaucaccuacggcgccugcccccgcuacgucaagcaguccacccucaagcucgccaccggcaugcgcaacguccccgagaagcagacccgcggcaucuucggcgccaucgccggcuucaucgagaacggcugggagggcaugauggacggcugguacggcuuccgccaccagaacuccgagggccgcggccaggccgccgaccucaaguccacccaggccgccaucgaccagaucaacggcaagcucaaccgccucaucggcaagaccaacgagaaguuccaccagaucgagaaggaguucuccgaggucgagggccgcauccaggaccucgagaaguacgucgaggacaccaagaucgaccucugguccuacaacgccgagcuccucgucgcccucgagaaccagcacaccaucgaccucaccgacuccgagaugaacaagcucuucgagaagaccaagaagcagcuccgcgagaacgccgaggacaugggcaacggcugcuucaagaucuaccacaagugcgacaacgccugcaucggcuccauccgcaacggcaccuacgaccacgacgucuaccgcgacgaggcccucaacaaccgcuuccagaucaagggcgucgagcucaaguccggcuacaaggacuggauccucuggaucuccuucgccaucuccugcuuccuccucugcgucgcccuccucggcuucaucaugugggccugccagaagggcaacauccgcugcaacaucugcaucuga

SEQ ID NO: 108578 - RNA, 1701 nt, Artificial Sequence; identical to SEQ ID NO: 106030
  derived and/or modified CDS sequence (opt2) from hemagglutinin__InfluenzaA__AIJ10759

SEQ ID NO: 108579 - RNA, 1701 nt, Artificial Sequence
  derived and/or modified CDS sequence (opt2) from hemagglutinin__InfluenzaA__AIJ10760
augaagaccaucaucgcccucuccuacauccucugccucgucaucgcccagaagcuccccggcaacgacaacuccaccgccacccucugccucggccaccacgccguccccaacggcaccaucgucaagaccaucaccaacgaccgcaucgaggucaccaacgccaccgagcucguccagaacuccuccaucggcgagaucugcgacuccccccaccagauccucgacggcgagaacugcacccucaucgacgcccuccucggcgacccccagugcgacggcuuccagaacaagaagugggaccucuucgucgagcgcuccaaggccuacuccaacugcuaccccuacgacguccccgacuacgccucccuccgcucccucgucgccuccuccggcacccucgaguucaacaacgaguccuucaacugggccggcgucacccagaacggcaccuccuccgccugcauccgcggcuccaacuccuccuucuucucccgccucaacuggcucacccaccucaacuucaaguaccccgcccucaacgucaccaugcccaacaacgagcaguucgacaagcucuacaucuggggcguccaccaccccggcaccgacaaggaccagaucuuccucuacgcccaguccuccggccgcaucaccgucuccaccaagcgcucccagcaggccgucauccccaacaucggcucccgcccccgcauccgcaacauccccucccgcaucuccaucuacuggaccaucgucaagcccggcgacauccuccucaucaacuccaccggcaaccucaucgccccccgcggcuacuucaagauccgcuccggcaaguccuccaucaugcgcuccgacgcccccaucggcaagugcaaguccgagugcaucacccccaacggcuccauccccaacgacaagcccuuccagaacgucaaccgcaucaccuacggcgccugcccccgcuacgucaagcaguccacccucaagcucgccaccggcaugcgcaacguccccgagaagcagacccgcggcaucuucggcgccaucgccggcuucaucgagaacggcugggagggcauggucgacggcugguacggcuuccgccaccagaacuccgagggccgcggccaggccgccgaccucaaguccacccaggccgccaucgaccagaucaacggcaagcucaaccgccucaucggcaagaccaacgagaaguuccaccagaucgagaaggaguucuccgaggucgagggccgcauccaggaccucgagaaguacgucgaggacaccaagaucgaccucugguccuacaacgccgagcuccucgucgcccucgagaaccagcacaccaucgaccucaccgacuccgagaugaacaagcucuucgagaagaccaagaagcagcuccgcgagaacgccgaggacaugggcaacggcugcuucaagaucuaccacaagugcgacaacgccugcaucggcuccauccgcaacggcaccuacgaccacgacgucuaccgcgacgaggcccucaacaaccgcuuccagaucaagggcgucgagcucaaguccggcuacaaggacuggauccucuggaucuccuucgccaucuccugcuuccuccucugcgucgcccuccucggcuucaucaugugggccugccagaagggcaacauccgcugcaacaucugcaucuga

SEQ ID NO: 108580 - RNA, 1701 nt, Artificial Sequence
  derived and/or modified CDS sequence (opt2) from hemagglutinin__InfluenzaA__AIJ10761
augaagaccaucaucgcccucuccuacauccucugccucgucuucgcccagaagcuccccggcaacgacaacuccaccgccacccucugccucggccaccacgccguccccaacggcaccaucgucaagaccaucaccaacgaccgcaucgaggucaccaacgccaccgagcucguccagaacuccuccaucggcgagaucugcgacuccccccaccagauccucgacggcgagaacugcacccucaucgacgcccuccucggcgacccccagugcgacggcuuccagaacaagaagugggaccucuucgucgagcgcuccaaggccuacuccaacugcuaccccuacgacguccccgacuacgccucccuccgcucccucgucgccuccuccggcacccucgaguucaacaacgaguccuucaacugggccggcgucacccagaacggcaccuccuccgccugcauccgcggcuccaacuccuccuucuucucccgccucaacuggcucacccaccucaacuucaaguaccccgcccucaacgucaccaugcccaacaacgagcaguucgacaagcucuacaucuggggcguccaccaccccggcaccgacaaggaccagaucuuccucuacgcccaguccuccggccgcaucaccgucuccaccaagcgcucccagcaggccgucauccccaacaucggcucccgcccccgcauccgcaacauccccucccgcaucuccaucuacuggaccaucgucaagcccggcgacauccuccucaucaacuccaccggcaaccucaucgccccccgcggcuacuucaagauccgcuccggcaaguccuccaucaugcgcuccgacgcccccaucggcaagugcaaguccgagugcaucacccccaacggcuccauccccaacgacaagcccuuccagaacgucaaccgcaucaccuacggcgccugcccccgcuacgucaagcaguccacccucaagcucgccaccggcaugcgcaacguccccgagaagcagacccgcggcaucuucggcgccaucgccggcuucaucgagaacggcugggagggcauggucgacggcugguacggcuuccgccaccagaacuccgagggccgcggccaggccgccgaccucaaguccacccaggccgccaucgaccagaucaacggcaagcucaaccgccucaucggcaagaccaacgagaaguuccaccagaucgagaaggaguucuccgaggucgagggccgcauccaggaccucgagaaguacgucgaggacaccaagaucgaccucugguccuacaacgccgagcuccucgucgcccucgagaaccagcacaccaucgaccucaccgacuccgagaugaacaagcucuucgagaagaccaagaagcagcuccgcgagaacgccgaggacaugggcaacggcugcuucaagaucuaccacaagugcgacaacgccugcaucggcuccauccgcaacggcaccuacgaccacgacgucuaccgcaacgaggcccucaacaagcgcuuccagaucaagggcgucgagcucaaguccggcuacaaggacuggauccucuggaucuccuucgccaucuccugcuuccuccucugcgucguccuccucggcuucaucaugugggccugccagaagggcaacauccgcugcaacaucugcaucuga

SEQ ID NO: 108581 - RNA, 1701 nt, Artificial Sequence; identical to SEQ ID NO: 107928
  derived and/or modified CDS sequence (opt2) from hemagglutinin__InfluenzaA__AIJ10762

SEQ ID NO: 108582 - RNA, 1701 nt, Artificial Sequence; identical to SEQ ID NO: 107928
  derived and/or modified CDS sequence (opt2) from hemagglutinin__InfluenzaA__AIJ10763

SEQ ID NO: 108583 - RNA, 1701 nt, Artificial Sequence; identical to SEQ ID NO: 107928
  derived and/or modified CDS sequence (opt2) from hemagglutinin__InfluenzaA__AIJ10764

SEQ ID NO: 108584 - RNA, 1701 nt, Artificial Sequence; identical to SEQ ID NO: 107928
  derived and/or modified CDS sequence (opt2) from hemagglutinin__InfluenzaA__AIJ10765

SEQ ID NO: 108585 - RNA, 1701 nt, Artificial Sequence; identical to SEQ ID NO: 107928
  derived and/or modified CDS sequence (opt2) from hemagglutinin__InfluenzaA__AIJ10766

SEQ ID NO: 108586 - RNA, 1701 nt, Artificial Sequence; identical to SEQ ID NO: 107928
  derived and/or modified CDS sequence (opt2) from hemagglutinin__InfluenzaA__AIJ10767

SEQ ID NO: 108587 - RNA, 1701 nt, Artificial Sequence
  derived and/or modified CDS sequence (opt2) from hemagglutinin__InfluenzaA__AIJ10768
augaagaccaucaucgcccucuccuacauccucugccucgucuucgcccagaagcuccccggcaacgacaacuccaccgccacccucugccucggccaccacgccguccccaacggcaccaucgucaagaccaucaccaacgaccgcaucgaggucaccaacgccaccgagcucguccagaacuccuccaucggcgagaucugcgacuccccccaccagauccucgacggcgagaacugcacccucaucgacgcccuccucggcgacccccagugcgacggcuuccagaacaagaagugggaccucuucgucgagcgcuccaaggccuacuccaacugcuaccccuacgacguccccgacuacgccucccuccgcucccucgucgccuccuccggcacccucgaguucaacaacgaguccuucaacugggccggcgucacccagaacggcaccuccuccgccugcauccgcggcuccaacuccuccuucuucucccgccucaacuggcucacccaccucaacuucaaguaccccgcccucaacgucaccaugcccaacaacgagcaguucgacaagcucuacaucuggggcguccaccaccccggcaccgacaaggaccagaucuuccucuacgcccaguccuccggccgcaucaccgucuccaccaagcgcucccagcaggccgucauccccaacaucggcucccgcccccgcauccgcaacauccccucccgcaucuccaucuacuggaccaucgucaagcccggcgacauccuccucaucaacuccaccggcaaccucaucgccccccgcggcuacuucaagauccgcuccggcaaguccuccaucaugcgcuccgacgcccccaucggcaagugcaaguccgagugcaucacccccaacggcuccauccccaacgacaagcccuuccagaacgucaaccgcaucaccuacggcgccugcccccgcuacgucaagcaguccacccucaagcucgccaccggcaugcgcaacauccccgagaagcagacccgcggcaucuucggcgccaucgccggcuucaucgagaacggcugggagggcauggucgacggcugguacggcuuccgccaccagaacuccgagggccgcggccaggccgccgaccucaaguccacccaggccgccaucgaccagaucaacggcaagcucaaccgccucaucggcaagaccaacgagaaguuccaccagaucgagaaggaguucuccgaggucgagggccgcauccaggaccucgagaaguacgucgaggacaccaagaucgaccucugguccuacaacgccgagcuccucgucgcccucgagaaccagcacaccaucgaccucaccgacuccgagaugaacaagcucuucgagaagaccaagaagcagcuccgcgagaacgccgaggacaugggcaacggcugcuucaagaucuaccacaagugcgacaacgccugcaucggcuccauccgcaacggcaccuacgaccacgacgucuaccgcgacgaggcccucaacaaccgcuuccagaucaagggcgucgagcucaaguccggcuacaaggacuggauccucuggaucuccuucgccaucuccugcuuccuccucugcgucguccuccucggcuucaucaugugggccugccagaagggcaacauccgcugcaacaucugcaucuga

SEQ ID NO: 108588 - RNA, 1701 nt, Artificial Sequence
  derived and/or modified CDS sequence (opt2) from hemagglutinin__InfluenzaA__AIJ10769
augaagaccaucaucgcccucuccuacauccucugccucgucuucgcccagaagcuccccggcaacgacaacuccaccgccacccucugccucggccaccacgccguccccaacggcaccaucgucaagaccaucaccaacgaccgcaucgaggucaccaacgccaccgagcucguccagaacuccuccaucggcgagaucugcgacuccccccaccagauccucgacggcgagaacugcacccucaucgacgcccuccucggcgacccccagugcgacggcuuccagaacaagaagugggaccucuucgucgagcgcuccaaggccuacuccaacugcuaccccuacgacguccccgacuacgccucccuccgcucccucgucgccuccuccggcacccucgaguucaacaacgaguccuucaacugggccggcgucacccagaacggcaccuccuccgccugcauccgcggcuccaacuccuccuucuucucccgccucaacuggcucacccaccucaacuucaaguaccccgcccucaacgucaccaugcccaacaacgagcaguucgacaagcucuacaucuggggcguccaccaccccggcaccgacaaggaccagaucuuccucuacgcccaguccuccggccgcaucaccgucuccaccaagcgcucccagcaggccgucauccccaacaucggcucccgcccccgcauccgcaacauccccucccgcaucuccaucuacuggaccaucgucaagcccggcgacauccuccucaucaacuccaccggcaaccucaucgccccccgcggcuacuucaagauccaguccggcaaguccuccaucaugcgcuccgacgcccccaucggcaagugcaaguccgagugcaucacccccaacggcuccauccccaacgacaagcccuuccagaacgucaaccgcaucaccuacggcgccugcccccgcuacgucaagcaguccacccucaagcucgccaccggcaugcgcaacguccccgagaagcagacccgcggcaucuucggcgccaucgccggcuucaucgagaacggcugggagggcauggucgacggcugguacggcuuccgccaccagaacuccgagggccgcggccaggccgccgaccucaaguccacccaggccgccaucgaccagaucaacggcaagcucaaccgccucaucggcaagaccaacgagaaguuccaccagaucgagaaggaguucuccgaggucgagggccgcauccaggaccucgagaaguacgucgaggacaccaagaucgaccucugguccuacaacgccgagcuccucgucgcccucgagaaccagcacaccaucgaccucaccgacuccgagaugaacaagcucuucgagaagaccaagaagcagcuccgcgagaacgccgaggacaugggcaacggcugcuucaagaucuaccacaagugcgacaacgccugcaucggcuccauccgcaacggcaccuacgaccacgacgucuaccgcgacgaggcccucaacaaccgcuuccagaucaagggcgucgagcucaaguccggcuacaaggacuggauccucuggaucuccuucgccaucuccugcuuccuccucugcgucguccuccucggcuucaucaugugggccugccagaagggcaacauccgcugcaacaucugcaucuga

SEQ ID NO: 108589 - RNA, 1701 nt, Artificial Sequence; identical to SEQ ID NO: 107928
  derived and/or modified CDS sequence (opt2) from hemagglutinin__InfluenzaA__AIJ10770

SEQ ID NO: 108590 - RNA, 1701 nt, Artificial Sequence; identical to SEQ ID NO: 107928
  derived and/or modified CDS sequence (opt2) from hemagglutinin__InfluenzaA__AIJ10771

SEQ ID NO: 108591 - RNA, 1701 nt, Artificial Sequence; identical to SEQ ID NO: 107928
  derived and/or modified CDS sequence (opt2) from hemagglutinin__InfluenzaA__AIJ10772

SEQ ID NO: 108592 - RNA, 1701 nt, Artificial Sequence; identical to SEQ ID NO: 107928
  derived and/or modified CDS sequence (opt2) from hemagglutinin__InfluenzaA__AIJ10773

SEQ ID NO: 108593 - RNA, 1701 nt, Artificial Sequence
  derived and/or modified CDS sequence (opt2) from hemagglutinin__InfluenzaA__AIJ10774
augaagaccaucaucgcccucuccuacauccucugccucgucuucgcccagaagcuccccggcaacgacaacuccaccgccacccucugccucggccaccacgccguccccaacggcaccaucgucaagaccaucaccaacgaccgcaucgaggucaccaacgccaccgagcucguccagaacuccuccaucggcgagaucugcaacuccccccaccagauccucgacggcgagaacugcacccucaucgacgcccuccucggcgacccccagugcgacggcuuccagaacaagaagugggaccucuucgucgagcgcuccaaggccuacuccaacugcuaccccuacgacguccccgacuacgccucccuccgcucccucgucgccuccuccggcacccucgaguucaacaacgaguccuucaacugggccggcgucacccagaacggcaccuccuccgccugcauccgcggcuccaacuccuccuucuucucccgccucaacuggcucacccaccucaacuucaaguaccccgcccucaacgucaccaugcccaacaacgagcaguucgacaagcucuacaucuggggcguccaccaccccggcaccgacaaggaccagaucuuccucuacgcccaguccuccggccgcaucaccgucuccaccaagcgcucccagcaggccgucauccccaacaucggcucccgcccccgcauccgcaacauccccucccgcaucuccaucuacuggaccaucgucaagcccggcgacauccuccucaucaacuccaccggcaaccucaucgccccccgcggcuacuucaagauccgcuccggcaaguccuccaucaugcgcuccgacgcccccaucggcaagugcaaguccgagugcaucacccccaacggcuccauccccaacgacaagcccuuccagaacgucaaccgcaucaccuacggcgccugcccccgcuacgucaagcaguccacccucaagcucgccaccggcaugcgcaacguccccgagaagcagacccgcggcaucuucggcgccaucgccggcuucaucgagaacggcugggagggcaugauggacggcugguacggcuuccgccaccagaacuccgagggccgcggccaggccgccgaccucaaguccacccaguccgccaucgaccagaucaacggcaagcucaaccgccucaucggcaagaccaacgagaaguuccaccagaucgagaaggaguucuccgaggucgagggccgcauccaggaccucgagaaguacgucgaggacaccaagaucgaccucugguccuacaacgccgagcuccucgucgcccucgagaaccagcacaccaucgaccucaccgacuccgagaugaacaagcucuucgagaagaccaagaagcagcuccgcgagaacgccgaggacaugggcaacggcugcuucaagaucuaccacaagugcgacaacgccugcaucggcuccauccgcaacggcaccuacgaccacgacgucuaccgcgacgaggcccucaacaaccgcuuccagaucaagggcgucgagcucaaguccggcuacaaggacuggauccucuggaucuccuucgccaucuccugcuuccuccucugcgucguccuccucggcuucaucaugugggccugccagaagggcaacauccgcugcaacaucugcaucuga

SEQ ID NO: 108594 - RNA, 1701 nt, Artificial Sequence
  derived and/or modified CDS sequence (opt2) from hemagglutinin__InfluenzaA__AIJ10776
augaagaccaucaucgcccucuccugcauccucugccucgucuucgcccagaagcuccccggcaacgacaacuccaccgccacccucugccucggccaccacgccguccccaacggcaccaucgucaagaccaucaccaacgaccgcaucgaggucaccaacgccaccgagcucguccagaacuccuccaucggcgagaucugcgacuccccccaccagauccucgacggcgagaacugcacccucaucgacgcccuccucggcgacccccagugcgacggcuuccagaacaagaagugggaccucuucgucgagcgcuccaaggccuacuccaacugcuaccccuacgacguccccgacuacgccucccuccgcucccucgucgccuccuccggcacccucgaguucaacaacgaguccuucaacugggccggcgucacccagaacggcaccuccuccgccugcauccgcggcuccaacuccuccuucuucucccgccucaacuggcucacccaccucaacuucaaguaccccgcccucaacgucaccaugcccaacaacgagcaguucgacaagcucuacaucuggggcguccaccaccccggcaccgacaaggaccagaucuuccucuacgcccaguccuccggccgcaucaccgucuccaccaagcgcucccagcaggccgucauccccaacaucggcucccgcccccgcauccgcaacauccccucccgcaucuccaucuacuggaccaucgucaagcccggcgacauccuccucaucaacuccaccggcaaccucaucgccccccgcggcuacuucaagauccgcuccggcaaguccuccaucaugcgcuccgacgcccccaucggcaagugcaaguccgagugcaucacccccaacggcuccauccccaacgacaagcccuuccagaacgucaaccgcaucaccuacggcgccugcccccgcuacgucaagcaguccacccucaagcucgccaccggcaugcgcaacguccccgagaagcagacccgcggcaucuucggcgccaucgccggcuucaucgagaacggcugggagggcauggucgacggcugguacggcuuccgccaccagaacuccgagggccgcggccaggccgccgaccucaaguccacccaggccgccaucgaccagaucaacggcaagcucaaccgccucaucggcaagaccaacgagaaguuccaccagaucgagaaggaguucuccgaggucgagggccgcauccaggaccucgagaaguacgucgaggacaccaagaucgaccucugguccuacaacgccgagcuccucgucgcccucgagaaccagcacaccaucgaccucaccgacuccgagauguccaagcucuucgagaagaccaagaagcagcuccgcgagaacgccgaggacaugggcaacggcugcuucaagaucuaccacaagugcgacaacgccugcaucggcuccauccgcaacggcaccuacgaccacgacgucuaccgcgacgaggcccucaacaaccgcuuccagaucaagggcgucgagcucaaguccggcuacaaggacuggauccucuggaucuccuucgccaucuccugcuuccuccucugcgucguccuccucggcuucaucaugugggccugccagaagggcaacauccgcugcaacaucugcaucuga

SEQ ID NO: 108595 - RNA, 1701 nt, Artificial Sequence; identical to SEQ ID NO: 107928
  derived and/or modified CDS sequence (opt2) from hemagglutinin__InfluenzaA__AIJ10777

SEQ ID NO: 108596 - RNA, 1701 nt, Artificial Sequence; identical to SEQ ID NO: 107928
  derived and/or modified CDS sequence (opt2) from hemagglutinin__InfluenzaA__AIJ10778

SEQ ID NO: 108597 - RNA, 1701 nt, Artificial Sequence
  derived and/or modified CDS sequence (opt2) from hemagglutinin__InfluenzaA__AIJ10780
augaagaccaucaucgcccucuccuacauccucugccucgucuucgcccagaagcuccccggcaacgacaacuccaccgccacccucugccucggccaccacgccguccccaacggcaccaucgucaagaccaucaccaacgaccgcaucgaggucaccaacgccaccgagcucguccagaacuccuccaucggcgagaucugcgacuccccccaccagauccucgacggcgagaacugcacccucaucgacgcccuccucggcgacccccagugcgacuccuuccagaacaagaagugggaccucuucgucgagcgcuccaaggccuacuccaacugcuaccccuacgacguccccgacuacgccucccuccgcucccucgucgccuccuccggcacccucgaguucaacaacgaguccuucaacugggccggcgucacccagaacggcaccuccuccgccugcauccgcggcuccaacuccuccuucuucucccgccucaacuggcucacccacuccaacuucaaguaccccgcccucaacgucaccaugcccaacaacgagcaguucgacaagcucuacaucuggggcguccaccaccccggcaccgacaaggaccagaucuuccucuacgcccaguccuccggccgcaucaccgucuccaccaagcgcucccagcaggccgucauccccaacaucggcucccgcccccgcauccgcaacauccccucccgcaucuccaucuacuggaccaucgucaagcccggcgacauccuccucaucaacuccaccggcaaccucaucgccccccgcggcuacuucaagauccgcuccggcaaguccuccaucaugcgcuccgacgcccccaucggcaagugcaaguccgagugcaucacccccaacggcuccauccccaacgacaagcccuuccagaacgucaaccgcaucaccuacggcgccugcccccgcuacgucaagcaguccacccucaagcucgccaccggcaugcgcaacguccccgagaagcagacccgcggcaucuucggcgccaucgccggcuucaucgagaacggcugggagggcaugauggacggcugguacggcuuccgccaccagaacuccgagggccgcggccaggccgccgaccucaaguccacccaggccgccaucgaccagaucaacggcaagcucaaccgccucaucggcaagaccaacgagaaguuccaccagaucgagaaggaguucuccgaggucgagggccgcauccaggacaucgagaaguacgucgaggacaccaagaucgaccucugguccuacaacgccgagcuccucgucgcccucgagaaccagcacaccaucgaccucaccgacuccgagaugaacaagcucuucgagaagaccaagaagcagcuccgcgagaacgccgaggacaugggcaacggcugcuucaagaucuaccacaagugcgacaacgccugcaucggcuccauccgcaacggcaccuacgaccacgacgucuaccgcgacgaggcccucaacaaccgcuuccagaucaagggcgucgagcucaaguccggcuacaaggacuggauccucuggaucuccuucgccaucuccugcuuccuccucugcgucgcccuccucggcuucaucaugugggccugccagaagggcaacauccgcugcaacaucugcaucuga

SEQ ID NO: 108598 - RNA, 1701 nt, Artificial Sequence; identical to SEQ ID NO: 107928
  derived and/or modified CDS sequence (opt2) from hemagglutinin__InfluenzaA__AIJ10781

SEQ ID NO: 108599 - RNA, 1701 nt, Artificial Sequence; identical to SEQ ID NO: 107928
  derived and/or modified CDS sequence (opt2) from hemagglutinin__InfluenzaA__AIJ10782

SEQ ID NO: 108600 - RNA, 1701 nt, Artificial Sequence
  derived and/or modified CDS sequence (opt2) from hemagglutinin__InfluenzaA__AIJ10783
augaagaccaucaucgcccucuccuacauccucugccucgucuucgcccagaagcuccccggcaacgacaacuccaccgccacccucugccucggccaccacgccguccccaacggcaccaucgucaagaccaucaccaacgaccgcaucgaggucaccaacgccaccgagcucguccagaacuccuccaucggcgagaucugcgacuccccccaccagauccucgacggcgagaacugcacccucaucgacgcccuccucggcgacccccagugcgacggcuuccagaacaagaagugggaccucuucgucgagcgcuccaaggccuacuccaacugcuaccccuacgacguccccgacuacgccucccuccgcucccucgucgccuccuccggcacccucgaguucaacaacgaguccuucaacugggucggcgucacccagaacggcaccuccuccgccugcauccgcggcuccaacuccuccuucuucucccgccucaacuggcucacccaccucaacuucaaguaccccgcccucaacgucaccaugcccaacaacgagcaguucgacaagcucuacaucuggggcguccaccaccccggcaccgacaaggaccagaucuuccucuacgcccaguccuccggccgcaucaccgucuccaccaagcgcucccagcaggccgucauccccaacaucggcucccgcccccgcauccgcaacauccccucccgcaucuccaucuacuggaccaucgucaagcccggcgacauccuccucaucaacuccaccggcaaccucaucgccccccgcggcuacuucaagauccgcuccggcaaguccuccaucaugcgcuccgacgcccccaucggcaagugcaaguccgagugcaucacccccaacggcuccauccccaacgacaagcccuuccagaacgucaaccgcaucaccuacggcgccugcccccgcuacgucaagcaguccacccucaagcucgccaccggcaugcgcaacguccccgagaagcagacccgcggcaucuucggcgccaucgccggcuucaucgagaacggcugggagggcaugaaggacggcugguacggcuuccgccaccagaacuccgagggccgcggccaggccgccgaccucaaguccacccaggccgccaucgaccagaucaacggcaagcucaaccgccucaucggcaagaccaacgagaaguuccaccagaucgagaaggaguucuccgaggucgagggccgcauccaggaccucgagaaguacgucgaggacaccaagaucgaccucugguccuacaacgccgagcuccucgucgcccucgagaaccagcacaccaucgaccucaccgacuccgagaugaacaagcucuucgagaagaccaagaagcagcuccgcgagaacgccgaggacaugggcaacggcugcuucaagaucuaccacaagugcgacaacgccugcaucggcuccauccgcaacggcaccuacgaccacgacgucuaccgcgacgaggcccucaacaaccgcuuccagaucaagggcgucgagcucaaguccggcuacaaggacuggauccucuggaucuccuucgccaucuccugcuuccuccucugcgucgcccuccucggcuucaucaugugggccugccagaagggcaacauccgcugcaacaucugcaucuga

SEQ ID NO: 108601 - RNA, 1701 nt, Artificial Sequence; identical to SEQ ID NO: 108600
  derived and/or modified CDS sequence (opt2) from hemagglutinin__InfluenzaA__AIJ10784

SEQ ID NO: 108602 - RNA, 1701 nt, Artificial Sequence
  derived and/or modified CDS sequence (opt2) from hemagglutinin__InfluenzaA__AIJ10785
augaagaccaucaucgcccucuccuacauccucugccucgucuucgcccagaagcuccccggcaacgacaacuccaccgccacccucugccucggccaccacgccguccccaacggcaccaucgucaagaccaucaccaacgaccgcaucgaggucaccaacgccaccgagcucguccagaacuccuccaucggcgagaucugcaacuccccccaccagauccucgacggcgagaacugcacccucaucgacgcccuccucggcgacccccagugcgacggcuuccagaacaagaagugggaccucuucgucgagcgcuccaaggccuacuccaacugcuaccccuacgacguccccgacuacgccucccuccgcucccucgucgccuccuccggcacccucgaguucaacaacgaguccuucaacugggccggcgucacccagaacggcaccuccuccgccugcauccgcggcuccaacuccuccuucuucucccgccucaacuggcucacccaccucaacuucaaguaccccgcccucaacgucaccaugcccaacaacgagcaguucgacaagcucuacaucuggggcguccaccaccccggcaccgacaaggaccagaucuuccucuacgcccaguccuccggccgcaucaccgucuccaccaagcgcucccagcaggccgucauccccaacaucggcucccgcccccgcauccgcaacauccccucccgcaucuccaucuacuggaccaucgucaagcccggcgacauccuccucaucaacuccaccggcaaccucaucgccccccgcggcuacuucaagauccgcuccggcaaguccuccaucaugcgcuccgacgcccccaucggcaagugcaaguccgagugcaucacccccaacggcuccauccccaacgacaagcccuuccagaacgucaaccgcaucaccuacggcgccugcccccgcuacgucaagcaguccacccucaagcucgccaccggcaugcgcaacguccccgagaagcagacccgcggcaucuucggcgccaucgccggcuucaucgagaacggcugggagggcaugauggacggcugguacggcuuccgccaccagaacuccgagggccgcggccaggccgccgaccucaaguccacccaguccgccaucgaccagaucaacggcaagcucaaccgccucaucggcaagaccaacgagaaguuccaccagaucgagaaggaguucuccgaggucgagggccgcauccaggaccucgagaaguacgucgaggacaccaagaucgaccucugguccuacaacgccgagcuccucgucgcccucgagaaccagcacaccaucgaccucaccgacuccgagaugaacaagcucuucgagaagaccaagaagcagcuccgcgagaacgccgaggacaugggcaacggcugcuucaagaucuaccacaagugcgacaacgccugcaucggcuccauccgcaacggcaccuacgaccacgacgucuaccgcgacgaggcccucaacaaccgcuuccagaucaagggcgucgagcucaaguccggcuacaaggacuggauccucuggaucuccuucgccaucuccugcuuccuccucugcgucgcccuccucggcuucaucaugugggccugccagaagggcaacauccgcugcaacaucugcaucuga

SEQ ID NO: 108603 - RNA, 1701 nt, Artificial Sequence; identical to SEQ ID NO: 108600
  derived and/or modified CDS sequence (opt2) from hemagglutinin__InfluenzaA__AIJ10786

SEQ ID NO: 108604 - RNA, 1701 nt, Artificial Sequence
  derived and/or modified CDS sequence (opt2) from hemagglutinin__InfluenzaA__AIJ10787
augaagaccaucaucgcccucuccuacauccucugccucgucuucgcccagaagcuccccggcaacgacaacuccaccgccacccucugccucggccaccacgccguccccaacggcaccaucgucaagaccaucaccaacgaccgcaucgaggucaccaacgccaccgagcucguccagaacuccuccaucggcgagaucugcgacuccccccaccagauccucgacggcgagaacugcacccucaucgacgcccuccucggcgacccccagugcgacggcuuccagaacaagaagugggaccucuucgucgagcgcuccaaggccuacuccaacugcuaccccuacgacguccccgacuacgccucccuccgcucccucgucgccuccuccggcacccucgaguucaacaacgaguccuucaacugggucggcgucacccagaacggcaccuccuccgccugcauccgcggcuccaacuccuccuucuucucccgccucaacuggcucacccaccucaacuucaaguaccccgcccucaacgucaccaugcccaacaacgagcaguucgacaagcucuacaucuggggcguccaccaccccggcaccgacaaggaccagaucuuccucuacgcccaguccuccggccgcaucaccgucuccaccaagcgcucccagcaggccgucauccccaacaucggcucccgcccccgcauccgcaacauccccucccgcaucuccaucuacuggaccaucgucaagcccggcgacauccuccucaucaacuccaccggcaaccucaucgccccccgcggcuacuucaagauccgcuccggcaaguccuccaucaugcgcuccgacgcccccaucggcaagugcaaguccgagugcaucacccccaacggcuccauccccaacgacaagcccuuccagaacgucaaccgcaucaccuacggcgccugcccccgcuacgucaagcaguccacccucaagcucgccaccggcaugcgcaacguccccgagaagcagacccgcggcaucuucggcgccaucgccggcuucaucgagaacggcugggagggcaugaaggacggcugguacggcuuccgccaccagaacuccgagggccgcggccaggccgccgaccucaaguccacccaggccgccaucgaccagaucaacggcaagcucaaccgccucaucggcaagaccaacgagaaguuccaccagaucgagaaggaguucuccgaggucgagggccgcauccaggaccucgagaaguacgucgaggacaccaagaucgaccucugguccuacaacgccgagcuccucgucgcccucgagaaccagcacaccaucgaccucaccgacuccgagaugaacaagcucuucgagaagaccaagaagcagcuccgcgagaacgccgaggacaugggcaacggcugcuucaagaucuaccacaagugcgacaacgccugcaucggcuccauccgcaacggcaccuacgaccacgacgucuaccgcgacgaggcccucaacaaccgcuuccgcaucaagggcgucgagcucaaguccggcuacaaggacuggauccucuggaucuccuucgccaucuccugcuuccuccucugcgucgcccuccucggcuucaucaugugggccugccagaagggcaacauccgcugcaacaucugcaucuga

SEQ ID NO: 108605 - RNA, 1701 nt, Artificial Sequence; identical to SEQ ID NO: 108602
  derived and/or modified CDS sequence (opt2) from hemagglutinin__InfluenzaA__AIJ10788

SEQ ID NO: 108606 - RNA, 1701 nt, Artificial Sequence; identical to SEQ ID NO: 108602
  derived and/or modified CDS sequence (opt2) from hemagglutinin__InfluenzaA__AIJ10789

SEQ ID NO: 108607 - RNA, 1701 nt, Artificial Sequence; identical to SEQ ID NO: 108600
  derived and/or modified CDS sequence (opt2) from hemagglutinin__InfluenzaA__AIJ10790

SEQ ID NO: 108608 - RNA, 1701 nt, Artificial Sequence; identical to SEQ ID NO: 107928
  derived and/or modified CDS sequence (opt2) from hemagglutinin__InfluenzaA__AIJ10791

SEQ ID NO: 108609 - RNA, 1701 nt, Artificial Sequence
  derived and/or modified CDS sequence (opt2) from hemagglutinin__InfluenzaA__AIJ10792
augaagaccaucaucgcccucuccuacauccucugccucgucuucgcccagaagcuccccggcgacgacaacuccaccgccacccucugccucggccaccacgccguccccaacggcaccaucgucaagaccaucaccaacgaccgcaucgaggucaccaacgccaccgagcucguccagaacuccuccaucggcgagaucugcgacuccccccaccagauccucgacggcgagaacugcacccucaucgacgcccuccucggcgacccccagugcgacggcuuccagaacaagaagugggaccucuucgucgagcgcuccaaggccuacuccaacugcuaccccuacgacguccccgacuacgccucccuccgcucccucgucgccuccuccggcacccucgaguucaacaacgaguccuucaacugggccggcgucacccagaacggcaccuccuccgccugcauccgcggcuccaacuccuccuucuucucccgccucaacuggcucacccaccucaacuucaaguaccccgcccucaacgucaccaugcccaacaacgagcaguucgacaagcucuacaucuggggcguccaccaccccggcaccgacaaggaccagaucuuccucuacgcccaguccuccggccgcaucaccgucuccaccaagcgcucccagcaggccgucauccccaacaucggcucccgcccccgcauccgcaacauccccucccgcaucuccaucuacuggaccaucgucaagcccggcgacauccuccucaucaacuccaccggcaaccucaucgccccccgcggcuacuucaagauccgcuccggcaaguccuccaucaugcgcuccgacgcccccaucggcaagugcaaguccgagugcaucacccccaacggcuccauccccaacgacaagcccuuccagaacgucaaccgcaucaccuacggcgccugcccccgcuacgucaagcaguccacccucaagcucgccaccggcaugcgcaacguccccgagaagcagacccgcggcaucuucggcgccaucgccggcuucaucgagaacggcugggagggcauggucgacggcugguacggcuuccgccaccagaacuccgagggccgcggccaggccgccgaccucaaguccacccaggccgccaucgaccagaucaacggcaagcucaaccgccucaucggcaagaccaacgagaaguuccaccagaucgagaaggaguucuccgaggucgagggccgcauccaggaccucgagaaguacgucgaggacaccaagaucgaccucugguccuacaacgccgagcuccucgucgcccucgagaaccagcacaccaucgaccucaccgacuccgagaugaacaagcucuucgagaagaccaagaagcagcuccgcgagaacgccgaggacaugggcaacggcugcuucaagaucuaccacaagugcgacaacgccugcaucggcuccauccgcaacggcaccuacgaccacgacgucuaccgcgacgaggcccucaacaaccgcuuccagaucaagggcgucgagcucaaguccggcuacaaggacuggauccucuggaucuccuucgccaucuccugcuuccuccucugcgucguccuccucggcuucaucaugugggccugccagaagggcaacauccgcugcaacaucugcaucuga

SEQ ID NO: 108610 - RNA, 1701 nt, Artificial Sequence; identical to SEQ ID NO: 105919
  derived and/or modified CDS sequence (opt2) from hemagglutinin__InfluenzaA__AIJ29347

SEQ ID NO: 108611 - RNA, 1701 nt, Artificial Sequence
  derived and/or modified CDS sequence (opt2) from hemagglutinin__InfluenzaA__AIJ29349
augaagaccaucaucgcccucuccuacauccucugccucgucuucgcccagaaguuccccggcaacgacaacuccaccgccacccucugccucggccaccacgccguccccaacggcaccaucgucaagaccaucaccaacgaccgcaucgaggucaccaacgccaccgagcucguccagaacuccuccaucggcgagaucugcgacuccccccaccagauccucgacggcgagaacugcacccucaucgacgcccuccucggcgacccccagugcgacggcuuccagaacaagaagugggaccucuucgucgagcgcuccaaggccuacuccaacugcuaccccuacgacguccccgacuacgccucccuccgcucccucgucgccuccuccggcacccucgaguucaacaacgaguccuucaacuggaccggcgucacccagaacggcaccuccuccgccugcauccgccgcuccaacuccuccuucuucucccgccucaacuggcucacccaccucaacuucaaguaccccgcccucaacgucaccaugcccaacaacgagcaguucgacaagcucuacaucuggggcguccaccaccccggcaccgacaaggaccagaucuuccucuacgcccaguccuccggccgcaucaccgucuccaccaagcgcucccagcaggccgucauccccaacaucggcucccgcccccgcauccgcaacauccccucccgcaucuccaucuacuggaccaucgucaagcccggcgacauccuccucaucaacuccaccggcaaccucaucgccccccgcggcuacuucaagauccgcuccggcaaguccuccaucaugcgcuccgacgcccccaucggcaagugcaaguccgagugcaucacccccaacggcuccauccccaacgacaagcccuuccagaacgucaaccgcaucaccuacggcgccugcccccgcuacgucaagcaguccacccucaagcucgccaccggcaugcgcaacguccccgagaagcagacccgcggcaucuucggcgccaucgccggcuucaucgagaacggcugggagggcauggucgacggcugguacggcuuccgccaccagaacuccgagggccgcggccaggccgccgaccucaaguccacccaggccgccaucgaccagaucaacggcaagcucaaccgccucaucggcaagaccaacgagaaguuccaccagaucgagaaggaguucuccgaggucgagggccgcauccaggaccucgagaaguacgucgaggacaccaagaucgaccucugguccuacaacgccgagcuccucgucgcccucgagaaccagcacaccaucgaccucaccgacuccgagaugaacaagcucuucgagaagaccaagaagcagcuccgcgagaacgccgaggacaugggcaacggcugcuucaagaucuaccacaagugcgacaacgccugcaucggcuccauccgcaacggcaccuacgaccacgacgucuaccgcgacgaggcccucaacaaccgcuuccagaucaagggcgucgagcucaaguccggcuacaaggacuggauccucuggaucuccuucgccaucuccugcuuccuccucugcgucgcccuccucggcuucaucaugugggccugccagaagggcaacauccgcugcaacaucugcaucuga

SEQ ID NO: 108612 - RNA, 1701 nt, Artificial Sequence
  derived and/or modified CDS sequence (opt2) from hemagglutinin__InfluenzaA__AIJ29351
augaagaccaucaucgcccucuccuacauccucugccucgucuucgcccagaagcuccccggcaacgacaacuccaccgccacccucugccucggccaccacgccguccccaacggcaccaucgucaagaccaucaccaacgaccgcaucgaggucaccaacgccaccgagcucguccagaacuccuccaucggcgagaucugcgacuccccccaccagauccucgacggcgagaacugcacccucaucgacgcccuccucggcgacccccagugcgacggcuuccagaacaagaagugggaccucuucgucgagcgcuccaaggccuacuccaacugcuaccccuacgacguccccgacuacgccucccuccgcucccucgucgccuccuccggcacccucgaguucaacaacgaguccuucaacuggaccggcgucacccagaacggcaccuccuccgccugcauccgccgcuccaacuccuccuucuucucccgccucaacuggcucacccaccucaacuucaaguaccccgcccucaacgucaccaugcccaacaacgagcaguucgacaagcucuacaucuggggcguccaccaccccggcaccgacaaggaccagaucuuccucuacgcccaguccuccggccgcaucaccgucuccaccaagcgcucccagcaggccgucauccccaacaucggcucccgcccccgcauccgcaacauccccucccgcaucuccaucuacuggaccaucgucaagcccggcgacauccuccucaucaacuccaccggcaaccucaucgccccccgcggcuacuucaagauccgcuccggcaaguccuccaucaugcgcuccgacgcccccaucggcaagugcaaguccgagugcaucacccccaacggcuccauccccaacgacaagcccuuccagaacgucaaccgcaucaccuacggcgccugcccccgcuacgucaagcaguccacccucaagcucgccaccggcaugcgcaacguccccgagaagcagacccgcggcaucuucggcgccaucgccggcuucaucgagaacggcugggagggcauggucgacggcugguacggcuuccgccaccagaacuccgagggccgcggccaggccgccgaccucaaguccacccaggccgccaucgaccagaucaacggcaagcucaaccgccucaucggcaagaccaacgagaaguuccaccagaucgagaaggaguucuccgaggucgagggccgcauccaggaccucgagaaguacgucgaggacaccaagaucgaccucugguccuacaacgccgagcuccucgucgcccucgagaaccagcacaccaucgaccucaccgacuccgagaugaacaagcucuucgagaagaccaagaagcagcuccgcgagaacgccgaggacaugggcaacggcugcuucaagaucuaccacaagugcgacaacgccugcaucggcuccauccgcaacggcaccuacgaccacgacgucuaccgcgacgaggcccucaacaaccgcuuccagaucaagggcgucgagcucaaguccggcuacaaggacuggauccucuggaucuccuucgccaucuccugccuccuccucugcgucgcccuccucggcuucaucaugugggccugccagaagggcaacauccgcugcaacaucugcaucuga

SEQ ID NO: 108613 - RNA, 1701 nt, Artificial Sequence; identical to SEQ ID NO: 105516
  derived and/or modified CDS sequence (opt2) from hemagglutinin__InfluenzaA__AIJ29353

SEQ ID NO: 108614 - RNA, 1701 nt, Artificial Sequence
  derived and/or modified CDS sequence (opt2) from hemagglutinin__InfluenzaA__AIJ29355
augaagaccaucaucgcccucuccuacauccucugccucgucuucgcccagaagcuccccggcaacgacaacuccaccgccacccucugccucggccaccacgccguccccaacggcaccaucgucaagaccaucaccaacgaccagaucgaggucaccaacgccaccgagcucguccaguccuccuccaccggcgagaucugcgacuccccccaccagauccucgacggcgagaacugcacccucaucgacgcccuccucggcgacccccagugcgacggcuuccagaacaagaagugggaccucuucgucgagcgcuccaaggccuacuccaacugcuaccccuacgacguccccgacuacgccucccuccgcucccucgucgccuccuccggcacccucgaguucaacaacgaguccuucaacuggaccggcgucacccagaacggcaccuccuccgccugcauccgccgcuccaacuccuccuucuucucccgccucaacuggcucacccaccucaacuucaaguaccccgcccucaacgucaccaugcccaacaacgagcaguucgacaagcucuacaucuggggcguccaccaccccggcaccgacaaggaccagaucuuccucuacgcccaguccuccggccgcaucaccgucuccaccaagcgcucccagcaggccgucauccccaacaucggcucccgcucccgcauccgcaacauccccucccgcaucuccaucuacuggaccaucgucaagcccggcgacauccuccucaucaacuccaccggcaaccucaucgccccccgcggcuacuucaagauccgcuccggcaaguccuccaucaugcgcuccgacgcccccaucggcaagugcaacuccgagugcaucacccccaacggcuccauccccaacgacaagcccuuccagaacgucaaccgcaucaccuacggcgccugcccccgcuacgucaagcaguccacccucaagcucgccaccggcaugcgcaacguccccgagaagcagacccgcggcaucuucggcgccaucgccggcuucaucgagaacggcugggagggcauggucgacggcugguacggcuuccgccaccagaacuccgagggccgcggccaggccgccgaccucaaguccacccaggccgccaucgaccagaucaacggcaagcucaaccgccucaucggcaagaccaacgagaaguuccaccagaucgagaaggaguucuccgaggucgagggccgcauccaggaccucgagaaguacgucgaggacaccaagaucgaccucugguccuacaacgccgagcuccucgucgcccucgagaaccagcacaccaucgaccucaccgacuccgagaugaacaagcucuucgagaagaccaagaagcagcuccgcgagaacgccgaggacaugggcaacggcugcuucaagaucuaccacaagugcgacaacgccugcaucggcuccauccgcaacggcaccuacaaccacgacgucuaccgcgacgaggcccucaacaaccgcuuccagaucaagggcgucgagcucaaguccggcuacaaggacuggauccucuggaucuccuucgccaucuccugcuuccuccucugcgucgcccuccucggcuucaucaugugggccugccagaagggcaacauccgcugcaacaucugcaucuga

SEQ ID NO: 108615 - RNA, 1701 nt, Artificial Sequence; identical to SEQ ID NO: 105110
  derived and/or modified CDS sequence (opt2) from hemagglutinin__InfluenzaA__AIJ29357

SEQ ID NO: 108616 - RNA, 1701 nt, Artificial Sequence
  derived and/or modified CDS sequence (opt2) from hemagglutinin__InfluenzaA__AIJ29359
augaagaccaucaucgcccucuccuacauccucugccucgucuucgcccagaagcuccccggcaacgacaacuccaccgccacccucugccucggccaccacgccguccccaacggcaccaucgucaagaccaucaccaacgaccgcaucgaggucaccaacgccaccgagcucguccagaacuccuccaucggcgagaucugcgacuccccccaccagauccucgacggcgagaacugcacccucaucgacgcccuccucggcgacccccagugcgacggcuuccagaacaagaagugggaccucuucgucgagcgcuccaaggccuacuccaacugcuaccccuacgacguccccgacuacgccucccuccgcucccucgucgccuccuccggcacccucgaguucaacaacgaguccuucaacuggaccggcgucacccagaacggcaccuccuccgccugcauccgccgcuccaacaacuccuucuucucccgccucaacuggcucacccaccucaacuucaaguaccccgcccucaacgucaccaugcccaacaacgagcaguucgacaagcucuacaucuggggcguccaccaccccggcaccgacaaggaccagaucuuccucuacgcccaguccuccggccgcaucaccgucuccaccaagcgcucccagcaggccgucauccccaacaucggcucccgcccccgcauccgcaacauccccucccgcaucuccaucuacuggaccaucgucaagcccggcgacauccuccucaucaacuccaccggcaaccucaucgccccccgcggcuacuucaagauccgcuccggcaaguccuccaucaugcgcuccgacgcccccaucggcaagugcaaguccgagugcaucacccccaacggcuccauccccaacgacaagcccuuccagaacgucaaccgcaucaccuacggcgccugcccccgcuacgucaagcaguccacccucaagcucgccaccggcaugcgcaacguccccgagaagcagacccgcggcaucuucggcgccaucgccggcuucaucgagaacggcugggagggcauggucgacggcugguacggcuuccgccaccagaacuccgagggccgcggccaggccgccgaccucaaguccacccaggccgccaucgaccagaucaacggcaagcucaaccgccucaucggcaagaccaacgagaaguuccaccagaucgagaaggaguucuccgaggucgagggccgcauccaggaccucgagaaguacgucgaggacaccaagaucgaccucugguccuacaacgccgagcuccucgucgcccucgagaaccagcacaccaucgaccucaccgacuccgagaugaacaagcucuucgagaagaccaagaagcagcuccgcgagaacgccgaggacaugggcaacggcugcuucaagaucuaccacaagugcgacaacgccugcaucggcuccauccgcaacggcaccuacgaccacgacgucuaccgcgacgaggccaucaacaaccgcuuccagaucaagggcgucgagcucaaguccggcuacaaggacuggauccucuggaucuccuucgccaucuccugcuuccuccucugcgucgcccuccucggcuucaucaugugggccugccagaagggcaacauccgcugcaacaucugcaucuga

SEQ ID NO: 108617 - RNA, 1701 nt, Artificial Sequence
  derived and/or modified CDS sequence (opt2) from hemagglutinin__InfluenzaA__AIJ29361
augaagaccaucaucgcccucuccuacauccucugccucgucuucgcccagaagcuccccggcaacgacaacuccaccgccacccucugccucggccaccacgccguccccaacggcaccaucgucaagaccaucaccaacgaccgcaucgaggucaccaacgccaccgagcucguccagaacuccuccaucggcgagaucugcgacuccccccaccagauccucgacggcgagaacugcacccucaucgacgcccuccucggcgacccccagugcgacggcuuccagaacaagaagugggaccucuucgucgagcgcuccaaggccuacuccaacugcuaccccuacgacguccccgacuacgucucccuccgcucccucgucgccuccuccggcacccucgaguucaacaacgaguccuucaacuggaccggcgucacccagaacggcaccuccuccgccugcauccgccgcuccaacaacuccuucuucucccgccucaacuggcucacccaccucaacuucaaguaccccgcccucaacgucaccaugcccaacaacgagcaguucgacaagcucuacaucuggggcguccaccaccccggcaccgacaaggaccagaucuuccucuacgcccaguccuccggccgcaucaccgucuccaccaagcgcucccagcaggccgucauccccaacaucggcucccgcccccgcauccgcaacauccccucccgcaucuccaucuacuggaccaucgucaagcccggcgacauccuccucaucaacuccaccggcaaccucaucgccccccgcggcuacuucaagauccgcuccggcaaguccuccaucaugcgcuccgacgcccccaucggcaagugcaaguccgagugcaucacccccaacggcuccauccccaacgacaagcccuuccagaacgucaaccgcaucaccuacggcgccugcccccgcuacgucaagcaguccacccucaagcucgccaccggcaugcgcaacguccccgagaagcagacccgcggcaucuucggcgccaucgccggcuucaucgagaacggcugggagggcauggucgacggcugguacggcuuccgccaccagaacuccgagggccgcggccaggccgccgaccucaaguccacccaggccgccaucgaccagaucaacggcaagcucaaccgccucaucggcaagaccaacgagaaguuccaccagaucgagaaggaguucuccgaggucgagggccgcauccaggaccucgagaaguacgucgaggacaccaagaucgaccucugguccuacaacgccgagcuccucgucgcccucgagaaccagcacaccaucgaccucaccgacuccgagaugaacaagcucuucgagaagaccaagaagcagcuccgcgagaacgccgaggacaugggcaacggcugcuucaagaucuaccacaagugcgacaacgccugcaucggcuccauccgcaacggcaccuacgaccacgacgucuaccgcgacgaggcccucaacaaccgcuuccagaucaagggcgucgagcucaaguccggcuacaaggacuggauccucuggaucuccuucgccaucuccugcuuccuccucugcgucgcccuccucggcuucaucaugugggccugccagaagggcaacauccgcugcaacaucugcaucuga

SEQ ID NO: 108618 - RNA, 1701 nt, Artificial Sequence; identical to SEQ ID NO: 106076
  derived and/or modified CDS sequence (opt2) from hemagglutinin__InfluenzaA__AIL93623

SEQ ID NO: 108619 - RNA, 1701 nt, Artificial Sequence
  derived and/or modified CDS sequence (opt2) from hemagglutinin__InfluenzaA__AIL93634
augaaggccauccucgucguccuccucuacaccuucgccaccgccaacgccgacacccucugcaucggcuaccacgccaacaacuccaccgacaccgucgacaccguccucgagaagaacgucaccgucacccacuccgucaaccuccucgaggacaagcacaacggcaagcucugcaagcuccgcggcgucgccccccuccaccucggcaagugcaacaucgccggcuggauccucggcaaccccgagugcgagucccucuccaccgccuccuccugguccuacaucgucgagaccuccuccuccgacaacggcaccugcuaccccggcgacuucaucaacuacgaggagcuccgcgagcagcucuccuccgucuccuccuucgagcgcuucgagaucuuccccaagaccuccuccuggcccaaccacgacuccaacaagggcgucaccgccgccugcccccacgccggcgccaaguccuucuacaagaaccucaucuggcucgucaagaagggcaacuccuaccccaagcucucccaguccuacaucaacgacaagggcaaggagguccucguccucuggggcauccaccaccccuccaccaccgccgaccagcagucccucuaccagaacgccgacgccuacgucuucgucggcaccucccgcuacuccaagaaguucaagcccgagaucgccauccgccccaagguccgcgaccaggagggccgcaugaacuacuacuggacccucgucgagcccggcgacaagaucaccuucgaggccaccggcaaccucgucgucccccgcuacgccuucaccauggagcgcaacgccggcuccggcaucaucaucuccgacacccccguccacgacugcaacaccaccugccagacccccgagggcgccaucaacaccucccuccccuuccagaacauccaccccaucaccaucggcaagugccccaaguacgucaaguccaccaagcuccgccucgccaccggccuccgcaacguccccuccauccagucccgcggccucuucggcgccaucgccggcuucaucgagggcggcuggaccggcauggucgacggcugguacggcuaccaccaccagaacgagcagggcuccggcuacgccgccgaccucaaguccacccagaacgccaucgacaagaucaccaacaaggucaacuccgucaucgagaagaugaacacccaguucaccgccgucggcaaggaguucaaccaccucgagaagcgcaucgagaaccucaacaagaaggucgacgacggcuuccucgacaucuggaccuacaacgccgagcuccucguccuccucgagaacgagcgcacccucgacuaccacgacuccaacgucaagaaccucuacgagaagguccgcaaccagcucaagaacaacgccaaggagaucggcaacggcugcuucgaguucuaccacaagugcaacaacaccugcauggaguccgucaagaacggcaccuacgacuaccccaaguacuccgaggaggccaagcucaaccgcgagaagaucgacggcgucaagcucgaguccacccgcaucuaccagauccucgccaucuacuccaccgucgccuccucccucguccucgucgucucccucggcgccaucuccuucuggaugugcuccaacggcucccuccagugccgcaucugcaucuga

SEQ ID NO: 108620 - RNA, 1701 nt, Artificial Sequence
  derived and/or modified CDS sequence (opt2) from hemagglutinin__InfluenzaA__AIL93645
augaagaccaucaucgcccucuccuacauccucugccucgucuucgcccagaagcuccccggcaacgacaacuccaccgccacccucugccucggccaccacgccguccccaacggcaccaucgucaagaccaucaccaacgaccgcaucgaggucaccaacgccaccgagcucguccagaacuccuccaucggcgagaucugcgacuccccccaccagauccucgacggcgagaacugcacccucaucgacgcccuccucggcgacccccagugcgacggcuuccagaacaagaagugggaccucuucgucgagcgcuccaaggccuacuccaacugcuaccccuacgacguccccgacuacgccucccuccgcucccucgucgccuccuccggcacccucgaguucaacaacgaguccuucaacugggccggcgucacccagaacggcaccuccuccgccugcauccgcggcuccaacuccuccuucuucucccgccucaacuggcucacccaccucaacuuccgcuaccccgcccucaacgucaccaugcccaacaacgagcaguucgacaagcucuacaucuggggcguccaccaccccggcaccgacaaggaccagaucuuccucuacgcccaguccuccggccgcaucaccgucuccaccaagcgcucccagcaggccgucauccccaacaucggcucccgcccccgcauccgcaacauccccucccgcaucuccaucuacuggaccaucgucaagcccggcgacauccuccucaucaacuccaccggcaaccucaucgccccccgcggcuacuucaagauccgcuccggcaaguccuccaucaugcgcuccgacgcccccaucggcaagugcaaguccgagugcaucacccccaacggcuccauccccaacgacaagcccuuccagaacgucaaccgcaucaccuacggcgccugcccccgcuacgucaagcaguccacccucaagcucgccaccggcaugcgcaacguccccgagaagcagacccgcggcaucuucggcgccaucgccggcuucaucgagaacggcugggagggcauggucgacggcugguacggcuuccgccaccagaacuccgagggccgcggccaggccgccgaccucaaguccacccaggccgccaucgaccagaucaacggcaagcucaaccgccucaucggcaagaccaacgagaaguuccaccagaucgagaaggaguucuccgaggucgagggccgcauccaggaccucgagaaguacgucgaggacaccaagaucgaccucugguccuacaacgccgagcuccucgucgcccucgagaaccagcacaccaucgaccucaccgacuccgagaugaacaagcucuucgagaagaccaagaagcagcuccgcgagaacgccgaggacaugggcaacggcugcuucaagaucuaccacaagugcgacaacgccugcaucggcuccauccgcaacggcaccuacgaccacgacgucuaccgcgacgaggcccucaacaaccgcuuccagaucaagggcgucgagcucaaguccggcuacaaggacuggauccucuggaucuccuucgccaucuccugcuuccuccucugcgucgcccuccucggcuucaucaugugggccugccagaagggcaacauccgcugcaacaucugcaucuga

SEQ ID NO: 108621 - RNA, 1701 nt, Artificial Sequence; identical to SEQ ID NO: 106030
  derived and/or modified CDS sequence (opt2) from hemagglutinin__InfluenzaA__AIL93657

SEQ ID NO: 108622 - RNA, 1701 nt, Artificial Sequence; identical to SEQ ID NO: 106030
  derived and/or modified CDS sequence (opt2) from hemagglutinin__InfluenzaA__AIL93669

SEQ ID NO: 108623 - RNA, 1701 nt, Artificial Sequence
  derived and/or modified CDS sequence (opt2) from hemagglutinin__InfluenzaA__AIL93681
augaaggccauccucgucguccuccucuacaccuucgccaccgccaacgccgacacccucugcaucggcuaccacgccaacaacuccaccgacaccgucgacaccguccucgagaagaacgucaccgucacccacuccgucaaccuccucgaggacaagcacaacggcaagcucugcaagcuccgcggcgucgccccccuccaccucggcaagugcaacaucgccggcuggauccucggcaaccccgagugcgagucccucuccaccgccuccuccugguccuacaucgucgagaccuccuccuccgacaacggcaccugcuaccccggcgacuucaucaacuacgaggagcuccgcgagcagcucuccuccgucuccuccuucgagcgcuucgagaucuuccccaagaccuccuccuggcccaaccacgacuccaacaagggcgucaccgccgccugcccccacgccggcgccaaguccuucuacaagaaccucaucuggcucgucaagaagggcaacuccuaccccaagcucucccaguccuacaucaacgacaagggcaaggagguccucguccucuggggcauccaccaccccuccaccaccgccgaccagcagucccucuaccagaacgccgacgccuacgucuucgucggcaccucccgcuacuccaagaaguucaagcccgagaucgccauccgccccaagguccgcgaccaggagggccgcaugaacuacuacuggacccucgucgagcccggcgacaagaucaccuucgaggccaccggcaaccucgucgucccccgcuacgccuucaccauggagcgcuccgccggcuccggcaucaucaucuccgacacccccguccacgacugcaacaccaccugccagacccccgagggcgccaucaacaccucccuccccuuccagaacauccaccccaucaccaucggcaagugccccaaguacgucaaguccaccaagcuccgccucgccaccggccuccgcaacguccccuccauccagucccgcggccucuucggcgccaucgccggcuucaucgagggcggcuggaccggcauggucgacggcugguacggcuaccaccaccagaacgagcagggcuccggcuacgccgccgaccucaaguccacccagaacgccaucgacaagaucaccaacaaggucaacuccgucaucgagaagaugaacacccaguucaccgccgucggcaaggaguucaaccaccucgagaagcgcaucgagaaccucaacaagaaggucgacgacggcuuccucgacaucuggaccuacaacgccgagcuccucguccuccucgagaacgagcgcacccucgacuaccacgacuccaacgucaagaaccucuacgagaagguccgcaaccagcucaagaacaacgccaaggagaucggcaacggcugcuucgaguucuaccacaagugcgacaacaccugcauggaguccgucaagaacggcaccuacgacuaccccaaguacuccgaggaggccaagcucaaccgcgagaagaucgacggcgucaagcucgaguccacccgcaucuaccagauccucgccaucuacuccaccgucgccuccucccucguccucgucgucucccucggcgccaucuccuucuggaugugcuccaacggcucccuccagugccgcaucugcaucuga

SEQ ID NO: 108624 - RNA, 1701 nt, Artificial Sequence; identical to SEQ ID NO: 108620
  derived and/or modified CDS sequence (opt2) from hemagglutinin__InfluenzaA__AIL93692

SEQ ID NO: 108625 - RNA, 1701 nt, Artificial Sequence; identical to SEQ ID NO: 108620
  derived and/or modified CDS sequence (opt2) from hemagglutinin__InfluenzaA__AIL93716

SEQ ID NO: 108626 - RNA, 1701 nt, Artificial Sequence; identical to SEQ ID NO: 106030
  derived and/or modified CDS sequence (opt2) from hemagglutinin__InfluenzaA__AIL93728

SEQ ID NO: 108627 - RNA, 1701 nt, Artificial Sequence; identical to SEQ ID NO: 106030
  derived and/or modified CDS sequence (opt2) from hemagglutinin__InfluenzaA__AIL93740

SEQ ID NO: 108628 - RNA, 1701 nt, Artificial Sequence
  derived and/or modified CDS sequence (opt2) from hemagglutinin__InfluenzaA__AIL93752
augaagaccaucaucgcccucuccuacauccucugccucgucuucgcccagaagcuccccggcaacgacaacuccaccgccacccucugccucggccaccacgccguccccaacggcaccaucgucaagaccaucaccaacgaccgcaucgaggucaccaacgccaccgagcucguccagaacuccuccaucggcgagaucugcgaccgcccccaccagauccucgacggcgagaacugcacccucaucgacgcccuccucggcgacccccagugcgacggcuuccagaacaagaagugggaccucuucgucgagcgcuccaaggccuacuccaacugcuaccccuacgacguccccgacuacgccucccuccgcucccucgucgccuccuccggcacccucgaguucaacaacgaguccuucaacugggccggcgucacccagaacggcaccuccuccgccugcauccgcggcuccaacuccuccuucuucucccgccucaacuggcucacccaccucaacuucaaguaccccgcccucaacgucaccaugcccaacaacgagcaguucgacaagcucuacaucuggggcguccaccaccccggcaccgacaaggaccagaucuuccucuacgcccaguccuccggccgcaucaccgucuccaccaagaagucccagcaggccgucauccccaacaucggcucccgcccccgcauccgcaacauccccucccgcaucuccaucuacuggaccaucgucaagcccggcgacauccuccucaucaacuccaccggcaaccucaucgccccccgcggcuacuucaagauccgcuccggcaaguccuccaucaugcgcuccgacgcccccaucggcaagugcaaguccgagugcaucacccccaacggcuccauccccaacgacaagcccuuccagaacgucaaccgcaucaccuacggcgccugcccccgcuacgucaagcaguccacccucaagcucgccaccggcaugcgcaacguccccgagaagcagacccgcggcaucuucggcgccaucgccggcuucaucgagaacggcugggagggcauggucgacggcugguacggcuuccgccaccagaacuccgagggccgcggccaggccgccgaccucaaguccacccaggccgccaucgaccagaucaacggcaagcucaaccgccucaucggcaagaccaacgagaaguuccaccagaucgagaaggaguucuccgaggucgagggccgcauccaggaccucgagaaguacgucgaggacaccaagaucgaccucugguccuacaacgccgagcuccucgucgcccucgagaaccagcacaccaucgaccucaccgacuccgagaugaacaagcucuucgagaagaccaagaagcagcuccgcgagaacgccgaggacaugggcaacggcugcuucaagaucuaccacaagugcgacaacgccugcaucggcuccauccgcaacggcaccuacgaccacgacgucuaccgcgacgaggcccucaacaaccgcuuccagaucaagggcgucgagcucaaguccggcuacaaggacuggauccucuggaucuccuucgccaucuccugcuuccuccucugcgucgcccuccucggcuucaucaugugggccugccagaagggcaacauccgcugcaacaucugcaucuga

SEQ ID NO: 108629 - RNA, 1701 nt, Artificial Sequence
  derived and/or modified CDS sequence (opt2) from hemagglutinin__InfluenzaA__AIL93764
augaagaccaucaucgcccucuccuacauccucugccucgucuucacccagaagcuccccggcaacgacaacuccaccgccacccucugccucggccaccacgccguccccaacggcaccaucgucaagaccaucaccaacgaccgcaucgaggucaccaacgccaccgagcucguccagaacuccuccaucggcgagaucugcgacuccccccaccagauccucgacggcgagaacugcacccucaucgacgcccuccucggcgacccccagugcgacggcuuccagaacaagaagugggaccucuucgucgagcgcuccaaggccuacuccaacugcuaccccuacgacguccccgacuacgccucccuccgcucccucgucgccuccuccggcacccucgaguucaacaacgaguccuucaacugggccggcgucacccagaacggcaccuccuccgccugcauccgcggcuccaacuccuccuucuucucccgccucaacuggcucacccaccucaacuucaaguaccccgcccucaacgucaccaugcccaacaacgagcaguucgacaagcucuacaucuggggcguccaccaccccggcaccgacaaggaccagaucuuccucuacgcccaguccuccggccgcaucaccgucuccaccaagcgcucccagcaggccgucauccccaacaucggcucccgcccccgcauccgcaacauccccucccgcaucuccaucuacuggaccaucgucaagcccggcgacauccuccucaucaacuccaccggcaaccucaucgccccccgcggcuacuucaagauccgcuccggcaaguccuccaucaugcgcuccgacgcccccaucggcaagugcaaguccgagugcaucacccccaacggcuccauccccaacgacaagcccuuccagaacgucaaccgcaucaccuacggcgccugcccccgcuacgucaagcaguccacccucaagcucgccaccggcaugcgcaacguccccgagaagcagacccgcggcaucuucggcgccaucgccggcuucaucgagaacggcugggagggcauggucgacggcugguacggcuuccgccaccagaacuccgagggccgcggccaggccgccgaccucaaguccacccaggccgccaucgaccagaucaacggcaagcucaaccgccucaucggcaagaccaacgagaaguuccaccagaucgagaaggaguucuccgaggucgagggccgcauccaggaccucgagaaguacgucgaggacaccaagaucgaccucugguccuacaacgccgagcuccucgucgcccucgagaaccagcacaccaucgaccucaccgacuccgagaugaacaagcucuucgagaagaccaagaagcagcuccgcgagaacgccgaggacaugggcaacggcugcuucaagaucuaccacaagugcgacaacgccugcaucggcuccauccgcaacgagaccuacgaccacgacgucuaccgcgacgaggcccucaacaaccgcuuccagaucaagggcgucgagcucaaguccggcuacaaggacuggauccucuggaucuccuucgccaucuccugcuuccuccucugcgucgcccuccucggcuucaucaugugggccugccagaagggcaacauccgcugcaacaucugcaucuga

SEQ ID NO: 108630 - RNA, 1701 nt, Artificial Sequence; identical to SEQ ID NO: 106030
  derived and/or modified CDS sequence (opt2) from hemagglutinin__InfluenzaA__AIL93776

SEQ ID NO: 108631 - RNA, 1701 nt, Artificial Sequence; identical to SEQ ID NO: 106030
  derived and/or modified CDS sequence (opt2) from hemagglutinin__InfluenzaA__AIL93788

SEQ ID NO: 108632 - RNA, 1701 nt, Artificial Sequence; identical to SEQ ID NO: 106030
  derived and/or modified CDS sequence (opt2) from hemagglutinin__InfluenzaA__AIL93812

SEQ ID NO: 108633 - RNA, 1701 nt, Artificial Sequence; identical to SEQ ID NO: 106030
  derived and/or modified CDS sequence (opt2) from hemagglutinin__InfluenzaA__AIL93824

SEQ ID NO: 108634 - RNA, 1701 nt, Artificial Sequence; identical to SEQ ID NO: 108623
  derived and/or modified CDS sequence (opt2) from hemagglutinin__InfluenzaA__AIL93836

SEQ ID NO: 108635 - RNA, 1701 nt, Artificial Sequence
  derived and/or modified CDS sequence (opt2) from hemagglutinin__InfluenzaA__AIL93847
augaaggccauccucgucguccuccucuacaccuucgccaccgccaacgccgacacccucugcaucggcuaccacgccaacaacuccaccgacaccgucgacaccguccucgagaagaacgucaccgucacccacuccgucaaccuccucgaggacaagcacaacggcaagcucugcaagcuccgcggcgucgccccccuccaccucggcaagugcaacaucgccggcuggauccucggcaaccccgagugcgagucccucuccaccgccuccuccugguccuacaucgucgagaccuccuccuccgacaacggcaccugcuaccccggcgacuucaucaacuacgaggagcuccgcgagcagcucuccuccgucuccuccuucgagcgcuucgagaucuuccccaagaccuccuccuggcccaaccacgacuccaacaagggcgucaccgccgccugcccccacgccggcgccaaguccuucuacaagaaccucaucuggcucgucaagaagggcaacuccuaccccaagcucucccaguccuacaucaacgacaagggcaaggagguccucguccucuggggcauccaccaccccuccaccaccgccgaccagcagucccucuaccagaacgccgacgccuacgucuucgucggcaccucccgcuacuccaagaaguucaagcccgagaucgccauccgccccaagguccgcgaccaggagggccgcaugaacuacuacuggacccucgucgagcccggcgacaagaucaccuucgaggccaccggcaaccucgucgucccccgcuacgccuucaccauggagcgcuccgccggcuccggcaucaucaucuccgacacccccguccacgacugcaacaccaccugccagacccccgagggcgccaucaacaccucccuccccuuccagaacauccaccccaucaccaucggcaagugccccaaguacgucaaguccaccaagcuccgccucgccaccggccuccgcaacguccccuccauccagucccgcggccucuucggcgccaucgccggcuucaucgagggcggcuggaccggcauggucgacggcugguacggcuaccaccaccagaacgagcagggcuccggcuacgccgccgaccucaaguccacccagaacgccaucgacaagaucaccaacaaggucaacuccgucaucgagaagaugaacacccaguucaccgccgucggcaaggaguucaaccaccucgagaagcgcaucgagaaccucaacaagaaggucgacgacggcuuccucgacaucuggaccuacaacgccgagcuccucguccuccucgagaacgagcgcacccucgacuaccacgacuccaacgucaagaaccucuacgagaagguccgcaaccagcucaagaacaacgccaaggagaucggcaacggcugcuucgaguucuaccacaagugcgacaacaccugcauggaguccgucaagaacggcaccuacgacuaccccaaguacuccgaggaggccaagcucaaccgcgagaagaucgacggcgucaagcucgaguccacccgcaucuaccagauccucgccaucuacuccaccgucgccuccucccucguccucgucgucucccucggcgccaucugcuucuggaugugcuccaacggcucccuccagugccgcaucugcaucuga

SEQ ID NO: 108636 - RNA, 1701 nt, Artificial Sequence; identical to SEQ ID NO: 108620
  derived and/or modified CDS sequence (opt2) from hemagglutinin__InfluenzaA__AIL93858

SEQ ID NO: 108637 - RNA, 1701 nt, Artificial Sequence; identical to SEQ ID NO: 106030
  derived and/or modified CDS sequence (opt2) from hemagglutinin__InfluenzaA__AIL93870

SEQ ID NO: 108638 - RNA, 1701 nt, Artificial Sequence
  derived and/or modified CDS sequence (opt2) from hemagglutinin__InfluenzaA__AIL93882
augaagaccaucaucgcccucuccuacauccucugccucgucuucgcccagaagccccccggcaacgacaacuccaccgccacccucugccucggccaccacgccguccccaacggcaccaucgucaagaccaucaccaacgaccgcaucgaggucaccaacgccaccgagcucguccagaacuccuccaucggcgagaucugcgacuccccccaccagauccucgacggcgagaacugcacccucaucgacgcccuccucggcgacccccagugcgacggcuuccagaacaagaagugggaccucuucgucgagcgcuccaaggccuacuccaacugcuaccccuacgacguccccgacuacgccucccuccgcucccucgucgccuccuccggcacccucgaguucaacaacgaguccuucaacugggccggcgucacccagaacggcaccuccuccgccugcauccgcggcuccaacuccuccuucuucucccgccucaacuggcucacccaccucaacuucaaguaccccgcccucaacgucaccaugcccaacaacgagcaguucgacaagcucuacaucuggggcguccaccaccccggcaccgacaaggaccagaucuuccucuacgcccaguccuccggccgcaucaccgucuccaccaagcgcucccagcaggccgucauccccaacaucggcucccgcccccgcauccgcaacauccccucccgcaucuccaucuacuggaccaucgucaagcccggcgacauccuccucaucaacuccaccggcaaccucaucgccccccgcggcuacuucaagauccgcuccggcaaguccuccaucaugcgcuccgacgcccccaucggcaagugcaaguccgagugcaucacccccaacggcuccauccccaacgacaagcccuuccagaacgucaaccgcaucaccuacggcgccugcccccgcuacgucaagcaguccacccucaagcucgccaccggcaugcgcaacguccccgagaagcagacccgcggcaucuucggcgccaucgccggcuucaucgagaacggcugggagggcauggucgacggcugguacggcuuccgccaccagaacuccgagggccgcggccaggccgccgaccucaaguccacccaggccgccaucgaccagaucaacggcaagcucaaccgccucaucggcaagaccaacgagaaguuccaccagaucgagaaggaguucuccgaggucgagggccgcauccaggaccucgagaaguacgucgaggacaccaagaucgaccucugguccuacaacgccgagcuccucgucgcccucgagaaccagcacaccaucgaccucaccgacuccgagaugaacaagcucuucgagaagaccaagaagcagcuccgcgagaacgccgaggacaugggcaacggcugcuucaagaucuaccacaagugcgacaacgccugcaucggcuccauccgcaacggcaccuacgaccacgacgucuaccgcgacgaggcccucaacaaccgcuuccagaucaagggcgucgagcucaaguccggcuacaaggacuggauccucuggaucuccuucgccaucuccugcuuccuccucugcgucgcccuccucggcuucaucaugugggccugccagaagggcaacauccgcugcaacaucugcaucuga

SEQ ID NO: 108639 - RNA, 1701 nt, Artificial Sequence; identical to SEQ ID NO: 106030
  derived and/or modified CDS sequence (opt2) from hemagglutinin__InfluenzaA__AIL93894

SEQ ID NO: 108640 - RNA, 1701 nt, Artificial Sequence
  derived and/or modified CDS sequence (opt2) from hemagglutinin__InfluenzaA__AIL93906
augaaggccauccucgucguccuccucuacaccuucgccaccgccaacgccgacacccucugcaucggcuaccacgccaacaacuccaccgacaccgucgacaccguccucgagaagaacgucaccgucacccacuccaucaaccuccucgaggacaagcacaacggcaagcucugcaagcuccgcggcgucgccccccuccaccucggcaagugcaacaucgccggcuggauccucggcaaccccgagugcgagucccucuccaccgccuccuccugguccuacaucgucgagaccuccuccuccgacaacggcaccugcuaccccggcgacuucaucaacuacgaggagcuccgcgagcagcucuccuccgucuccuccuucgagcgcuucgagauguuccccaagaccuccuccuggcccaaccacgacuccaacaagggcgucaccgccgccugcccccacgccggcgccaaguccuucuacaagaaccucaucuggcucgucaagaagggcaacuccuaccccaagcucuccaaguccuacaucaacgacaagggcaaggagguccucguccucuggggcauccaccaccccuccaccaccgccgaccagcagucccucuaccagaacgccgacgccuacgucuucgucggcaccuccaaguacuccaagaaguucaagcccgagaucgccauccgccccaagguccgcgaccaggagggccgcaugaacuacuacuggacccucaucgagcccggcgacaagaucaccuucgaggccaccggcaaccucgucgucccccgcuacgccuucgccauggagcgcaacgccggcuccggcaucaucaucuccgacacccccguccacgacugcaacaccaccugccagacccccgagggcgccaucaacaccucccuccccuuccagaacauccaccccaucaccaucggcaagugccccaaguacgucaaguccaccaagcuccgccucgccaccggccuccgcaacguccccuccauccagucccgcggccucuucggcgccaucgccggcuucaucgagggcggcuggaccggcauggucgacggcugguacggcuaccaccaccagaacgagcagggcuccggcuacgccgccgaccucaaguccacccagaacgccaucgacaagaucaccaacaaggucaacuccgucaucgagaagaugaacacccaguucaccgccgucggcaaggaguucaaccaccucgagaagcgcaucgagaaccucaacaagaaggucgacgacggcuuccucgacaucuggaccuacaacgccgagcuccucguccuccucgagaacgagcgcacccucgacuaccacgacuccaacgucaagaaccucuacgagaagguccgcaaccagcucaagaacaacgccaaggagaucggcaacggcugcuucgaguucuaccacaagugcgacaacaccugcauggaguccgucaagaacggcaccuacgacuaccccaaguacuccgaggaggccaagcucaaccgcgagaagaucgacggcgucaagcucgaguccacccgcaucuaccagauccucgccaucuacuccaccgucgccuccucccucguccucgucgucucccucggcgccaucuccuucuggaugugcuccaacggcucccuccagugccgcaucugcaucuga

SEQ ID NO: 108641 - RNA, 1701 nt, Artificial Sequence
  derived and/or modified CDS sequence (opt2) from hemagglutinin__InfluenzaA__AIL93917
augaagaccaucaucgcccucuccuacauccucugccucgucuucgcccagaagcuccccggcaacgacaacuccaccgccacccucugccucggccaccacgccguccccaacggcaccaucgucaagaccaucaccaacgaccgcaucgaggucaccaacgccaccgagcucguccagaacuccuccaucggcgagaucugcgaccgcccccaccagauccucgacggcgagaacugcacccucaucgacgcccuccucggcgacccccagugcgacggcuuccagaacaagaagugggaccucuucgucgagcgcuccaaggccuacuccaacugcuaccccuacgacguccccgacuacgccucccuccgcucccucgucgccuccuccggcacccucgaguucaacaacgaguccuucaacugggccggcgucacccagaacggcaccuccuccgccugcauccgcggcuccaacuccuccuucuucucccgccucaacuggcucacccaccucaacuucaaguaccccgcccucaacgucaccaugcccaacaacgagcaguucgacaagcucuacaucuggggcguccaccaccccggcaccgacaaggaccagaucuuccucuacgcccaguccuccggccgcaucaccgucuccaccaagcgcucccagcaggccgucauccccaacaucggcucccgcccccgcauccgcaacauccccucccgcaucuccaucuacuggaccaucgucaagcccggcgacauccuccucaucaacuccaccggcaaccucaucgccccccgcggcuacuucaagauccgcuccggcaaguccuccaucaugcgcuccgacgcccccaucggcaagugcaaguccgagugcaucacccccaacggcuccauccccaacgacaagcccuuccagaacgucaaccgcaucaccuacggcgccugcccccgcuacgucaagcaguccacccucaagcucgccaccggcaugcgcaacguccccgagaagcagacccgcggcaucuucggcgccaucgccggcuucaucgagaacggcugggagggcauggucgacggcugguacggcuuccgccaccagaacuccgagggccgcggccaggccgccgaccucaaguccacccaggccgccaucgaccagaucaacggcaagcucaaccgccucaucggcaagaccaacgagaaguuccaccagaucgagaaggaguucuccgaggucgagggccgcauccaggaccucgagaaguacgucgaggacaccaagaucgaccucugguccuacaacgccgagcuccucgucgcccucgagaaccagcacaccaucgaccucaccgacuccgagaugaacaagcucuucgagaagaccaagaagcagaugcgcgagaacgccgaggacaugggcaacggcugcuucaagaucuaccacaagugcgacaacgccugcaucggcuccauccgcaacggcaccuacgaccacgacgucuaccgcgacgaggcccucaacaaccgcuuccagaucaagggcgucgagcucaaguccggcuacaaggacuggauccucuggaucuccuucgccaucuccugcuuccuccucugcgucgcccuccucggcuucaucaugugggccugccagaagggcaacauccgcugcaacaucugcaucuga

SEQ ID NO: 108642 - RNA, 1701 nt, Artificial Sequence; identical to SEQ ID NO: 106076
  derived and/or modified CDS sequence (opt2) from hemagglutinin__InfluenzaA__AIL93929

SEQ ID NO: 108643 - RNA, 1701 nt, Artificial Sequence
  derived and/or modified CDS sequence (opt2) from hemagglutinin__InfluenzaA__AIL93940
augaaggccauccucgucguccuccucuacaccuucgccaccgccaacgccgacacccucugcaucggcuaccacgccaacaacuccaccgacaccgucgacaccguccucgagaagaacgucaccgucacccacuccgucaaccuccucgaggacaagcacaacggcaagcucugcaagcuccgcggcgucuccccccuccaccucggcaagugcaacaucgccggcuggauccucggcaaccccgagugcgagucccucuccaccgccuccuccugguccuacaucgucgagaccuccuccuccgacaacggcaccugcuaccccggcgacuucaucaacuacgaggagcuccgcgagcagcucuccuccgucuccuccuucgagcgcuucgagaucuuccccaagaccuccuccuggcccaaccacgacuccaacaagggcgucaccgccgccugcccccacgccggcgccaaguccuucuacaagaaccucaucuggcucgucaagaagggcaacuccuaccccaagcucucccaguccuacaucaacgacaagggcaaggagguccucguccucuggggcauccaccaccccuccaccaccgccgaccagcagucccucuaccagaacgccgacgccuacgucuucgucggcaccucccgcuacuccaagaaguucaagcccgagaucgccauccgccccaagguccgcgaccaggagggccgcaugaacuacuacuggacccucgucgagcccggcgacaagaucaccuucgaggccaccggcaaccucgucgucccccgcuacgccuucaccauggagcgcaacgccggcuccggcaucaucaucuccgacacccccguccacgacugcaacaccaccugccagacccccgagggcgccaucaacaccucccuccccuuccagaacauccaccccaucaccaucggcaagugccccaaguacgucaaguccaccaagcuccgccucgccaccggccuccgcaacguccccuccauccagucccgcggccucuucggcgccaucgccggcuucaucgagggcggcuggaccggcauggucgacggcugguacggcuaccaccaccagaacgagcagggcuccggcuacgccgccgaccucaaguccacccagaacgccaucgacaagaucaccaacaaggucaacuccgucaucgagaagaugaacacccaguucaccgccgucggcaaggaguucaaccaccucgagaagcgcaucgagaaccucaacaagaaggucgacgacggcuuccucgacaucuggaccuacaacgccgagcuccucguccuccucgagaacgagcgcacccucgacuaccacgacuccaacgucaagaaccucuacgagaagguccgcaaccagcucaagaacaacgccaaggagaucggcaacggcugcuucgaguucuaccacaagugcgacaacaccugcauggaguccgucaagaacggcaccuacgacuaccccaaguacuccgaggaggccaagcucaaccgcgagaagaucgacggcgucaagcucgaguccacccgcaucuaccagauccucgccaucuacuccaccgucgccuccucccucguccucgucgucucccucggcgccaucuccuucuggaugugcuccaacggcucccuccagugccgcaucugcaucuga

SEQ ID NO: 108644 - RNA, 1701 nt, Artificial Sequence; identical to SEQ ID NO: 106030
  derived and/or modified CDS sequence (opt2) from hemagglutinin__InfluenzaA__AIL93951

SEQ ID NO: 108645 - RNA, 1701 nt, Artificial Sequence; identical to SEQ ID NO: 106030
  derived and/or modified CDS sequence (opt2) from hemagglutinin__InfluenzaA__AIL93963

SEQ ID NO: 108646 - RNA, 1701 nt, Artificial Sequence; identical to SEQ ID NO: 105894
  derived and/or modified CDS sequence (opt2) from hemagglutinin__InfluenzaA__AIL93975

SEQ ID NO: 108647 - RNA, 1701 nt, Artificial Sequence; identical to SEQ ID NO: 108623
  derived and/or modified CDS sequence (opt2) from hemagglutinin__InfluenzaA__AIL93987

SEQ ID NO: 108648 - RNA, 1701 nt, Artificial Sequence; identical to SEQ ID NO: 106030
  derived and/or modified CDS sequence (opt2) from hemagglutinin__InfluenzaA__AIL93998

SEQ ID NO: 108649 - RNA, 1701 nt, Artificial Sequence; identical to SEQ ID NO: 108620
  derived and/or modified CDS sequence (opt2) from hemagglutinin__InfluenzaA__AIL94010

SEQ ID NO: 108650 - RNA, 1701 nt, Artificial Sequence; identical to SEQ ID NO: 108620
  derived and/or modified CDS sequence (opt2) from hemagglutinin__InfluenzaA__AIL94022

SEQ ID NO: 108651 - RNA, 1701 nt, Artificial Sequence
  derived and/or modified CDS sequence (opt2) from hemagglutinin__InfluenzaA__AIL94046
augaagaccaucaucgcccucuccuacauccucugccucgucuucgcccagaagcuccccggcaacgacaacuccaccgccacccucugccucggccaccacgccguccccaacggcaccaucgucaagaccaucaccaacgaccgcaucgaggucaccaacgccaccgagcucguccagaacuccuccaucggcgagaucugcgaccgcccccaccagauccucgacggcgagaacugcacccucaucgacgcccuccucggcgacccccagugcgacggcuuccagaacaagaagugggaccucuucgucgagcgcuccaaggccuacuccaacugcuaccccuacgacguccccgacuacgccucccuccgcucccucgucgccuccuccggcacccucgaguucaacaacgaguccuucaacugggccggcgucacccagaacggcaccuccuccgccugcauccgcggcuccaacuccuccuucuucucccgccucaacuggcucacccaccucaacuucaaguaccccgcccucaacgucaccaugcccaacaacgagcaguucgacaagcucuacaucuggggcguccaccaccccggcaccgacaaggaccagaucuuccucuacgcccaguccuccggccgcaucaccgucuccaccaagcgcucccagcaggccgucauccccaacaucggcucccgcccccgcauccgcaacauccccucccgcaucuccaucuacuggaccaucgucaagcccggcgacauccuccucaucaacuccaccggcaaccucaucgccccccgcggcuacuucaagauccgcuccggcaaguccuccaucaugcgcuccgacgcccccaucggcaagugcaaguccgagugcaucacccccaacggcuccauccccaacgacaagcccuuccagaacgucaaccgcaucaccuacggcgccugcccccgcuacgucaagcaguccacccucaagcucgccaccggcaugcgcaacguccccgagaagcagacccgcggcaucuucggcgccaucgccggcuucaucgagaacggcugggagggcauggucgacggcugguacggcuuccgccaccagaacuccgagggccgcggccaggccgccgaccucaaguccacccaggccgccaucgaccagaucaacggcaagcucaaccgccucaucggcaagaccaacgagaaguuccaccagaucgagaaggaguucuccgaggucgagggccgcauccaggaccucgagaaguacgucgaggacaccaagaucgaccucugguccuacaacgccgagcuccucgucgcccucgagaaccagcacaccaucgaccucaccgacuccgagaugaacaagcucuucgagaagaccaagaagcagcuccgcgagaacgccgaggacaugggcaacggcugcuucaagaucuaccacaagugcgacaacgccugcaucggcuccauccgcaacggcaccuacgaccacgacgucuaccgcgacgaggcccucaacaaccgcuuccagaucaagggcgucgagcucaaguccggcuacaaggacuggauccucuggaucuccuucgccaucuccugcuuccuccucugcgucgcccuccucggcuucaucaugugggccugccagaagggcaacauccgcugcaacaucugcaucuga

SEQ ID NO: 108652 - RNA, 1701 nt, Artificial Sequence
  derived and/or modified CDS sequence (opt2) from hemagglutinin__InfluenzaA__AIL94058
augaaggccauccucgucguccuccucuacaccuucgcccccgccaacgccgacacccucugcaucggcuaccacgccaacaacuccaccgacaccgucgacaccguccucgagaagaacgucaccgucacccacuccgucaaccuccucgaggacaagcacaacggcaagcucugcaagcuccgcggcgucgccccccuccaccucggcaagugcaacaucgccggcuggauccucggcaaccccgagugcgagucccucuccaccgccuccuccugguccuacaucgucgagaccuccuccuccgacaacggcaccugcuaccccggcgacuucaucaacuacgaggagcuccgcgagcagcucuccuccgucuccuccuucgagcgcuucgagaucuuccccaagaccuccuccuggcccaaccacgacuccaacaagggcgucaccgccgccugcccccacgccggcgccaaguccuucuacaagaaccucaucuggcucgucaagaagggcaacuccuaccccaagcucucccaguccuacaucaacgacaagggcaaggagguccucguccucuggggcauccaccaccccuccaccaccgccgaccagcagucccucuaccagaacgccgacgccuacgucuucgucggcaccucccgcuacuccaagaaguucaagcccgagaucgccauccgccccaagguccgcgaccaggagggccgcaugaacuacuacuggacccucgucgagcccggcgacaagaucaccuucgaggccaccggcaaccucgucgucccccgcuacgccuucaccaucgagcgcuccgccggcuccggcaucaucaucuccgacacccccguccacgacugcaacaccaccugccagacccccgagggcgccaucaacaccucccuccccuuccagaacauccaccccaucaccaucggcaagugccccaaguacgucaaguccaccaagcuccgccucgccaccggccuccgcaacguccccuccauccagucccgcggccucuucggcgccaucgccggcuucaucgagggcggcuggaccggcauggucgacggcugguacggcuaccaccaccagaacgagcagggcuccggcuacgccgccgaccucaaguccacccagaacgccaucgacaagaucaccaacaaggucaacuccgucaucgagaagaugaacacccaguucaccgccgucggcaaggaguucaaccaccucgagaagcgcaucgagaaccucaacaagaaggucgacgacggcuuccucgacaucuggaccuacaacgccgagcuccucguccuccucgagaacgagcgcacccucgacuaccacgacuccaacgucaagaaccucuacgagaagguccgcaaccagcucaagaacaacgccaaggagaucggcaacggcugcuucgaguucuaccacaagugcgacaacaccugcauggaguccgucaagaacggcaccuacgacuaccccaaguacuccgaggaggccaagcucaaccgcgagaagaucgacggcgucaagcucgaguccacccgcaucuaccagauccucgccaucuacuccaccgucgccuccucccucguccucgucgucucccucggcgccaucuccuucuggaugugcuccaacggcucccuccagugccgcaucugcaucuga

SEQ ID NO: 108653 - RNA, 1701 nt, Artificial Sequence; identical to SEQ ID NO: 108623
  derived and/or modified CDS sequence (opt2) from hemagglutinin__InfluenzaA__AIL94069

SEQ ID NO: 108654 - RNA, 1701 nt, Artificial Sequence; identical to SEQ ID NO: 106076
  derived and/or modified CDS sequence (opt2) from hemagglutinin__InfluenzaA__AIL94080

SEQ ID NO: 108655 - RNA, 1701 nt, Artificial Sequence; identical to SEQ ID NO: 108620
  derived and/or modified CDS sequence (opt2) from hemagglutinin__InfluenzaA__AIL94235

SEQ ID NO: 108656 - RNA, 1701 nt, Artificial Sequence; identical to SEQ ID NO: 106076
  derived and/or modified CDS sequence (opt2) from hemagglutinin__InfluenzaA__AIL94247

SEQ ID NO: 108657 - RNA, 1701 nt, Artificial Sequence
  derived and/or modified CDS sequence (opt2) from hemagglutinin__InfluenzaA__AIL94258
augaagaccaucaucgcccucuccuacauccucugccucgucuucacccagaagcuccccggcaacgacaacuccaccgccacccucugccucggccaccacgccguccccaacggcaccaucgucaagaccaucaccaacgaccgcaucgaggucaccaacgccaccgagcucguccagaacuccuccaucggcgagaucugcgacuccccccaccagauccucgacggcgagaacugcacccucaucgacgcccuccucggcgacccccagugcgacggcuuccagaacaagaagugggaccucuucgucgagcgcuccaaggccuacuccaacugcuaccccuacgacguccccgacuacgccucccuccgcucccucgucgccuccuccggcacccucgaguucaacaacgaguccuucaacugggccggcgucacccagaacggcaccuccuccgccugcauccgcggcuccaacuccuccuucuucucccgccucaacuggcucacccaccucaacuucaaguaccccgcccucaacgucaccaugcccaacaacgagcaguucgacaagcucuacaucuggggcguccaccaccccggcaccgacaaggaccagaucuuccucuacgcccaguccuccggccgcaucaccgucuccaccaagcgcucccagcaggccgucauccccaacaucggcucccgcccccgcauccgcaacauccccucccgcaucuccaucuacuggaccaucgucaagcccggcgacauccuccucaucaacuccaccggcaaccucaucgccccccgcggcuacuucaagauccgcuccggcaaguccuccaucaugcgcuccgacgcccccaucggcaagugcaaguccgagugcaucacccccaacggcuccauccccaacgacaagcccuuccagaacgucaaccgcaucaccuacggcgccugcccccgcuacgucaagcaguccacccucaagcucgccaccggcaugcgcaacguccccgagaagcagacccgcggcaucuucggcgccaucgccggcuucaucgagaacggcugggagggcauggucgacggcugguacggcuuccgccaccagaacuccgagggccgcggccaggccgccgaccucaaguccacccaggccgccaucgaccagaucaacggcaagcucaaccgccucaucggcaagaccaacgagaaguuccaccagaucgagaaggaguucuccgaggucgagggccgcauccaggaccucgagaaguacgucgaggacaccaagaucgaccucugguccuacaacgccgagcuccucgucgcccucgagaaccagcacaccaucgaccucaccgacuccgagaugaacaagcucuucgagaagaccaagaagcagcuccgcgagaacgccgaggacaugggcaacggcugcuucaagaucuaccacaagugcgacaacgccugcaucggcuccauccgcaacggcaccuacgaccacgacgucuaccgcgacgaggcccucaacaaccgcuuccagaucaagggcgucgagcucaaguccggcuacaaggacuggauccucuggaucuccuucgccaucuccugcuuccuccucugcgucgcccuccucggcuucaucaugugggccugccagaagggcaacauccgcugcaacaucugcaucuga

SEQ ID NO: 108658 - RNA, 1701 nt, Artificial Sequence
  derived and/or modified CDS sequence (opt2) from hemagglutinin__InfluenzaA__AIL94270
augaagaccaucaucgcccucuccuacauccucugccucgucuucgcccagaagcuccccggcaacgacaacuccaccgccacccucugccucggccaccacgccguccccaacggcaccaucgucaagaccaucaccaacgaccgcaucgaggucaccaacgccaccgagcucguccagaacuccuccaucggcgagaucugcgacuccccccaccagauccucgacggcgagaacugcacccucaucgacgcccuccucggcgacccccagugcgacggcuuccagaacaagaagugggaccucuucgucgagcgcuccaaggccuacuccaacugcuaccccuacgacguccccgacuacgccucccuccgcucccucgucgccuccuccggcacccucgaguucaacaacgaguccuucaacugggccggcgucacccagaacggcaccuccuccgccugcauccgcggcuccaacuccuccuucuucucccgccucaacuggcucacccaccucaacuucaaguaccccgcccucaacgucaccaugcccaacaacgagcaguucgacaagcucuacaucuggggcguccaccaccccggcaccgacaaggaccagaucuuccucuacgcccaguccuccggccgcaucaccgucuccaccaagcgcucccagcaggccgucauccccaacaucggcucccgcccccgcauccgcaacauccccucccgcaucuccaucuacuggaccaucgucaagcccggcgacauccuccucaucaacuccaccggcaaccucaucgccccccgcggcuacuucaagauccgcuccggcaaguccuccaucaugcgcuccgacgcccccaucggcaagugcaacuccgagugcaucacccccaacggcuccauccccaacgacaagcccuuccagaacgucaaccgcaucaccuacggcgccugcccccgcuacgucaagcaguccacccucaagcucgccaccggcaugcgcaacguccccgagaagcagacccgcggcaucuucggcgccaucgccggcuucaucgagaacggcugggagggcauggucgacggcugguacggcuuccgccaccagaacuccgagggccgcggccaggccgccgaccucaaguccacccaggccgccaucgaccagaucaacggcaagcucaaccgccucaucggcaagaccaacgagaaguuccaccagaucgagaaggaguucuccgaggucgagggccgcauccaggaccucgagaaguacgucgaggacaccaagaucgaccucugguccuacaacgccgagcuccucgucgcccucgagaaccagcacaccaucgaccucaccgacuccgagaugaacaagcucuucgagaagaccaagaagcagcuccgcgagaacgccgaggacaugggcaacggcugcuucaagaucuaccacaagugcgacaacgccugcaucggcuccauccgcaacggcaccuacgaccacgacgucuaccgcgacgaggcccucaacaaccgcuuccagaucaagggcgucgagcucaaguccggcuacaaggacuggauccucuggaucuccuucgccaucuccugcuuccuccucugcgucgcccuccucggcuucaucaugugggccugccagaagggcaacauccgcugcaacaucugcaucuga

SEQ ID NO: 108659 - RNA, 1701 nt, Artificial Sequence; identical to SEQ ID NO: 106030
  derived and/or modified CDS sequence (opt2) from hemagglutinin__InfluenzaA__AIL94282

SEQ ID NO: 108660 - RNA, 1701 nt, Artificial Sequence; identical to SEQ ID NO: 106030
  derived and/or modified CDS sequence (opt2) from hemagglutinin__InfluenzaA__AIL94294

SEQ ID NO: 108661 - RNA, 1701 nt, Artificial Sequence
  derived and/or modified CDS sequence (opt2) from hemagglutinin__InfluenzaA__AIL94306
augaagaccaucaccgcccucuccuacauccucugccucgccuucgcccagaagccccccggcaacgacaacuccaccgccacccucugccucggccaccacgccguccccaacggcaccaucgucaagaccaucaccaacgaccgcaucgaggucaccaacgccaccgagcucguccagaacuccuccaucggcgagaucugcgacuccccccaccagauccucgacggcgagaacugcacccucaucgacgcccuccucggcgacccccagugcgacggcuuccagaacaagaagugggaccucuucgucgagcgcuccaaggccuacuccaacugcuaccccuacgacguccccgacuacgccucccuccgcucccucgucgccuccuccggcacccucgaguucaacaacgaguccuucaacugggccggcgucacccagaacggcaccuccuccgccugcauccgcggcuccaacuccuccuucuucucccgccucaacuggcucacccaccucaacuucaaguaccccgcccucaacgucaccaugcccaacaacgagcaguucgacaagcucuacaucuggggcguccaccaccccggcaccgacaaggaccagaucuuccucuacgcccaguccuccggccgcaucaccgucuccaccaagcgcucccagcaggccgucauccccaacaucggcucccgcccccgcauccgcaacauccccucccgcaucuccaucuacuggaccaucgucaagcccggcgacauccuccucaucaacuccaccggcaaccucaucgccccccgcggcuacuucaagauccgcuccggcaaguccuccaucaugcgcuccgacgcccccaucggcaagugcaaguccgagugcaucacccccaacggcuccauccccaacgacaagcccuuccagaacgucaaccgcaucaccuacggcgccugcccccgcuacgucaagcaguccacccucaagcucgccaccggcaugcgcaacguccccgagaagcagacccgcggcaucuucggcgccaucgccggcuucaucgagaacggcugggagggcauggucgacggcugguacggcuuccgccaccagaacuccgagggccgcggccaggccgccgaccucaaguccacccaggccgccaucgaccagaucaacggcaagcucaaccgccucaucggcaagaccaacgagaaguuccaccagaucgagaaggaguucuccgaggucgagggccgcauccaggaccucgagaaguacgucgaggacaccaagaucgaccucugguccuacaacgccgagcuccucgucgcccucgagaaccagcacaccaucgaccucaccgacuccgagaugaacaagcucuucgagaagaccaagaagcagcuccgcgagaacgccgaggacaugggcaacggcugcuucaagaucuaccacaagugcgacaacgccugcaucggcuccauccgcaacggcaccuacgaccacgacgucuaccgcgacgaggcccucaacaaccgcuuccagaucaagggcgucgagcucaaguccggcuacaaggacuggauccucuggaucuccuucgccaucuccugcuuccuccucugcgucgcccuccucggcuucaucaugugggccugccagaagggcaacauccgcugcaacaucugcaucuga

SEQ ID NO: 108662 - RNA, 1701 nt, Artificial Sequence
  derived and/or modified CDS sequence (opt2) from hemagglutinin__InfluenzaA__AIL94318
augaagaccaucaucgcccucuccuacauccucugccucgucuucgcccagaagcuccccggcaacgacaacuccaccgccacccucugccucggccaccacgccguccccaacggcaccaucgucaagaccaucaccaacgaccgcaucgaggucaccaacgccaccgagcucguccagaacuccuccaucggcgagaucugcgacuccccccaccagauccucgacggcgagaacugcacccucaucgacgcccuccucggcgacccccagugcgacggcuuccagaacaagaagugggaccucuucgucgagcgcuccaaggccuacuccaacugcuaccccuacgacguccccgacuacgccucccuccgcucccucgucgccuccuccggcacccucgaguucaacaacgaguccuucaacuggaccggcgucacccagaacggcaccuccuccgccugcauccgccgcuccaacuccuccuucuucucccgccucaacuggcucacccaccucaacuucaaguaccccgcccucaacgucaccaugcccaacaacgagcaguucgacaagcucuacaucuggggcguccaccaccccggcaccgacaaggaccagaucuuccucuacgcccaguccuccggccgcaucaccgucuccaccaagcgcucccagcaggccgucauccccaacaucggcucccgcccccgcauccgcaacauccccucccgcaucuccaucuacuggaccaucgucaagcccggcgacauccuccucaucaacuccaccggcaaccucaucgccccccgcggcuacuucaagauccgcuccggcaaguccuccaucaugcgcuccgacgcccccaucggcaagugcaaguccgagugcaucacccccaacggcuccauccccaacgacaagcccuuccagaacgucaaccgcaucaccuacggcgccugcccccgcuacgucaagcaguccacccucaagcucgccaccggcaugcgcaacguccccgagaagcagacccgcggcaucuucggcgccaucgccggcuucaucgagaacggcugggagggcauggucgacggcugguacggcuuccgccaccucaacuccgagggccgcggccaggccgccgaccucaaguccacccaggccgccaucgaccagaucaacggcaagcucaaccgccucaucggcaagaccaacgagaaguuccaccagaucgagaaggaguucuccgaggucgagggccgcauccaggaccucgagaaguacgucgaggacaccaagaucgaccucugguccuacaacgccgagcuccucgucgcccucgagaaccagcacaccaucgaccucaccgacuccgagaugaacaagcucuucgagaagaccaagaagcagcuccgcgagaacgccgaggacaugggcaacggcugcuucaagaucuaccacaagugcgacaacgccugcaucggcuccauccgcaacggcaccuacgaccacaacgucuaccgcgacgaggcccucaacaaccgcuuccagaucaagggcgucgagcucaaguccggcuacaaggacuggauccucuggaucuccuucgccaucuccugcuuccuccucugcgucgcccuccucggcuucaucaugugggccugccagaagggcaacauccgcugcaacaucugcaucuga

SEQ ID NO: 108663 - RNA, 1701 nt, Artificial Sequence; identical to SEQ ID NO: 105894
  derived and/or modified CDS sequence (opt2) from hemagglutinin__InfluenzaA__AIL94330

SEQ ID NO: 108664 - RNA, 1701 nt, Artificial Sequence; identical to SEQ ID NO: 106076
  derived and/or modified CDS sequence (opt2) from hemagglutinin__InfluenzaA__AIL94354

SEQ ID NO: 108665 - RNA, 1701 nt, Artificial Sequence; identical to SEQ ID NO: 106030
  derived and/or modified CDS sequence (opt2) from hemagglutinin__InfluenzaA__AIL94365

SEQ ID NO: 108666 - RNA, 1701 nt, Artificial Sequence
  derived and/or modified CDS sequence (opt2) from hemagglutinin__InfluenzaA__AIL94377
augaagaccaucaucgcccucuccuacauccucugccucgucuucgcccagaagcuccccggcaacgacaacuccaccgccacccucugccucggccaccacgccguccccaacggcaccaucgucaagaccaucaccaacgaccgcaucgaggucaccaacgccaccgagcucguccagaacuccuccaucggcgagaucugcgacuccccccaccagauccucgacggcgagaacugcacccucaucgacgcccuccucggcgacccccacugcgacggcuuccagaacaagaagugggaccucuucgucgagcgcuccaaggccuacuccaacugcuaccccuacgacguccccgacuacgccucccuccgcucccucgucgccuccuccggcacccucgaguucaacaacgaguccuucaacugggccggcgucacccagaacggcaccuccuccgccugcauccgcggcuccaacuccuccuucuucucccgccucaacuggcucacccaccucaacuucaaguaccccgcccucaacgucaccaugcccaacaacgagcaguucgacaagcucuacaucuggggcguccaccaccccggcaccgacaaggaccagaucuuccucuacgcccaguccuccggccgcaucaccgucuccaccaagcgcucccagcaggccgucauccccaacaucggcucccgcccccgcauccgcaacauccccucccgcaucuccaucuacuggaccaucgucaagcccggcgacauccuccucaucaacuccaccggcaaccucaucgccccccgcggcuacuucaagauccgcuccggcaaguccuccaucaugcgcuccgacgcccccaucggcaagugcaaguccgagugcaucacccccaacggcuccauccccaacgacaagcccuuccagaacgucaaccgcaucaccuacggcgccugcccccgcuacgucaagcaguccacccucaagcucgccaccggcaugcgcaacguccccgagaagcagacccgcggcaucuucggcgccaucgccggcuucaucgagaacggcugggagggcauggucgacggcugguacggcuuccgccaccagaacuccgagggccgcggccaggccgccgaccucaaguccacccaggccgccaucgaccagaucaacggcaagcucaaccgccucaucggcaagaccaacgagaaguuccaccagaucgagaaggaguucuccgaggucgagggccgcauccaggaccucgagaaguacgucgaggacaccaagaucgaccucugguccuacaacgccgagcuccucgucgcccucgagaaccagcacaccaucgaccucaccgacuccgagaugaacaagcucuucgagaagaccaagaagcagcuccgcgagaacgccgaggacaugggcaacggcugcuucaagaucuaccacaagugcgacaacgccugcaucggcuccauccgcaacggcaccuacgaccacgacgucuaccgcgacgaggcccucaacaaccgcuuccagaucaagggcgucgagcucaaguccggcuacaaggacuggauccucuggaucuccuucgccaucuccugcuuccuccucugcgucgcccuccucggcuucaucaugugggccugccagaagggcaacauccgcugcaacaucugcaucuga

SEQ ID NO: 108667 - RNA, 1701 nt, Artificial Sequence
  derived and/or modified CDS sequence (opt2) from hemagglutinin__InfluenzaA__AIL94389
augaaggccauccucgucguccuccucuacaccuucgccaccgccaacgccgacacccucugcaucggcuaccacgccaacaacuccaccgacaccgucgacaccguccucgagaagaacgucaccgucacccacuccgucaaccuccucgaggacaagcacaacggcaagcucugcaagcuccgcggcgucgccccccuccaccucggcaagugcaacaucgccggcuggauccucggcaaccccgagugcgagucccucuccaccgccuccuccugguccuacaucgucgagaccuccuccuccgacaacggcaccugcuaccccggcgacuucaucaacuacgaggagcuccgcgagcagcucuccuccgucuccuccuucgagcgcuucgagaucuuccccaagaccuccuccuggcccaaccacgacuccaacaagggcgucaccgccgccugcccccacgccggcgccaaguccuucuacaagaaccucaucuggcucgucaagaagggcaacuccuaccccaagcucucccaguccuacaucaacgacaagggcaaggagguccucguccucuggggcauccaccaccccuccaccaccgccgaccagcagucccucuaccagaacgccgacgccuacgucuucgucggcaccucccgcuacuccaagaaguucaagcccgagaucgccauccgccccaagguccgcgaccaggagggccgcaugaacuacuacuggacccucgucgagcccggcgacaagaucaccuucgaggccaccggcaaccucgucgucccccgcuacgccuucaccauggagcgcaacgccggcuccggcaucaucaucuccgacacccccguccacgacugcaacaccaccugccagacccccgagggcgccaucaacaccucccuccccuuccagaacauccaccccaucaccaucggcaagugccccaaguacgucaaguccaccaagcuccgccucgccaccggccuccgcaacguccccuccauccagucccgcggccucuucggcgccaucgccggcuucaucgagggcggcuggaccggcauggucgacggcugguacggcuaccaccaccagaacgagcagggcuccggcuacgccgccgaccucaaguccacccagaacgccaucgacaagaucaccaacaaggucaacuccgucaucgagaagaugaacacccaguucaccgccgucggcaaggaguucaaccaccucgagaagcgcaucgagaaccucaacaagaaggucgacgacggcuuccucgacaucuggaccuacaacgccgagcuccucauccuccucgagaacgagcgcacccucgacuaccacgacuccaacgucaagaaccucuacgagaagguccgcaaccagcucaagaacaacgccaaggagaucggcaacggcugcuucgaguucuaccacaagugcgacaacaccugcauggaguccgucaagaacggcaccuacgacuaccccaaguacuccgaggaggccaagcucaaccgcgagaagaucgacggcgucaagcucgaguccacccgcaucuaccagauccucgccaucuacuccaccgucgccuccucccucguccucgucgucucccucggcgccaucuccuucuggaugugcuccaacggcucccuccagugccgcaucugcaucuga

SEQ ID NO: 108668 - RNA, 1701 nt, Artificial Sequence; identical to SEQ ID NO: 106030
  derived and/or modified CDS sequence (opt2) from hemagglutinin__InfluenzaA__AIL94411

SEQ ID NO: 108669 - RNA, 1701 nt, Artificial Sequence; identical to SEQ ID NO: 106030
  derived and/or modified CDS sequence (opt2) from hemagglutinin__InfluenzaA__AIL94423

SEQ ID NO: 108670 - RNA, 1701 nt, Artificial Sequence; identical to SEQ ID NO: 108623
  derived and/or modified CDS sequence (opt2) from hemagglutinin__InfluenzaA__AIL94435

SEQ ID NO: 108671 - RNA, 1701 nt, Artificial Sequence; identical to SEQ ID NO: 106030
  derived and/or modified CDS sequence (opt2) from hemagglutinin__InfluenzaA__AIL94446

SEQ ID NO: 108672 - RNA, 1701 nt, Artificial Sequence; identical to SEQ ID NO: 106030
  derived and/or modified CDS sequence (opt2) from hemagglutinin__InfluenzaA__AIL94458

SEQ ID NO: 108673 - RNA, 1701 nt, Artificial Sequence
  derived and/or modified CDS sequence (opt2) from hemagglutinin__InfluenzaA__AIL94470
augaaggccauccucgucguccuccucuacaccuucgccaccgccaacgccgacacccucugcaucggcuaccacgccaacaacuccaccgacaccgucgacaccguccucgagaagaacgucaccgucacccacuccgucaaccuccucgaggacaagcacaacggcaagcucugcaagcuccgcggcgucgccccccuccaccucggcaagugcaacaucgccggcuggauccucggcaaccccgagugcgagucccucuccaccgccuccuccugguccuacaucgucgagaccuccuccuccgacaacggcaccugcuaccccggcgacuucaucaacuacgaggagcuccgcgagcagcucuccuccgucuccuccuucgagcgcuucgagaucuuccccaagaccuccuccuggcccaaccacgacuccaacaagggcgucaccgccgccugcccccacgccggcgccaaguccuucuacaagaaccucaucuggcucgucaagaagggcaacuccuaccccaagcucucccaguccuacaucaacgacaagggcaaggagguccucguccucuggggcauccaccaccccuccaccaccgccgaccagcagucccucuaccagaacgccgacgccuacgucuucgucggcaccucccgcuacuccaagaaguucaagcccgagaucgccauccgccccaagguccgcgaccaggagggccgcaugaacuacuacuggacccucgucgagcccggcgacaagaucaccuucgaggccaccggcaaccucgucgucccccgcuacgccuucaccauggagcgcaacgccggcuccggcaucaucaucuccgacacccccgcccacgacugcaacaccaccugccagacccccgagggcgccaucaacaccucccuccccuuccagaacauccaccccaucaccaucggcaagugccccaaguacgucaaguccaccaagcuccgccucgccaccggccuccgcaacguccccuccauccagucccgcggccucuucggcgccaucgccggcuucaucgagggcggcuggaccggcauggucgacggcugguacggcuaccaccaccagaacgagcagggcuccggcuacgccgccgaccucaaguccacccagaacgccaucgacaagaucaccaacaaggucaacuccgucaucgagaagaugaacacccaguucaccgccgucggcaaggaguucaaccaccucgagaagcgcaucgagaaccucaacaagaaggucgacgacggcuuccucgacaucuggaccuacaacgccgagcuccucguccuccucgagaacgagcgcacccucgacuaccacgacuccaacgucaagaaccucuacgagaagguccgcaaccagcucaagaacaacgccaaggagaucggcaacggcugcuucgaguucuaccacaagugcgacaacaccugcauggaguccgucaagaacggcaccuacgacuaccccaaguacuccgaggaggccaagcucaaccgcgagaagaucgacggcgucaagcucgaguccacccgcaucuaccagauccucgccaucuacuccaccgucgccuccucccucguccucgucgucucccucggcgccaucuccuucuggaugugcuccaacggcucccuccagugccgcaucugcaucuga

SEQ ID NO: 108674 - RNA, 1701 nt, Artificial Sequence
  derived and/or modified CDS sequence (opt2) from hemagglutinin__InfluenzaA__AIL94481
augaagaccaucaucgcccucuccuacauccucugccucgucuucgcccagaagcuccccggcaacgacaacuccaccgccacccucugccucggccaccacgccguccccaacggcaccaucgucaagaccaucaccaacgaccgcaucgaggucaccaacgccaccgagcucguccagaacuccuccaucggcgagaucugcgacuccccccaccagauccucgacggcgagaacugcacccucaucgacgcccuccucggcgacccccagugcgacggcuuccagaacaagaagugggaccucuucgucgagcgcuccaaggccuacuccaacugcuaccccuacgacguccccgacuacgccucccuccgcucccucgucgccuccuccggcacccucgaguucaacaacgaguccuucaacugggccggcgucacccagaacggcaccuccuccgccugcauccgcggcuccaacuccuccuucuucucccgccucaacuggcucacccaccucaacuucaaguaccccgcccucaacgucaccaugcccaacaacgagcaguucgacaagcucuacaucuggggcguccaccaccccggcaccgacaaggaccagaucuuccucuacgcccaguccuccggccgcaucaccgucuccaccaagcgcucccagcaggccgucauccccaacaucggcucccgcccccgcauccgcaacauccccucccgcaucuccaucuacuggaccaucgucaagcccggcgacauccuccucaucaacuccaccggcaaccucaucgccccccgcggcuacuucaagauccgcuccggcaaguccuccaucaugcgcuccgacgcccccaucggcaagugcaaguccgagugcaucacccccaacggcuccauccccaacgacaagcccuuccagaacgucaaccgcaucaccuacggcgccugcccccgcuacgucaagcaguccacccucaagcucgccaccggcaugcgcaacguccccgagaagcagacccgcggcaucuucggcgccaucgccggcuucaucgagaacggcugggagggcauggucgacggcugguacggcuuccgccaccagaacuccgagggccgcggccaggccgccgaccucaaguccacccaggccgccaucgaccagaucaacggcaagcucaaccgccucaucggcaagaccaacgagaaguuccaccagaucgagaaggaguucuccgaggucgagggccgcauccaggaccucgagaaguacgucgaggacaccaagaucgaccucugguccuacaacgccgagcuccucgucgcccucgagaaccagcacaccaucgaccucaccgacuccgagaugaacaagcucuucgagaagaccaagaagcagcuccgcgagaacgccgaggacaugggcaacggcugcuucaagaucuaccacaagugcgacaacgccugcaucggcuccauccgcaacggcaccuacgaccacgacgucuaccgcgacgaggcccucaacaaccgcuuccagaucaagggcgucgagcucaaguccggcuacaaggacuggaucaucuggaucuccuucgccaucuccugcuuccuccucugcgucgcccuccucggcuucaucaugugggccugccagaagggcaacauccgcugcaacaucugcaucuga

SEQ ID NO: 108675 - RNA, 1701 nt, Artificial Sequence
  derived and/or modified CDS sequence (opt2) from hemagglutinin__InfluenzaA__AIL94493
augaaggccauccucgucguccuccucuacaccuucgccaccgccaacgccgacacccucugcaucggcuaccacgccaacaacuccaccgacaccgucgacaccguccucgagaagaacgucaccgucacccacuccgucaaccuccucgaggacaagcacaacggcaagcucugcaagcuccgcggcgucgccccccuccaccucggcaagugcaacaucgccggcuggauccucggcaaccccgagugcgagucccucuccaccgccuccuccugguccuacaucgucgagaccuccuccuccgacaacggcaccugcuaccccggcgacuucaucaacuacgaggagcuccgcgagcagcucuccuccgucuccuccuucgagcgcuucgagaucuuccccaagaccuccuccuggcccaaccacgacuccaacaagggcgucaccgccgccugcccccacgccggcgccaaguccuucuacaagaaccucaucuggcucgucaagaagggcaacuccuaccccaagcucucccaguccuacaucaacgacaagggcaaggagguccucguccucuggggcauccaccaccccuccaccaccgccgaccagcagucccucuaccagaacgccgacgccuacgucuucgucggcaccucccgcuacuccaagaaguucaagcccgagaucgccauccgccccaagguccgcgaccaggagggccgcaugaacuacuacuggacccucgucgagcccggcgacaagaucaccuucgaggccaccggcaaccucgucgucccccgcuacgccuucaccauggagaagaacgccggcuccggcaucaucaucuccgacacccccguccacgacugcaacaccaccugccagacccccgagggcgccaucaacaccuccuuccccuuccagaacauccaccccaucaccaucggcaagugccccaaguacgucaaguccaccaagcuccgccucgccaccggccuccgcaacguccccuccauccagucccgcggccucuucggcgccaucgccggcuucaucgagggcggcuggaccggcauggucgacggcugguacggcuaccaccaccagaacgagcagggcuccggcuacgccgccgaccucaaguccacccagaacgccaucgacaagaucaccaacaaggucaacuccgucaucgagaagaugaacacccaguucaccgccgucggcaaggaguucaaccaccucgagaagcgcaucgagaaccucaacaagaaggucgacgacggcuuccucgacaucuggaccuacaacgccgagcuccucguccuccucgagaacgagcgcacccucgacuaccacgacuccaacgucaagaaccucuacgagaagguccgcaaccagcucaagaacaacgccaaggagaucggcaacggcugcuucgaguucuaccacaagugcgacaacaccugcauggaguccgucaagaacggcaccuacgacuaccccaaguacuccgaggaggccaagcucaaccgcgagaagaucgacggcgucaagcucgaguccacccgcaucuaccagauccucgccaucuacuccaccgucgccuccucccucguccucgucgucucccucggcgccaucuccuucuggaugugcuccaacggcucccuccagugccgcaucugcaucuga

SEQ ID NO: 108676 - RNA, 1701 nt, Artificial Sequence; identical to SEQ ID NO: 108623
  derived and/or modified CDS sequence (opt2) from hemagglutinin__InfluenzaA__AIL94504

SEQ ID NO: 108677 - RNA, 1701 nt, Artificial Sequence; identical to SEQ ID NO: 106030
  derived and/or modified CDS sequence (opt2) from hemagglutinin__InfluenzaA__AIL94515

SEQ ID NO: 108678 - RNA, 1701 nt, Artificial Sequence; identical to SEQ ID NO: 106030
  derived and/or modified CDS sequence (opt2) from hemagglutinin__InfluenzaA__AIL94527

SEQ ID NO: 108679 - RNA, 1701 nt, Artificial Sequence
  derived and/or modified CDS sequence (opt2) from hemagglutinin__InfluenzaA__AIL94539
augaaggccauccucgucguccuccucuacaccuucgccaccgccaacgccgacacccucugcaucggcuaccacgccaacaacuccaccgacaccgucgacaccguccucgagaagaacgucaccgucacccacuccgucaaccuccucgaggacaagcacaacggcaagcucugcaagcuccgcggcgucgccccccuccaccucggcaagugcaacaucgccggcuggauccucggcaaccccgagugcgagucccucuccaccgccuccuccugguccuacaucgucgagaccuccuccuccgacaacggcaccugcuaccccggcgacuucaucaacuacgaggagcuccgcgagcagcucuccuccgucuccuccuucgagcgcuucgagaucuuccccaagaccuccuccuggcccaaccacgacuccaacaagggcgucaccgccgccugcccccacgccggcgccaaguccuucuacaagaaccucaucuggcucgucaagaagggcaacuccuaccccaagcucucccaguccuacaucaacgacaagggcaaggagguccucguccucuggggcauccaccaccccuccaccaccgccgaccagcagucccucuaccagaacgccgacgccuacgucuucgucggcaccucccgcuacuccaagaaguucaagcccgagaucgccauccgccccaagguccgcgaccaggagggccgcaugaacuacuacuggacccucgucgagcccggcgacaagaucaccuucgaggccaccggcaaccucgucgucccccgcuacgccuucaccauggagcgcaacgccggcuccggcaucaucaucuccgacacccccgcccacgacugcaacaccaccugccagacccccgagggcgccaucaacaccucccuccccuuccagaacauccaccccaucaccaucggcaagugccccaaguacgucaaguccaccaagcuccgccucgccaccggccuccgcaacguccccuccauccagucccgcggccucuucggcgccaucgccggcuucaucgagggcggcuggaccggcauggucgacggcugguacggcuaccaccaccagaacgagcagggcuccggcuacgccgccgaccucaaguccacccagaacgccaucgacaagaucaccaacaaggucaacuccgucaucgagaagaugaacacccaguucaccgccgucggcaaggaguucaaccaccucgagaagcgcaucgagaaccucaacaagaaggucgacgacggcuuccucgacaucuggaccuacaacgccgagcuccucguccuccucgagaacgagcgcacccucgacuaccacgacuccaacgucaagaaccucuacgagaagguccgcaaccagcucaagaacaacgccaaggaggucggcaacggcugcuucgaguucuaccacaagugcgacaacaccugcauggaguccgucaagaacggcaccuacgacuaccccaaguacuccgaggaggccaagcucaaccgcgagaagaucgacggcgucaagcucgaguccacccgcaucuaccagauccucgccaucuacuccaccgucgccuccucccucguccucgucgucucccucggcgccaucuccuucuggaugugcuccaacggcucccuccagugccgcaucugcaucuga

SEQ ID NO: 108680 - RNA, 1701 nt, Artificial Sequence; identical to SEQ ID NO: 108623
  derived and/or modified CDS sequence (opt2) from hemagglutinin__InfluenzaA__AIL94550

SEQ ID NO: 108681 - RNA, 1701 nt, Artificial Sequence
  derived and/or modified CDS sequence (opt2) from hemagglutinin__InfluenzaA__AIL94561
augaagaccaucaucgcccucuccuacauccucugccucgucuucgcccagaagcuccccggcaacgacaacuccaccgccacccucugccucggccaccacgccguccccaacggcaccaucgucaagaccaucaccaacgaccgcaucgaggucaccaacgccaccgagcucguccagaacuccuccaucggcgagaucugcgacuccccccaccagauccucgacggcgagaacugcacccucaucgacgcccuccucggcgacccccagugcgacggcuuccagaacaagaagugggaccucuucgucgagcgcuccaaggccuacuccaacugcuaccccuacgacguccccgacuacgccucccuccgcucccucgucgccuccuccggcacccucgaguucaacaacgaguccuucaacugggccggcgucacccagaacggcaccuccuccgccugcauccgcggcuccaacuccuccuucuucucccgccucaacuggcucacccaccucaacuucaaguaccccgcccucaacgucaccaugcccaacaacgagcaguucgacaagcucuacaucuggggcguccaccaccccggcaccgacaaggaccagaucuuccucuacgcccaguccuccggccgcaucaccgucuccaccaagcgcucccagcaggccgucauccccaacaucggcucccgcccccgcauccgcaacauccccucccgcaucuccaucuacuggaccaucgucaagcccggcgacauccuccucaucaacuccaccggcaaccucaucgccccccgcggcuacuucaagauccgcuccggcaaguccuccaucaugcgcuccgacgcccccaucggcaagugcaaguccgagugcaucacccccaacggcuccauccccaacgacaagcccuuccagaacgucaaccgcaucaccuacggcgccugcccccgcuacgucaagcaguccacccucaagcucgccaccggcaugcgcaacguccccgagaagcagacccgcggcaucuucggcgccaucgccggcuucaucgagaacggcugggagggcauggucgacggcugguacggcuuccgccaccagaacuccgagggccgcggccaggccgccgaccucaaguccacccaggccgccaucgaccagaucaacggcaagcucaaccgccucaucggcaagaccaacgagaaguuccaccagaucgagaaggaguucuccgaggucgagggccgcauccaggaccucgagaaguacgucgaggacaccaagaucgaccucugguccuacaacgccgagcuccucgucgcccucgagaaccagcacaccaucgaccucaccgacuccgagaugaacaagcucuucgagaagaccaagaagcagcuccgcgagaacgccgaggacaugggcaacggcugcuucaagaucuaccacaagugcgacaacgccugcaucggcuccauccgcaacggcaccuacgaccacgacgucuaccgcgacgaggcccucaacaaccgcuuccagaucaagggcgucgagcucaaguccggcuacaaggacuggauccucuggaucuccuucgccaucuccugcuuccuccucugcgucgcccuccucggcuucaucaugugggccugccagcgcggcaacauccgcugcaacaucugcaucuga

SEQ ID NO: 108682 - RNA, 1701 nt, Artificial Sequence
  derived and/or modified CDS sequence (opt2) from hemagglutinin__InfluenzaA__AIL94573
augaaggccauccucgucguccuccucuacaccuucgccaccgccaacgccgacacccucugcaucggcuaccacgccaacaacuccaccgacaccgucgacaccguccucgagaagaacgucaucgucacccacuccgucaaccuccucgaggacaagcacaacggcaagcucugcaagcuccgcggcgucgccccccuccaccucggcaagugcaacaucgccggcuggauccucggcaaccccgagugcgagucccucuccaccgccuccuccugguccuacaucgucgagaccuccuccuccgacaacggcaccugcuaccccggcgacuucaucaacuacgaggagcuccgcgagcagcucuccuccgucuccuccuucgagcgcuucgagaucuuccccaagaccuccuccuggcccaaccacgacuccaacaagggcgucaccgccgccugcccccacgccggcgccaaguccuucuacaagaaccucaucuggcucgucaagaagggcaacuccuaccccaagcucucccaguccuacaucaacgacaagggcaaggagguccucguccucuggggcauccaccaccccuccaccaccgccgaccagcagucccucuaccagaacgccgacgccuacgucuucgucggcaccucccgcuacuccaagaaguucaagcccgagaucgccauccgccccaagguccgcgaccaggagggccgcaugaacuacuacuggacccucgucgagcccggcgacaagaucaccuucgaggccaccggcaaccucgucgucccccgcuacgccuucaccauggagcgcaacgccggcuccggcaucaucaucuccgacacccccguccacgacugcaacaccaccugccagacccccgagggcgccaucaacaccucccuccccuuccagaacauccaccccaucaccaucggcaagugccccaaguacgucaaguccaccaagcuccgccucgccaccggccuccgcaacguccccuccauccagucccgcggccucuucggcgccaucgccggcuucaucgagggcggcuggaccggcauggucgacggcugguacggcuaccaccaccagaacgagcagggcuccggcuacgccgccgaccucaaguccacccagaacgccaucgacaagaucaccaacaaggucaacuccgucaucgagaagaugaacacccaguucaccgccgucggcaaggaguucaaccaccucgagaagcgcaucgagaaccucaacaagaaggucgacgacggcuuccucgacaucuggaccuacaacgccgagcuccucguccuccucgagaacgagcgcacccucgacuaccacgacuccaacgucaagaaccucuacgagaagguccgcaaccagcucaagaacaacgccaaggagaucggcaacggcugcuucgaguucuaccacaagugcgacaacaccugcauggaguccgucaagaacggcaccuacgacuaccccaaguacuccgaggaggccaagcucaaccgcgagaagaucgacggcgucaagcucgaguccacccgcgucuaccagauccucgccaucuacuccaccgucgccuccucccucguccucgucgucucccucggcgccaucuccuucuggaugugcuccaacggcucccuccagugccgcaucugcaucuga

SEQ ID NO: 108683 - RNA, 1701 nt, Artificial Sequence
  derived and/or modified CDS sequence (opt2) from hemagglutinin__InfluenzaA__AIL94584
augaaggccauccucgucguccuccucuacaccuucgccaccgccaacgccgacacccucugcaucggcuaccacgccaacaacuccaccgacaccgucgacaccguccucgagaagaacaucaccgucacccacuccgucaaccuccucgaggacaagcacaacggcaagcucugcaagcuccgcggcgucgccccccuccaccucggcaagugcaacaucgccggcuggauccucggcaaccccgagugcgagucccucuccaccgccuccuccugguccuacaucgucgagaccuccuccuccgacaacggcaccugcuaccccggcgacuucaucaacuacgaggagcuccgcgagcagcucuccuccgucuccuccuucgagcgcuucgagaucuuccccaagaccuccuccuggcccaaccacgacuccaacaagggcgucaccgccgccugcccccacgccggcgccaaguccuucuacaagaaccucaucuggcucgucaagaagggcaacuccuaccccaagcucucccaguccuacaucaacgacaagggcaaggagguccucguccucuggggcauccaccaccccuccaccaccgccgaccagcagucccucuaccagaacgccgacgccuacgucuucgucggcaccucccgcuacuccaagaaguucaagcccgagaucgccauccgccccaagguccgcgaccaggagggccgcaugaacuacuacuggacccucgucgagcccggcgacaagaucaccuucgaggccaccggcaaccucgucgucccccgcuacgccuucaccauggagcgcaacgccggcuccggcaucaucaucuccgacacccccguccacgacugcaacaccaccugccagacccccgagggcgccaucaacaccucccuccccuuccagaacauccaccccaucaccaucggccgcugccccaaguacgucaaguccaccaagcuccgccucgccaccggccuccgcaacguccccuccauccagucccgcggccucuucggcgccaucgccggcuucaucgagggcggcuggaccggcauggucgacggcugguacggcuaccaccaccagaacgagcagggcuccggcuacgccgccgaccucaaguccacccagaacgccaucgacaagaucaccaacaaggucaacuccgucaucgagaagaugaacacccaguucaccgccgucggcaaggaguucaaccaccucgagaagcgcaucgagaaccucaacaagaaggucgacgacggcuuccucgacaucuggaccuacaacgccgagcuccucguccuccucgagaacgagcgcacccucgacuaccacgacuccaacgucaagaaccucuacgagaagguccgcaaccagcucaagaacaacgccaaggagaucggcaacggcugcuucgaguucuaccacaagugcgacaacaccugcauggaguccgucaagaacggcaccuacgacuaccccaaguacuccgaggaggccaagcucaaccgcgagaagaucgacggcgucaagcucgaguccacccgcaucuaccagauccucgccaucuacuccaccgucgccuccucccucguccucgucgucucccucggcgccaucuccuucuggaugugcuccaacggcucccuccagugccgcaucugcaucuga

SEQ ID NO: 108684 - RNA, 1701 nt, Artificial Sequence; identical to SEQ ID NO: 108091
  derived and/or modified CDS sequence (opt2) from hemagglutinin__InfluenzaA__AIL94595

SEQ ID NO: 108685 - RNA, 1701 nt, Artificial Sequence; identical to SEQ ID NO: 106030
  derived and/or modified CDS sequence (opt2) from hemagglutinin__InfluenzaA__AIL94606

SEQ ID NO: 108686 - RNA, 1701 nt, Artificial Sequence; identical to SEQ ID NO: 106076
  derived and/or modified CDS sequence (opt2) from hemagglutinin__InfluenzaA__AIL94618

SEQ ID NO: 108687 - RNA, 1701 nt, Artificial Sequence; identical to SEQ ID NO: 108623
  derived and/or modified CDS sequence (opt2) from hemagglutinin__InfluenzaA__AIL94629

SEQ ID NO: 108688 - RNA, 1701 nt, Artificial Sequence; identical to SEQ ID NO: 106030
  derived and/or modified CDS sequence (opt2) from hemagglutinin__InfluenzaA__AIL94640

SEQ ID NO: 108689 - RNA, 1701 nt, Artificial Sequence
  derived and/or modified CDS sequence (opt2) from hemagglutinin__InfluenzaA__AIL94652
augaaggccauccucgucguccuccucuacaccuucgccaccgccaacgccgacacccucugcaucggcuaccacgccaacaacuccaccgacaccgucgacaccguccucgagaagaacgucaccgucacccacuccaucaaccuccucgaggacaagcacaacggcaagcucugcaagcuccgcggcgucgccccccuccaccucggcaagugcaacaucgccggcuggauccucggcaaccccgagugcgagucccucuccaccgccuccuccugguccuacaucgucgagaccuccuccuccgacaacggcaccugcuaccccggcgacuucaucaacuacgaggagcuccgcgagcagcucuccuccgucuccuccuucgagcgcuucgagauguuccccaagaccuccuccuggcccaaccacgacuccaacaagggcgucaccgccgccugcccccacgccggcgccaaguccuucuacaagaaccucaucuggcucgucaagaagggcaacuccuaccccaagcucuccaaguccuacaucaacgacaagggcaaggagguccucguccucuggggcauccaccaccccuccaccaccgccgaccagcagucccucuaccagaacgccgacgccuacgucuucgucggcaccuccaaguacuccaagaaguucaagcccgagaucgccauccgccccaagguccgcgaccaggagggccgcaugaacuacuacuggacccucaucgagcccggcgacaagaucaccuucgaggccaccggcaaccucgucgucccccgcuacgccuucgccauggagcgcaacgccggcuccggcaucaucaucuccgacacccccguccacgacugcaacaccaccugccagacccccgagggcgccaucaacaccucccuccccuuccagaacauccaccccaucaccaucggcaagugccccaaguacgucaaguccaccaagcuccgccucgccaccggccuccgcaacguccccuccauccagucccgcggccucuucggcgccaucgccggcuucaucgagggcggcuggaccggcauggucgacggcugguacggcuaccaccaccagaacgagcagggcuccggcuacgccgccgaccucaaguccacccagaacgccaucgacaagaucaccaacaaggucaacuccgucaucgagaagaugaacacccaguucaccgccgucggcaaggaguucaaccaccucgagaagcgcaucgagaaccucaacaagaaggucgacgacggcuuccucgacaucuggaccuacaacgccgagcuccucguccuccucgagaacgagcgcacccucgacuaccacgacuccaacgucaagaaccucuacgagaagguccgcaaccagcucaagaacaacgccaaggagaucggcaacggcugcuucgaguucuaccacaagugcgacaacaccugcauggaguccgucaagaacggcaccuacgacuaccccaaguacuccgaggaggccaagcucgaccgcgagaagaucgacggcgucaagcucgaguccacccgcaucuaccagauccucgccaucuacuccaccgucgccuccucccucguccucgucgucucccucggcgccaucuccuucuggaugugcuccaacggcucccuccagugccgcaucugcaucuga

SEQ ID NO: 108690 - RNA, 1701 nt, Artificial Sequence; identical to SEQ ID NO: 106076
  derived and/or modified CDS sequence (opt2) from hemagglutinin__InfluenzaA__AIL94663

SEQ ID NO: 108691 - RNA, 1701 nt, Artificial Sequence; identical to SEQ ID NO: 106076
  derived and/or modified CDS sequence (opt2) from hemagglutinin__InfluenzaA__AIL94674

SEQ ID NO: 108692 - RNA, 1701 nt, Artificial Sequence; identical to SEQ ID NO: 106030
  derived and/or modified CDS sequence (opt2) from hemagglutinin__InfluenzaA__AIL94697

SEQ ID NO: 108693 - RNA, 1701 nt, Artificial Sequence; identical to SEQ ID NO: 106076
  derived and/or modified CDS sequence (opt2) from hemagglutinin__InfluenzaA__AIL94709

SEQ ID NO: 108694 - RNA, 1701 nt, Artificial Sequence; identical to SEQ ID NO: 106076
  derived and/or modified CDS sequence (opt2) from hemagglutinin__InfluenzaA__AIL94720

SEQ ID NO: 108695 - RNA, 1701 nt, Artificial Sequence; identical to SEQ ID NO: 106030
  derived and/or modified CDS sequence (opt2) from hemagglutinin__InfluenzaA__AIL94731

SEQ ID NO: 108696 - RNA, 1701 nt, Artificial Sequence; identical to SEQ ID NO: 108623
  derived and/or modified CDS sequence (opt2) from hemagglutinin__InfluenzaA__AIL94743

SEQ ID NO: 108697 - RNA, 1701 nt, Artificial Sequence
  derived and/or modified CDS sequence (opt2) from hemagglutinin__InfluenzaA__AIL94754
augaaggccauccucgucguccuccucuacaccuucgccaccgccaacgccgacacccucugcaucggcuaccacgccaacaacuccaccgacaccgucgacaccguccucgagaagaacgucaccgucacccacuccgucaaccuccucgaggacaagcacaacggcaagcucugcaagcuccgcggcgucgccccccuccaccucggcaagugcaacaucgccggcuggauccucggcaaccccgagugcgagucccucuccaccgccuccuccugguccuacaucgucgagaccuccuccuccgacaacggcaccugcuaccccggcgacuucaucaacuacgaggagcuccgcgagcagcucuccuccgucuccuccuucgagcgcuucgagaucuuccccaagaccuccuccuggcccaaccacgacuccaacaagggcgucaccgccgccugcccccacgccggcgccaaguccuucuacaagaaccucaucuggcucgucaagaagggcaacuccuaccccaagcucucccaguccuacaucaacgacaagggcaaggagguccucguccucuggggcauccaccaccccuccaccaccgccgaccagcagucccucuaccagaacgccgacgccuacgucuucgucggcaccucccgcuacuccaagaaguucaagcccgagaucgccauccgccccaagguccgcgaccaggagggccgcaugaacuacuacuggacccucgucgagcccggcgacaagaucaccuucgaggccaccggcaaccucgucgucccccgcuacgccuucaccauggagcgcaacgccggcuccggcaucaucaucuccgacacccccguccacgacugcaacaccaccugccagacccccgagggcgccaucaacaccucccuccccuuccagaacauccaccccaucaccaucggcaagugccccaaguacgucaaguccaccaagcuccgccucgccaccggccuccgcaacguccccuccauccagucccgcggccucuucggcgccaucgccggcuucaucgagggcggcuggaccggcauggucgacggcugguacggcuaccaccaccagaacgagcagggcuccggcuacgccgccgaccucaaguccacccagaacgccaucgacaagaucaccaacaaggucaacuccgucaucgagaagaugaacacccaguucaccgccgucggcaaggaguucaaccaccucgagaagcgcaucgagaaccucaacaagaaggucgacgacggcuuccucgacaucuggaccuacaacgccgagcuccucauccuccucgagaacgagcgcacccucgacuaccacgacuccaacgucaagaaccucuacgagaagguccgcaaccagcucaagaacaacgccaaggagaucggcaacggcugcuucgaguucuaccacaagugcgacaacaccugcauggaguccgccaagaacggcaccuacgacuaccccaaguacuccgaggaggccaagcucaaccgcgagaagaucgacggcgucaagcucgaguccacccgcaucuaccagauccucgccaucuacuccaccgucgccuccucccucguccucgucgucucccucggcgccaucuccuucuggaugugcuccaacggcucccuccagugccgcaucugcaucuga

SEQ ID NO: 108698 - RNA, 1701 nt, Artificial Sequence; identical to SEQ ID NO: 108651
  derived and/or modified CDS sequence (opt2) from hemagglutinin__InfluenzaA__AIL94765

SEQ ID NO: 108699 - RNA, 1701 nt, Artificial Sequence; identical to SEQ ID NO: 106030
  derived and/or modified CDS sequence (opt2) from hemagglutinin__InfluenzaA__AIL94777

SEQ ID NO: 108700 - RNA, 1701 nt, Artificial Sequence; identical to SEQ ID NO: 107938
  derived and/or modified CDS sequence (opt2) from hemagglutinin__InfluenzaA__AIL94789

SEQ ID NO: 108701 - RNA, 1701 nt, Artificial Sequence; identical to SEQ ID NO: 106076
  derived and/or modified CDS sequence (opt2) from hemagglutinin__InfluenzaA__AIL94800

SEQ ID NO: 108702 - RNA, 1701 nt, Artificial Sequence
  derived and/or modified CDS sequence (opt2) from hemagglutinin__InfluenzaA__AIL94811
augaagaccaucaucgcccucuccuacauccucugccucgucuucgcccagaagcuccccggcaacgacaacuccaccgccacccucugccucggccaccacgccguccccaacggcaccaucgucaagaccaucaccaacgaccgcaucgaggucaccaacgccaccgagcucguccagaacuccuccaucggcgagaucugcgacuccccccaccagauccucgacggcgagaacugcacccucaucgacgcccuccucggcgacccccagugcgacggcuuccagaacaagaagugggaccucuucgucgagcgcuccaaggccuacuccaacugcuaccccuacgacguccccgacuacgccucccuccgcucccucgucgccuccuccggcacccucgaguucaacaacgaguccuucaacuggaccggcgucacccagaacggcaccuccuccgccugcauccgccgcuccaacuccuccuucuucucccgccucaacuggcucacccaccucaacuucaaguaccccgcccucaacgucaccaugcccaacaacgagcaguucgacaagcucuacaucuggggcguccaccaccccggcaccgacaaggaccagaucuuccucuacgcccaguccuccggccgcaucaccgucuccaccaagcgcucccagcaggccgucauccccaacaucggcucccgcccccgcauccgcaacauccccucccgcaucuccaucuacuggaccaucgucaagcccggcgacauccuccucaucaacuccaccggcaaccucaucgccccccgcggcuacuucaagauccgcuccggcaaguccuccaucaugcgcuccgacgcccccaucggcaagugcaaguccgagugcaucacccccaacggcuccauccccaacgacaagcccuuccagaacgucaaccgcaucaccuacggcgccugcccccgcuacgucaagcagaacacccucaagcucgccaccggcaugcgcaacguccccgagaagcagacccgcggcaucuucggcgccaucgccggcuucaucgagaacggcugggagggcauggucgacggcugguacggcuuccgccaccagaacuccgagggccgcggccaggccgccgaccucaaguccacccaggccgccaucgaccagaucaacggcaagcucaaccgccucaucggcaagaccaacgagaaguuccaccagaucgagaaggaguucuccgaggucgagggccgcauccaggaccucgagaaguacgucgaggacaccaagaucgaccucugguccuacaacgccgagcuccucgucgcccucgagaaccagcacaccaucgaccucaccgacuccgagaugaacaagcucuucgagaagaccaagaagcagcuccgcgagaacgccgaggacaugggcaacggcugcuucaagaucuaccacaagugcgacaacgccugcaucggcuccauccgcaacggcaccuacgaccacaacgucuaccgcgacgaggcccucaacaaccgcuuccagaucaagggcgucgagcucaaguccggcuacaaggacuggauccucuggaucuccuucgccaucuccugcuuccuccucugcgucgcccuccucggcuucaucaugugggccugccagaagggcaacauccgcugcaacaucugcaucuga

SEQ ID NO: 108703 - RNA, 1701 nt, Artificial Sequence; identical to SEQ ID NO: 105894
  derived and/or modified CDS sequence (opt2) from hemagglutinin__InfluenzaA__AIL94823

SEQ ID NO: 108704 - RNA, 1701 nt, Artificial Sequence
  derived and/or modified CDS sequence (opt2) from hemagglutinin__InfluenzaA__AIL94835
augaagaccaucaucgcccucuccuacauccucugccucgucuucgcccagaagcuccccggcaacgacaacuccaccgccacccucugccucggccaccacgccguccccaacggcaccaucgucaagaccaucaccaacgaccgcaucgaggucaccaacgccaccgagcucguccagaacuacuccaucggcgagaucugcgacuccccccaccagauccucgacggcgagaacugcacccucaucgacgcccuccucggcgacccccagugcgacggcuuccagaacaagaagugggaccucuucgucgagcgcuccaaggccuacuccaacugcuaccccuacgacguccccgacuacgccucccuccgcucccucgucgccuccuccggcacccucgaguucaacaacgaguccuucaacugggccggcgucacccagaacggcaccuccuccgccugcauccgcggcuccaacuccuccuucuucucccgccucaacuggcucacccaccucaacuucaaguaccccgcccucaacgucaccaugcccaacaacgagcaguucgacaagcucuacaucuggggcguccaccaccccggcaccgacaaggaccagaucuuccucuacgcccaguccuccggccgcaucaccgucuccaccaagcgcucccagcaggccgucauccccaacaucggcucccgcccccgcauccgcaacauccccucccgcaucuccaucuacuggaccaucgucaagcccggcgacauccuccucaucaacuccaccggcaaccucaucgccccccgcggcuacuucaagauccgcuccggcaaguccuccaucaugcgcuccgacgcccccaucggcaagugcaaguccgagugcaucacccccaacggcuccauccccaacgacaagcccuuccagaacgucaaccgcaucaccuacggcgccugcccccgcuacgucaagcaguccacccucaagcucgccaccggcaugcgcaacguccccgagaagcagacccgcggcaucuucggcgccaucgccggcuucaucgagaacggcugggagggcauggucgacggcugguacggcuuccgccaccagaacuccgagggccgcggccaggccgccgaccucaaguccacccaggccgccaucgaccagaucaacggcaagcucaaccgccucaucggcaagaccaacgagaaguuccaccagaucgagaaggaguucuccgaggucgagggccgcauccaggaccucgagaaguacgucgaggacaccaagaucgaccucugguccuacaacgccgagcuccucgucgcccucgagaaccagcacaccaucgaccucaccgacuccgagaugaacaagcucuucgagaagaccaagaagcagcuccgcgagaacgccgaggacaugggcaacggcugcuucaagaucuaccacaagugcgacaacgccugcaucggcuccauccgcaacggcaccuacgaccacgacgucuaccgcgacgaggcccucaacaaccgcuuccagaucaagggcgucgagcucaaguccggcuacaaggacuggauccucuggaucuccuucgccaucuccugcuuccuccucugcgucgcccuccucggcuucaucaugugggccugccagaagggcaacauccgcugcaacaucugcaucuga

SEQ ID NO: 108705 - RNA, 1701 nt, Artificial Sequence
  derived and/or modified CDS sequence (opt2) from hemagglutinin__InfluenzaA__AIL94847
augaagaccaucaucgcccucuccuacauccucugccucgucuucgcccagaagcuccccggcaacgacaacuccaccgccacccucugccucggccaccacgccguccccaacggcaccaucgucaagaccaucaccaacgaccagaucgaggucaccaacgccaccgagcucguccaguccuccuccaccggcgagaucugcgacuccccccaccagauccucgacggcgagaacugcacccucaucgacgcccuccucggcgacccccagugcgacggcuuccagaacaagaagugggaccucuucgucgagcgcuccaaggccuacuccaacugcuaccccuacgacguccccgacuacgccucccuccgcucccucgucgccuccuccggcacccucgaguucaacaacgaguccuucaacuggaccggcgucacccagaacggcaccuccuccgccugcauccgccgcuccaacaacuccuucuucucccgccucaacuggcucacccaccucaaguucaaguaccccgcccucaacgucaccaugcccaacgacgagaaguucgacaagcucuacaucuggggcguccaccaccccggcaccgacaacgaccagaucuuccucuacgcccaggccuccggccgcaucaccgucuccaccaagcgcucccagcagaccgucauccccaacaucggcucccgcccccgcguccgcaacauccccucccgcaucuccaucuacuggaccaucgucaagcccggcgacauccuccucaucaacuccaccggcaaccucaucgccccccgcggcuacuucaagauccgcuccggcaaguccuccaucaugcgcuccgacgcccccaucggcaagugcaacuccgagugcaucacccccaacggcuccauccccaacgacaagcccuuccagaacgucaaccgcaucaccuacggcgccugcccccgcuacgucaagcagaacacccucaagcucgccaccggcaugcgcaacguccccgagaagcagacccgcggcaucuucggcgccaucgccggcuucaucgagaacggcugggagggcauggucgacggcugguacggcuuccgccaccagaacuccgagggcaucggccaggccgccgaccucaaguccacccaggccgccaucgaccagaucaacggcaagcucaaccgccucaucggcaagaccaacgagaaguuccaccagaucgagaaggaguucuccgaggucgagggccgcauccaggaccucgagaaguacgucgaggacaccaagaucgaccucugguccuacaacgccgagcuccucgucgcccucgagaaccagcacaccaucgaccucaccgacuccgagaugaacaagcucuucgagaagaccaagaagcagcuccgcgagaacgccgaggacaugggcaacggcugcuucaagaucuaccacaagugcgacaacgccugcaucggcuccauccgcaacggcaccuacgaccacgacgucuaccgcgacgaggcccucaacaaccgcuuccagaucaagggcgucgagcucaaguccggcuacaaggacuggauccucuggaucuccuucgccaucuccugcuuccuccucugcgucgcccuccucggcuucaucaugugggccugccagaagggcaacauccgcugcaacaucugcaucuga

SEQ ID NO: 108706 - RNA, 1701 nt, Artificial Sequence; identical to SEQ ID NO: 101569
  derived and/or modified CDS sequence (opt2) from hemagglutinin__InfluenzaA__AIL94859

SEQ ID NO: 108707 - RNA, 1701 nt, Artificial Sequence
  derived and/or modified CDS sequence (opt2) from hemagglutinin__InfluenzaA__AIL94871
augaagaccaucaucgcccucuccuacauccucugccucgucuucgcccagaagcuccccggcaacgacaacuccaccgccacccucugccucggccaccacgccguccccaacggcaccaucgucaagaccaucaccaacgaccagaucgaggucaccaacgccaccgagcucguccaguccuccuccaccggcgagaucugcgacuccccccaccagauccucgacggcgagaacugcacccucaucgacgcccuccucggcgacccccagugcgacggcuuccagaacaagaagugggaccucuucgucgagcgcuccaaggccuacuccaacugcuaccccuacgacguccccgacuacgccucccuccgcucccucgucgccuccuccggcacccucgaguucaacaacgaguccuucaacuggaccggcgucacccagaacggcaccuccuccgccugcauccgccgcuccaacaacuccuucuucucccgccucaacuggcucacccaccucaacuucaaguaccccgcccucaacgucaccaugcccaacaacgagcaguucgacaagcucuacaucuggggcguccaccaccccggcaccgacaaggaccagaucuuccucuacgcccaggccuccggccgcaucaccgucuccaccaagcgcucccagcaggccgucauccccaacaucggcucccgcccccgcguccgcaacauccccucccgcaucuccaucuacuggaccaucgucaagcccggcgacauccuccucaucaacuccaccggcaaccucaucgccccccgcggcuacuucaagauccgcuccggcaaguccuccaucaugcgcuccgacgcccccaucggcaagugcaacuccgagugcaucacccccaacggcuccauccccaacgacaagcccuuccagaacgucaaccgcaucaccuacggcgccugcccccgcuacgucaagcaguccacccucaagcucgccaccggcaugcgcaacguccccgagaagcagacccgcggcaucuucggcgccaucgccggcuucaucgagaacggcugggagggcauggucgacggcugguacggcuuccgccaccagaacuccgagggccgcggccaggccgccgaccucaaguccacccaggccgccaucgaccagaucaacggcaagcucaaccgccucaucggcaagaccaacgagaaguuccaccagaucgagaaggaguucuccgaggucgagggccgcauccaggaccucgagaaguacgucgaggacaccaagaucgaccucugguccuacaacgccgagcuccucgucgcccucgagaaccagcacaccaucgaccucaccgacuccgagaugaacaagcucuucgagaagaccaagaagcagcuccgcgagaacgccgaggacaugggcaacggcugcuucaccaucuaccacaagugcgacaacgccugcaucggcuccauccgcaacggcaccuacgaccacaacgucuaccgcgacgaggcccucaacaaccgcuuccagaucaagggcaucgagcucaaguccggcuacaaggacuggauccucuggaucuccuucgccaucuccugcuuccuccucugcgucgcccuccucggcuucaucaugugggccugccagaagggcaacauccgcugcaacaucugcaucuga

SEQ ID NO: 108708 - RNA, 1701 nt, Artificial Sequence; identical to SEQ ID NO: 108116
  derived and/or modified CDS sequence (opt2) from hemagglutinin__InfluenzaA__AIL94883

SEQ ID NO: 108709 - RNA, 1701 nt, Artificial Sequence; identical to SEQ ID NO: 108101
  derived and/or modified CDS sequence (opt2) from hemagglutinin__InfluenzaA__AIL94894

SEQ ID NO: 108710 - RNA, 1701 nt, Artificial Sequence; identical to SEQ ID NO: 105894
  derived and/or modified CDS sequence (opt2) from hemagglutinin__InfluenzaA__AIL94906

SEQ ID NO: 108711 - RNA, 1701 nt, Artificial Sequence; identical to SEQ ID NO: 106030
  derived and/or modified CDS sequence (opt2) from hemagglutinin__InfluenzaA__AIL94918

SEQ ID NO: 108712 - RNA, 1701 nt, Artificial Sequence; identical to SEQ ID NO: 106030
  derived and/or modified CDS sequence (opt2) from hemagglutinin__InfluenzaA__AIL94930

SEQ ID NO: 108713 - RNA, 1701 nt, Artificial Sequence; identical to SEQ ID NO: 106030
  derived and/or modified CDS sequence (opt2) from hemagglutinin__InfluenzaA__AIL94942

SEQ ID NO: 108714 - RNA, 1701 nt, Artificial Sequence; identical to SEQ ID NO: 106076
  derived and/or modified CDS sequence (opt2) from hemagglutinin__InfluenzaA__AIL94954

SEQ ID NO: 108715 - RNA, 1701 nt, Artificial Sequence; identical to SEQ ID NO: 105894
  derived and/or modified CDS sequence (opt2) from hemagglutinin__InfluenzaA__AIL94965

SEQ ID NO: 108716 - RNA, 1701 nt, Artificial Sequence
  derived and/or modified CDS sequence (opt2) from hemagglutinin__InfluenzaA__AIM55837
augaaggccauccucgucguccuccucuacaccuucgccaccgccaccgccgacacccucugcaucggcuaccacgccaacaacuccaccgacaccgucgacaccguccucgagaagaacgucaccgucacccacuccgucaaccuccucgaggacaagcacaacggcaagcucugcaagcuccgcggcgucgccccccuccaccucggcaagugcaacaucgccggcuggauccucggcaaccccgagugcgagucccucuccaccgccuccuccugguccuacaucgucgagaccuccuccuccgacaacggcaccugcuaccccggcgacuucaucaacuacgaggagcuccgcgagcagcucuccuccgucuccuccuucgagcgcuucgagaucuuccccaagaccuccuccuggcccaaccacgacuccaacaagggcgucaccgccgccugcccccacgccggcgccaaguccuucuacaagaaccucaucuggcucgucaagaagggcaacuccuaccccaagcucucccaguccuacaucaacgacaagggcaaggagguccucguccucuggggcauccaccaccccuccaccaccgccgaccagcagucccucuaccagaacgccgacgccuacgucuucgucggcaccucccgcuacuccaagaaguucaagcccgagaucgccauccgccccaagguccgcgaccaggagggccgcaugaacuacuacuggacccucgucgagcccggcgacaagaucaccuucgaggccaccggcaaccucgucgucccccgcuacgccuucaccauggagcgcaacgccggcuccggcaucaucaucuccgacacccccguccacgacugcaacaccaccugccagacccccgagggcgccaucaacaccucccuccccuuccagaacauccaccccaucaccaucggcaagugccccaaguacgucaaguccaccaagcucucccucgccaccggccuccgcaacguccccuccauccagucccgcggccucuucggcgccaucgccggcuucaucgagggcggcuggaccggcauggucgacggcugguacggcuaccaccaccagaacgagcagggcuccggcuacgccgccgaccucaaguccacccagaacgccaucgacaagaucaccaacaaggucaacuccgucaucgagaagaugaacacccaguucaccgccgucggcaaggaguucaaccaccucgagaagcgcaucgagaaccucaacaagaaggucgacgacggcuuccucgacaucuggaccuacaacgccgagcuccucguccuccucgagaacgagcgcacccucgacuaccacgacuccaacgucaagaaccucuacgagaagguccgcaaccagcucaagaacaacgccaaggagaucggcaacggcugcuucgaguucuaccacaagugcgacaacaccugcauggaguccgucaagaacggcaccuacgacuaccccaaguacuccgaggaggccaagcucaaccgcgagaagaucgacggcgucaagcucgaguccacccgcaucuaccagauccucgccaucuacuccaccgucgccuccucccucguccucgucgucucccucggcgccaucuccuucuggaugugcuccaacggcucccuccagugccgcaucugcaucuga

SEQ ID NO: 108717 - RNA, 1701 nt, Artificial Sequence
  derived and/or modified CDS sequence (opt2) from hemagglutinin__InfluenzaA__AIM55848
augaaggccauccucgucguccuccucuacaccuucgccaccgccaacgccgacacccucugcaucggcuaccacgccaacaacuccaccgacaccgucgacaccguccucgagaagaacgucaccgucacccacuccgucaaccuccucgaggacaagcacaacggcaagcucugcaagcuccgcggcgucgccccccuccaccucggcaagugcaacaucgccggcuggauccucggcaaccccgagugcgagucccucuccaccgccuccuccugguccuacaucgucgagaccuccuccuccgacaacggcaccugcuaccccggcgacuucaucaacuacgaggagcuccgcgagcagcucuccuccgucuccuccuucgagcgcuucgagaucuuccccaagaccuccuccuggcccaaccacgacuccaacaagggcgucaccgccgccugcccccacgccggcgccaaguccuucuacaagaaccucaucuggcucgucaagaagggcaacuccuaccccaagcucucccaguccuacaucaacgacaagggcaaggagguccucguccucuggggcauccaccaccccuccaccaccgccgaccagcagucccucuaccagaacgccgacgccuacgucuucgucggcaccucccgcuacuccaagaaguucaagcccgagaucgccauccgccccaagguccgcgaccaggagggccgcaugaacuacuacuggacccucgucgagcccggcgacaagaucaccuucgaggccaccggcaaccucgucgucccccgcuacgccuucaccauggagcgcaacgccggcuccggcaucaucaucuccgacacccccguccacgacugcaacaccaccugccagacccccgagggcgccaucaacaccucccuccccuuccagaacauccaccccaucaccaucggcaagugccccaaguacgucaaguccaccaagcuccgccucgccaccggccuccgcaacauccccuccauccagucccgcggccucuucggcgccaucgccggcuucaucgagggcggcuggaccggcauggucgacggcugguacggcuaccaccaccagaacgagcagggcuccggcuacgccgccgaccucaaguccacccagaacgccaucgacaagaucaccaacaaggucaacuccgucaucgagaagaugaacacccaguucaccgccgucggcaaggaguucaaccaccucgagaagcgcaucgagaaccucaacaagaaggucgacgacggcuuccucgacaucuggaccuacaacaccgagcuccucguccuccucgagaacgagcgcacccucgacuaccacgacuccaacgucaagaaccucuacgagaagguccgcaaccagcucaagaacaacgccaaggagaucggcaacggcugcuucgaguucuaccacaagugcgacaacaccugcauggaguccgucaagaacggcaccuacgacuaccccaaguacuccgaggaggccaagcucaaccgcgagaagaucgacggcgucaagcucgaguccacccgcaucuaccagauccucgccaucuacuccaccgucgccuccucccucguccucgucgucucccucggcgccaucuccuucuggaugugcuccaacggcucccuccagugccgcaucugcaucuga

SEQ ID NO: 108718 - RNA, 1701 nt, Artificial Sequence; identical to SEQ ID NO: 106076
  derived and/or modified CDS sequence (opt2) from hemagglutinin__InfluenzaA__AIM55859

SEQ ID NO: 108719 - RNA, 1701 nt, Artificial Sequence; identical to SEQ ID NO: 106076
  derived and/or modified CDS sequence (opt2) from hemagglutinin__InfluenzaA__AIM55870

SEQ ID NO: 108720 - RNA, 1701 nt, Artificial Sequence; identical to SEQ ID NO: 106076
  derived and/or modified CDS sequence (opt2) from hemagglutinin__InfluenzaA__AIM55881

SEQ ID NO: 108721 - RNA, 1701 nt, Artificial Sequence; identical to SEQ ID NO: 107938
  derived and/or modified CDS sequence (opt2) from hemagglutinin__InfluenzaA__AIM55893

SEQ ID NO: 108722 - RNA, 1701 nt, Artificial Sequence; identical to SEQ ID NO: 107057
  derived and/or modified CDS sequence (opt2) from hemagglutinin__InfluenzaA__AIM55904

SEQ ID NO: 108723 - RNA, 1701 nt, Artificial Sequence; identical to SEQ ID NO: 106076
  derived and/or modified CDS sequence (opt2) from hemagglutinin__InfluenzaA__AIM55915

SEQ ID NO: 108724 - RNA, 1710 nt, Artificial Sequence
  derived and/or modified CDS sequence (opt2) from hemagglutinin__InfluenzaA__AIM55926
augaaggccauccucgucguccuccucuacaccuucgccaccaccaacgccgacacccucugcaucggcuaccacgccaacaacuccaccgacaccgucgacaccguccucgagaagaacgucaccgucacccacuccgucaaccuccucgaggacaagcacaacggcaagcucugcaagcuccgcggcgucgccccccuccaccucggcaagugcaacaucgccggcuggauccucggcaaccccgagugcgagucccucuccaccgccuccuccugguccuacaucgucgagaccuccuccuccgacaacggcaccugcuaccccggcgacuucaucaacuacgaggagcuccgcgagcagcucuccuccgucuccuccuucgagcgcuucgagaucuuccccaagaccuccuccuggcccaaccacgacuccaacaagggcgucaccgccgccugcccccacgccggcgccaaguccuucuacaagaaccucaucuggcucgucaagaagggcaacuccuaccccaagcucucccaguccuacaucaacgacaagggcaaggagguccucguccucuggggcauccaccaccccuccaccaccgccgaccagcagucccucuaccagaacgccgacgccuacgucuucgucggcaccucccgcuacuccaagaaguucaagcccgagaucgccauccgccccaagguccgcgaccaggagggccgcaugaacuacuacuggacccucgucgagcccggcgacaagaucaccuucgaggccaccggcaaccucgucgucccccgcuacgccuucaccauggagcgcaacgccggcuccggcaucaucaucuccgacacccccguccacgacugcaacaccaccugccagacccccgagggcgccaucaacaccucccucaccucccuccccuuccagaacauccaccccaucaccaucggcaagugccccaaguacgucaaguccaccaagcuccgccucgccaccggccuccgcaacguccccuccauccagucccgcggccucuucggcgccaucgccggcuucaucgagggcggcuggaccggcauggucgacggcugguacggcuaccaccaccagaacgagcagggcuccggcuacgccgccgaccucaaguccacccagaacgccaucgacaagaucaccaacaaggucaacuccgucaucgagaagaugaacacccaguucaccgccgucggcaaggaguucaaccaccucgagaagcgcaucgagaaccucaacaagaaggucgacgacggcuuccucgacaucuggaccuacaacgccgagcuccucguccuccucgagaacgagcgcacccucgacuaccacgacuccaacgucaagaaccucuacgagaagguccgcaaccagcucaagaacaacgccaaggagaucggcaacggcugcuucgaguucuaccacaagugcgacaacaccugcauggaguccgucaagaacggcaccuacgacuaccccaaguacuccgaggaggccaagcucaaccgcgagaagaucgacggcgucaagcucgaguccacccgcaucuaccagauccucgccaucuacuccaccgucgccuccucccucguccucgucgucucccucggcgccaucuccuucuggaugugcuccaacggcucccuccagugccgcaucugcaucuga

SEQ ID NO: 108725 - RNA, 1701 nt, Artificial Sequence; identical to SEQ ID NO: 106076
  derived and/or modified CDS sequence (opt2) from hemagglutinin__InfluenzaA__AIM55937

SEQ ID NO: 108726 - RNA, 1701 nt, Artificial Sequence; identical to SEQ ID NO: 107057
  derived and/or modified CDS sequence (opt2) from hemagglutinin__InfluenzaA__AIM55948

SEQ ID NO: 108727 - RNA, 1701 nt, Artificial Sequence; identical to SEQ ID NO: 107039
  derived and/or modified CDS sequence (opt2) from hemagglutinin__InfluenzaA__AIM55962

SEQ ID NO: 108728 - RNA, 1701 nt, Artificial Sequence; identical to SEQ ID NO: 107057
  derived and/or modified CDS sequence (opt2) from hemagglutinin__InfluenzaA__AIM55984

SEQ ID NO: 108729 - RNA, 1701 nt, Artificial Sequence; identical to SEQ ID NO: 107938
  derived and/or modified CDS sequence (opt2) from hemagglutinin__InfluenzaA__AIM55995

SEQ ID NO: 108730 - RNA, 1701 nt, Artificial Sequence
  derived and/or modified CDS sequence (opt2) from hemagglutinin__InfluenzaA__AIM56017
augaaggccauccucgucguccuccucuacaccuucgccaccaccaacgccgacacccucugcaucggcuaccacgccaacaacuccaccgacaccgucgacaccguccucgagaagaacgucaccgucacccacuccgucaaccuccucgaggacaagcacaacggcaagcucugcaagcuccgcggcgucgccccccuccaccucggcaagugcaacaucgccggcuggauccucggcaaccccgagugcgagucccucuccaccgccuccuccugguccuacaucgucgagaccuccuccuccgacaacggcaccugcuaccccggcgacuucaucaacuacgaggagcuccgcgagcagcucuccuccgucuccuccuucgagcgcuucgagaucuuccccaagaccuccuccuggcccaaccacgacuccaacaagggcgucaccgccgccugcccccacgccggcgccaaguccuucuacaagaaccucaucuggcucgucaagaagggccacuccuaccccaagcucucccaguccuacaucaacgacaagggcaaggagguccucguccucuggggcauccaccaccccuccaccaccgccgaccagcagucccucuaccagaacgccgacgccuacgucuucgucggcaccucccgcuacuccaagaaguucaagcccgagaucgccauccgccccaagguccgcgaccaggagggccgcaugaacuacuacuggacccucgucgagcccggcgacaagaucaccuucgaggccaccggcaaccucgucgucccccgcuacgccuucaccauggagcgcaacgccggcuccggcaucaucaucuccgacacccccguccacgacugcaacaccaccugccagacccccgagggcgccaucaacaccucccuccccuuccagaacauccaccccaucaccaucggcaagugccccaaguacgucaaguccaccaagcuccgccucgccaccggccuccgcaacguccccuccauccagucccgcggccucuucggcgccaucgccggcuucaucgagggcggcuggaccggcauggucgacggcugguacggcuaccaccaccagaacgagcagggcuccggcuacgccgccgaccucaaguccacccagaacgccaucgacaagaucaccaacaaggucaacuccgucaucgagaagaugaacacccaguucaccgccgucggcaaggaguucaaccaccucgagaagcgcaucgagaaccucaacaagaaggucgacgacggcuuccucgacaucuggaccuacaacgccgagcuccucguccuccucgagaacgagcgcacccucgacuaccacgacuccaacgucaagaaccucuacgagaagguccgcaaccagcucaagaacaacgccaaggagaucggcaacggcugcuucgaguucuaccacaagugcgacaacaccugcauggaguccgucaagaacggcaccuacgacuaccccaaguacuccgaggaggccaagcucaaccgcgagaagaucgacggcgucaagcucgaguccacccgcaucuaccagauccucgccaucuacuccaccgucgccuccucccucguccucgucgucucccucggcgccaucuccuucuggaugugcuccaacggcucccuccagugccgcaucugcaucuga

SEQ ID NO: 108731 - RNA, 1701 nt, Artificial Sequence; identical to SEQ ID NO: 108730
  derived and/or modified CDS sequence (opt2) from hemagglutinin__InfluenzaA__AIM56028

SEQ ID NO: 108732 - RNA, 1701 nt, Artificial Sequence
  derived and/or modified CDS sequence (opt2) from hemagglutinin__InfluenzaA__AIM56039
augaaggccauccucgucguccuccucuaccccuucgccaccgccaacgccgacacccucugcaucggcuaccacgccaacaacuccaccgacaccgucgacaccguccucgagaagaacgucaccgucacccacuccgucaaccuccucgaggacaagcacaacggcaagcucugcaagcuccgcggcgucgccccccuccaccucggcaagugcaacaucgccggcuggauccucggcaaccccgagugcgagucccucuccaccgccuccuccugguccuacaucgucgaggccuccuccuccgacaacggcaccugcuaccccggcgacuucaucaacuacgaggagcuccgcgagcagcucuccuccgucuccuccuucgagcgcuucgagaucuuccccaagaccuccuccuggcccaaccacgacuccaacaagggcgucaccgccgccugcccccacgccggcgccaaguccuucuacaagaaccucaucuggcucgucaagaagggcaacuccuaccccaagcucucccaguccuacaucaacgacaagggcaaggagguccucguccucuggggcauccaccaccccuccaccaccgccgaccagcagucccucuaccagaacgccgacgccuacgucuucgucggcaccucccgcuacuccaagaaguucaagcccgagaucgccauccgccccaagguccgcgaccaggagggccgcaugaacuacuacuggacccucgucgagcccggcgacaagaucaccuucgaggccaccggcaaccucgucgucccccgcuacgccuucaccauggagcgcaacgccggcuccggcaucaucaucuccgacacccccguccacgacugcaacaccaccugccagacccccgagggcgccaucaacaccucccuccccuuccagaacauccaccccaucaccaucggcaagugccccaaguacgucaaguccaccaagcuccgccucgccaccggccuccgcaacguccccuccauccagucccgcggccucuucggcgccaucgccggcuucaucgagggcggcuggaccggcauggucgacggcugguacggcuaccaccaccagaacgagcagggcuccggcuacgccgccgaccucaaguccacccagaacgccaucgacaagaucaccaacaaggucaacuccgucaucgagaagaugaacacccaguucaccgccgucggcaaggaguucaaccaccucgagaagcgcaucgagaaccucaacaagaaggucgacgacggcuuccucgacaucuggaccuacaacgccgagcuccucguccuccucgagaacgagcgcacccucgacuaccacgacuccaacgucaagaaccucuacgagaagguccgcaaccagcucaagaacaacgccaaggagaucggcaacggcugcuucgaguucuaccacaagugcgacaacaccugcauggaguccgucaagaacggcaccuacgacuaccccaaguacuccgaggaggccaagcucaaccgcgagaagaucgacggcgucaagcucgaguccacccgcaucuaccagauccucgccaucuacuccaccgucgccuccucccucguccucgucgucucccucggcgccaucuccuucuggaugugcuccaacggcucccuccagugccgcaucugcaucuga

SEQ ID NO: 108733 - RNA, 1701 nt, Artificial Sequence
  derived and/or modified CDS sequence (opt2) from hemagglutinin__InfluenzaA__AIM56050
augaaggccauccucgucguccuccucuacaccuucgccaccaccaacgccgacacccucugcaucggcuaccacgccaacaacuccaccgacaccgucgacaccguccucgagaagaacgucaccgucacccacuccgucaaccuccucgaggacaagcacaacggcaagcucugcaagcuccgcggcgucgccccccuccaccucggcaagugcaacaucgccggcuggauccucggcaaccccgagugcgagucccucuccaccgccuccuccugguccuacaucgucgagaccuccuccuccgacaacggcaccugcuaccccggcgacuucaucaacuacgaggagcuccgcgagcagcucuccuccgucuccuccuucgagcgcuucgagaucuuccccaagaccuccuccuggcccaaccacgacuccaacaagggcgucaccgccgccugcccccacgccggcgccaaguccuucuacaagaaccucaucuggcucgucaagaagggcaacuccuaccccaagcucucccaguccuacaucaacgacaagggcaaggagguccucguccucuggggcauccaccaccccuccaccaccgccgaccagcagucccucuaccagaacgccgacgccuacgucuucgucggcaccucccgcuacuccaagaaguucaagcccgagaucgccauccgccccaagguccgcgaccaggagggccgcaugaacuacuacuggacccucgucgagcccggcgacaagaucaccuucgaggccaccggcaaccucgucgucccccgcuacgccuucaccauggagcgcaacgccggcuccggcaucaucaucuccgacacccccguccacgacugcaacaccaccugccagacccccgagggcgccaucaacaccucccuccccuuccagaacauccaccccaucaccaucggcaagugccccaaguacgucaaguccaccaagcuccgccucgccaccggccuccgcaacguccccuccauccagucccgcggccucuucggcgccaucgccggcuucaucgagggcggcuggaccggcauggucgacggcugguacggcuaccaccaccagaacgagcagggcuccggcuacgccgccgaccucaaguccacccagaacgccaucgacaagaucaccaacaaggucaacuccgucaucgagaagaugaacacccaguucaccgccgucggcaaggaguucaaccaccucgagaagcgcaucgagaaccucaacaagaaggucgacgacggcuuccucgacaucuggaccuacaacgccgagcuccucguccuccucgagaacgagcgcacccucgacuaccacgacuccaacgucaagaaccucuacgagaagguccgcaaccagcucaagaacaacgccaaggagaucggcaacggcugcuucgaguucuaccacaagugcgacaacaccugcauggaguccgucaagaacggcaccuacgacuaccccaaguacuccgaggaggccaagcucaaccgcggcaagaucgacggcgucaagcucgaguccacccgcaucuaccagauccucgccaucuacuccaccgucgccuccucccucguccucgucgucucccucggcgccaucuccuucuggaugugcuccaacggcucccuccagugccgcaucugcaucuga

SEQ ID NO: 108734 - RNA, 1701 nt, Artificial Sequence; identical to SEQ ID NO: 106076
  derived and/or modified CDS sequence (opt2) from hemagglutinin__InfluenzaA__AIM56061

SEQ ID NO: 108735 - RNA, 1701 nt, Artificial Sequence; identical to SEQ ID NO: 106076
  derived and/or modified CDS sequence (opt2) from hemagglutinin__InfluenzaA__AIM56072

SEQ ID NO: 108736 - RNA, 1701 nt, Artificial Sequence; identical to SEQ ID NO: 107929
  derived and/or modified CDS sequence (opt2) from hemagglutinin__InfluenzaA__AIM56083

SEQ ID NO: 108737 - RNA, 1701 nt, Artificial Sequence; identical to SEQ ID NO: 106076
  derived and/or modified CDS sequence (opt2) from hemagglutinin__InfluenzaA__AIM56105

SEQ ID NO: 108738 - RNA, 1701 nt, Artificial Sequence; identical to SEQ ID NO: 106076
  derived and/or modified CDS sequence (opt2) from hemagglutinin__InfluenzaA__AIM56116

SEQ ID NO: 108739 - RNA, 1701 nt, Artificial Sequence
  derived and/or modified CDS sequence (opt2) from hemagglutinin__InfluenzaA__AIM56127
augaaggccauccucgucguccuccucuacaccuucgccaccgccaacgccgacacccucugcaucggcuaccacgccaacaacuccaccgacaccgucgacaccguccucgagaagaacgucaccgucacccacuccgucaaccuccucgaggacaagcacaacggcaagcucugcaagcuccgcggcgucgccccccuccaccucggcaagugcaacaucgccggcuggauccucggcaaccccgagugcgagucccucuccaccgccuccuccugguccuacaucgucgagaccuccuccuccgacaacggcaccugcuaccccggcgacuucaucaacuacgaggagcuccgcgagcagcucuccuccgucuccuccuucgagcgcuucgagaucuuccccaaggccuccuccuggcccaaccacgacuccaacaagggcgucaccgccgccugcccccacgccggcgccaaguccuucuacaagaaccucaucuggcucgucaagaagggcaacuccuaccccaagcucucccaguccuacaucaacgacaagggcaaggagguccucguccucuggggcauccaccaccccuccaccaccgccgaccagcagucccucuaccagaacgccgacgccuacgucuucgucggcaccucccgcuacuccaagaaguucaagcccgagaucgccauccgccccaagguccgcgaccaggagggccgcaugaacuacuacuggacccucgucgagcccggcgacaagaucaccuucgaggccaccggcaaccucgucgucccccgcuacgccuucaccauggagcgcaacgccggcuccggcaucaucaucuccgacacccccguccacgacugcaacaccaccugccagacccccgagggcgccaucaacaccucccuccccuuccagaacauccaccccaucaccaucggcaagugccccaaguacgucaaguccaccaagcuccgccucgccaccggccuccgcaacauccccuccauccagucccgcggccucuucggcgccaucgccggcuucaucgagggcggcuggaccggcauggucgacggcugguacggcuaccaccaccagaacgagcagggcuccggcuacgccgccgaccucaaguccacccagaacgccaucgacaagaucaccaacaaggucaacuccgucaucgagaagaugaacacccaguucaccgccgucggcaaggaguucaaccaccucgagaagcgcaucgagaaccucaacaagaaggucgacgacggcuuccucgacaucuggaccuacaacgccgagcuccucguccuccucgagaacgagcgcacccucgacuaccacgacuccaacgucaagaaccucuacgagaagguccgcaaccagcucaagaacaacgccaaggagaucggcaacggcugcuucgaguucuaccacaagugcgacaacaccugcauggaguccgucaagaacggcaccuacgacuaccccaaguacuccgaggaggccaagcucaaccgcgagaagaucgacggcgucaagcucgaguccacccgcaucuaccagauccucgccaucuacuccaccgucgccuccucccucguccucgucgucucccucggcgccaucuccuucuggaugugcuccaacggcucccuccagugccgcaucugcaucuga

SEQ ID NO: 108740 - RNA, 1701 nt, Artificial Sequence; identical to SEQ ID NO: 106076
  derived and/or modified CDS sequence (opt2) from hemagglutinin__InfluenzaA__AIM56138

SEQ ID NO: 108741 - RNA, 1701 nt, Artificial Sequence; identical to SEQ ID NO: 106076
  derived and/or modified CDS sequence (opt2) from hemagglutinin__InfluenzaA__AIM56149

SEQ ID NO: 108742 - RNA, 1701 nt, Artificial Sequence; identical to SEQ ID NO: 107929
  derived and/or modified CDS sequence (opt2) from hemagglutinin__InfluenzaA__AIM56160

SEQ ID NO: 108743 - RNA, 1701 nt, Artificial Sequence; identical to SEQ ID NO: 106076
  derived and/or modified CDS sequence (opt2) from hemagglutinin__InfluenzaA__AIM56171

SEQ ID NO: 108744 - RNA, 1701 nt, Artificial Sequence
  derived and/or modified CDS sequence (opt2) from hemagglutinin__InfluenzaA__AIM56182
augaaggccauccucgucguccuccucuacaccuucgccaccgccaacgccgacacccucugcaucggcuaccacgccaacaacuccaccgacaccgucgacaccguccucgagaagaacgucaccgucacccacuccgucaaccuccucgaggacaagcacaacggcaagcucugcaagcuccgcggcgucgccccccuccaccucggcaagugcaacaucgccggcuggauccucggcaaccccgagugcgagucccucuccaccgccuccuccugguccuacaucgucgagaccuccuccuccgacaacggcaccugcuaccccggcgacuucaucaacuacgaggagcuccgcgagcagcucuccuccgucuccuccuucgagcgcuucgagaucuuccccaaggccuccuccuggcccaaccacgacuccaacaagggcgucaccgccgccugcccccacgccggcgccaaguccuucuacaagaaccucaucuggcucgucaagaagggcaacuccuaccccaagcucucccaguccuacaucaacgacaagggcaaggagguccucguccucuggggcauccaccaccccuccaccaccgccgaccagcagucccucuaccagaacgccgacgccuacgucuucgucggcaccucccgcuacuccaagaaguucaagcccgagaucgccauccgccccaagguccgcgaccaggagggccgcaugaacuacuacuggacccucgucgagcccggcgacaagaucaccuucgaggccaccggcaaccucgucgucccccgcuacgccuucaccauggagcgcaacgccggcuccggcaucaucaucuccgacacccccguccacgacugcaacaccaccugccagacccccgagggcgccaucaacaccucccuccccuuccagaacauccaccccaucaccaucggcaagugccccaaguacgucaaguccaccaagcuccgccucgccaccggccuccgcaacauccccuccauccagucccgcggccucuucggcgccaucgccggcuucaucgagggcggcuggaccggcauggucgacggcugguacggcuaccaccaccagaacgagcagggcuccggcuacgccgccgaccucaaguccacccagaacgccaucgacaagaucaccaacaaggucaacuccgucaucgagaagaugaacacccaguucaccgccgucggcaaggaguucaaccaccucgagaagcgcaucgagaaccucaacaagaaggucgacgacggcuuccucgacaucuggaccuacaacgccgagcuccucguccuccucgagaacgagcgcacccucgacuaccacgacuccaacgucaagaaccucuacgagaagguccgcaaccagcucaagaacaacgccaaggagaucggcaacggcugcuucgaguucuaccacaagugcgacaacaccugcauggaguccgucaagaacggcaccuacgacuaccccaaguacuccgaggaggccaagcucaacaaggagaagaucgacggcgucaagcucgaguccacccgcaucuaccagauccucgccaucuacuccaccgucgccuccucccucguccucgucgucucccucggcgccaucuccuucuggaugugcuccaacggcucccuccagugccgcaucugcaucuga

SEQ ID NO: 108745 - RNA, 1701 nt, Artificial Sequence
  derived and/or modified CDS sequence (opt2) from hemagglutinin__InfluenzaA__AIM56193
augaaggccauccucgucguccuccucuacaccuucgccaccgccaacgccgacacccucugcaucggcuaccacgccaacaacuccaccgacaccgucgacaccguccucgagaagaacgucaccgucacccacuccgucaaccuccucgaggacaagcacaacggcaagcucugcaagcuccgcggcgucgccccccuccaccucggcaagugcaacaucgccggcuggauccucggcaaccccgagugcgagucccucuccaccgccuccuccugguccuacaucgucgagaccuccuccuccgacaacggcaccugcuaccccggcgacuucaucaacuacgaggagcuccgcgagcagcucuccuccgucuccuccuucgagcgcuucgagaucuuccccaagaccuccuccuggcccaaccacgacuccaacaagggcgucaccgccgccugcccccacgccggcgccaaguccuucuacaagaaccucaucuggcucgucaagaagggcaacuccuaccccaagcucucccaguccuacaucaacgacaagggcaaggagguccucguccucuggggcauccaccaccccuccaccaccgccgaccagcagucccucuaccagaacgccgacgccuacgucuucgucggcaccucccgcuacuccaagaaguucaagcccgagaucgccauccgccccaagguccgcgaccaggagggccgcaugaacuacuacuggacccucgucgagcccggcgacaaggucaccuucgaggccaccggcaaccucgucgucccccgcuacgccuucaccauggagcgcaacgccggcuccggcaucaucaucuccgacacccccguccacgacugcaacaccaccugccagacccccgagggcgccaucaacaccucccuccccuuccagaacauccaccccaucaccaucggcaagugccccaaguacgucaaguccaccaagcuccgccucgccaccggccuccgcaacguccccuccauccagucccgcggccucuucggcgccaucgccggcuucaucgagggcggcuggaccggcauggucgacggcugguacggcuaccaccaccagaacgagcagggcuccggcuacgccgccgaccucaaguccacccagaacgccaucgacaagaucaccaacaaggucaacuccgucaucgagaagaugaacacccaguucaccgccgucggcaaggaguucaaccaccucgagaagcgcaucgagaaccucaacaagaaggucgacgacggcuuccucgacaucuggaccuacaacgccgagcuccucguccuccucgagaacgagcgcacccucgacuaccacgacuccaacgucaagaaccucuacgagaagguccgcaaccagcucaagaacaacgccaaggagaucggcaacggcugcuucgaguucuaccacaagugcgacaacaccugcauggaguccgucaagaacggcaccuacgacuaccccaaguacuccgaggaggccaagcucaaccgcgagaagaucgacggcgucaagcucgaguccacccgcaucuaccagauccucgccaucuacuccaccgucgccuccucccucguccucgucgucucccucggcgccaucuccuucuggaugugcuccaacggcucccuccagugccgcaucugcaucuga

SEQ ID NO: 108746 - RNA, 1701 nt, Artificial Sequence; identical to SEQ ID NO: 106076
  derived and/or modified CDS sequence (opt2) from hemagglutinin__InfluenzaA__AIM56204

SEQ ID NO: 108747 - RNA, 1701 nt, Artificial Sequence; identical to SEQ ID NO: 106076
  derived and/or modified CDS sequence (opt2) from hemagglutinin__InfluenzaA__AIM56215

SEQ ID NO: 108748 - RNA, 1701 nt, Artificial Sequence; identical to SEQ ID NO: 106076
  derived and/or modified CDS sequence (opt2) from hemagglutinin__InfluenzaA__AIM56226

SEQ ID NO: 108749 - RNA, 1701 nt, Artificial Sequence; identical to SEQ ID NO: 108487
  derived and/or modified CDS sequence (opt2) from hemagglutinin__InfluenzaA__AIM56237

SEQ ID NO: 108750 - RNA, 1701 nt, Artificial Sequence; identical to SEQ ID NO: 106076
  derived and/or modified CDS sequence (opt2) from hemagglutinin__InfluenzaA__AIM56259

SEQ ID NO: 108751 - RNA, 1701 nt, Artificial Sequence
  derived and/or modified CDS sequence (opt2) from hemagglutinin__InfluenzaA__AIM56270
augaaggccauccucgucguccuccucuacaccuucgccaccgccaacgccgacacccucugcaucggcuaccacgccaacaacuccaccgacaccgucgacaccguccucgagaagaacgucaccgucacccacuccgucaaccuccucgaggacaagcacaacggcaagcucugcaagcuccgcggcgucgccccccuccaccucggcaagugcaacaucgccggcuggauccucggcaaccccgagugcgagucccucuccaccgccuccuccugguccuacaucgucgagaccuccuccuccgacaacggcaccugcuaccccggcgacuucaucaacuacgaggagcuccgcgagcagcucuccuccgucuccuccuucgagcgcuucgagaucuuccccaagaccuccuccuggcccaaccacgacuccaacaagggcgucaccgccgccugcccccacgccggcgccaaguccuucuacaagaaccucaucuggcucgucaagaagggcaacuccuaccccaagcucucccaguccuacaucaacgacaagggcaaggagguccucguccucuggggcauccaccaccccuccaccaccgccgaccagcagucccucuaccagaacgccgacgccuacgucuucgucggcaccucccgcuacuccaagaaguucaagcccgagaucgccauccgccccaagguccgcgaccaggagggccgcaugaacuacuacuggacccucgucgagcccggcgacaagaucaccuucgaggccaccggcaaccucgucgucccccgcuacgccuucaccauggagcgcaacgccggcuccggcaucaucaucuccgacacccccguccacgacugcaacaccaccugccagacccccgagggcgccgucaacaccucccuccccuuccagaacauccaccccaucaccaucggcaagugccccaaguacgucaaguccaccaagcuccgccucgccaccggccuccgcaacguccccuccauccagucccgcggccucuucggcgccaucgccggcuucaucgagggcggcuggaccggcauggucgacggcugguacggcuaccaccaccagaacgagcagggcuccggcuacgccgccgaccucaaguccacccagaacgccaucgacaagaucaccaacaaggucaacuccgucaucgagaagaugaacacccaguucaccgccgucggcaaggaguucaaccaccucgagaagcgcaucgagaaccucaacaagaaggucgacgacggcuuccucgacaucuggaccuacaacgccgagcuccucguccuccucgagaacgagcgcacccucgacuaccacgacuccaacgucaagaaccucuacgagaagguccgcaaccagcucaagaacaacgccaaggagaucggcaacggcugcuucgaguucuaccacaagugcgacaacaccugcauggaguccgucaagaacggcaccuacgacuaccccaaguacuccgaggaggccaagcucaaccgcgagaagaucgacggcgucaagcucgaguccacccgcaucuaccagauccucgccaucuacuccaccgucgccuccucccucguccucgucgucucccucggcgccaucuccuucuggaugugcuccaacggcucccuccagugccgcaucugcaucuga

SEQ ID NO: 108752 - RNA, 1701 nt, Artificial Sequence; identical to SEQ ID NO: 106076
  derived and/or modified CDS sequence (opt2) from hemagglutinin__InfluenzaA__AIM56281

SEQ ID NO: 108753 - RNA, 1701 nt, Artificial Sequence
  derived and/or modified CDS sequence (opt2) from hemagglutinin__InfluenzaA__AIM56292
augaaggccauccucgucguccuccucuacacccucgccaccgccaacgccgacacccucugcaucggcuaccacgccaacaacuccaccgacaccgucgacaccguccucgagaagaacgucaccgucacccacuccgucaaccuccucgaggacaagcacaacggcaagcucugcaagcuccgcggcgucgccccccuccaccucggcaagugcaacaucgccggcuggauccucggcaaccccgagugcgagucccucuccaccgccuccuccugguccuacaucgucgagaccuccuccuccgacaacggcaccugcuaccccggcgacuucaucaacuacgaggagcuccgcgagcagcucuccuccgucuccuccuucgagcgcuucgagaucuuccccaagaccuccuccuggcccaaccacgacuccaacaagggcgucaccgccgccugcccccacgccggcgccaaguccuucuacaagaaccucaucuggcucgucaagaagggcaacuccuaccccaagcucucccaguccuacaucaacgacaagggcaaggagauccucguccucuggggcauccaccaccccuccaccaccgccgaccagcagucccucuaccagaacgccgacgccuacgucuucgucggcaccucccgcuacuccaagaaguucaagcccgagaucgccauccgccccaagguccgcgaccaggagggccgcaugaacuacuacuggacccucgucgagcccggcgacaagaucaccuucgaggccaccggcaaccucgucgucccccgcuacgccuucaccauggagcgcaacgccggcuccggcaucaucaucuccgacacccccguccacgacugcaacaccaccugccagacccccgagggcgccaucaacaccucccuccccuuccagaacauccaccccaucaccaucggcaagugccccaaguacgucaaguccaccaagcuccgccucgccaccggccuccgcaacguccccuccauccagucccgcggccucuucggcgccaucgccggcuucaucgagggcggcuggaccggcauggucgacggcugguacggcuaccaccaccagaacgagcagggcuccggcuacgccgccgaccucaaguccacccagaacgccaucgacaagaucaccaacaaggucaacuccgucaucgagaagaugaacacccaguucaccgccgucggcaaggaguucaaccaccucgagaagcgcaucgagaaccucaacaagaaggucgacgacggcuuccucgacaucuggaccuacaacgccgagcuccucguccuccucgagaacgagcgcacccucgacuaccacgacuccaacgucaagaaccucuacgagaagguccgcaaccagcucaagaacaacgccaaggagaucggcaacggcugcuucgaguucuaccacaagugcgacaacaccugcauggaguccgucaagaacggcaccuacgacuaccccaaguacuccgaggaggccaagcucaaccgcgagaagaucgacggcgucaagcucgaguccacccgcaucuaccagauccucgccaucuacuccaccgucgccuccucccucguccucgucgucucccucggcgccaucuccuucuggaugugcuccaacggcucccuccagugccgcaucugcaucuga

SEQ ID NO: 108754 - RNA, 1701 nt, Artificial Sequence
  derived and/or modified CDS sequence (opt2) from hemagglutinin__InfluenzaA__AIM56303
augaaggccauccucgucguccuccucuacacccucgccaccgccaacgccgacacccucugcaucggcuaccacgccaacaacuccaccgacaccgucgacaccguccucgagaagaacgucaccgucacccacuccgucaaccuccucgaggacaagcacaacggcaagcucugcaagcuccgcggcgucgccccccuccaccucggcaagugcaacaucgccggcuggauccucggcaaccccgagugcgagucccucuccaccgccuccuccugguccuacaucgucgagaccuccuccuccgacaacggcaccugcuaccccggcgacuucaucaacuacgaggagcuccgcgagcagcucuccuccgucuccuccuucgagcgcuucgagaucuuccccaagaccuccuccuggcccaaccacgacuccaacaagggcgucaccgccgccugcccccacgccggcgccaaguccuucuacaagaaccucaucuggcucgucaagaagggcaacuccuaccccaagcucucccaguccuacaucaacgacaagggcaaggagguccucguccucuggggcauccaccaccccuccaccaccgccgaccagcagucccucuaccagaacgccgacgccuacgucuucgucggcaccucccgcuacuccaagaaguucaagcccgagaucgccauccgccccaagguccgcgaccaggagggccgcaugaacuacuacuggacccucgucgagcccggcgacaagaucaccuucgaggccaccggcaaccucgucgucccccgcuacgccuucaccauggagcgcaacgccggcuccggcaucaucaucuccgacacccagguccacgacugcaacaccaccugccagacccccgagggcgccaucaacaccucccuccccuuccagaacauccaccccaucaccaucggcaagugccccaaguacgucaaguccaccaagcuccgccucgccaccggccuccgcaacguccccuccauccagucccgcggccucuucggcgccaucgccggcuucaucgagggcggcuggaccggcauggucgacggcugguacggcuaccaccaccagaacgagcagggcuccggcuacgccgccgaccucaaguccacccagaacgccaucgacaagaucaccaacaaggucaacuccgucaucgagaagaugaacacccaguucaccgccgucggcaaggaguucaaccaccucgagaagcgcaucgagaaccucaacaagaaggucgacgacggcuuccucgacaucuggaccuacaacgccgagcuccucguccuccucgagaacgagcgcacccucgacuaccacgacuccaacgucaagaaccucuacgagaagguccgcaaccagcucaagaacaacgccaaggagaucggcaacggcugcuucgaguucuaccacaagugcgacaacaccugcauggaguccgucaagaacggcaccuacgacuaccccaaguacuccgaggaggccaagcucaaccgcgagaagaucgacggcgucaagcucgaguccacccgcaucuaccagauccucgccaucuacuccaccgucgccuccucccucguccucgucgucucccucggcgccaucuccuucuggaugugcuccaacggcucccuccagugccgcaucugcaucuga

SEQ ID NO: 108755 - RNA, 1701 nt, Artificial Sequence
  derived and/or modified CDS sequence (opt2) from hemagglutinin__InfluenzaA__AIM56314
augaaggccauccucgucguccuccucuacaccuucgccaccgccaacgccgacacccucugcaucggcuaccacgccaacaacuccaccgacaccgucgacaccguccucgagaagaacgucaccgucacccacuccgucaaccuccucgaggacaagcacaacggcaagcucugcaagcuccgcggcgucgccccccuccaccucggcaagugcaacaucgccggcuggauccucggcaaccccgagugcgagucccucuccaccgccuccuccugguccuacaucgucgagaccuccuccuccgacaacggcaccugcuaccccggcgacuucaucaacuacgaggagcuccgcgagcagcucuccuccgucuccuccuucgagcgcuucgagaucuuccccaagaccuccuccuggcccaaccacgacuccaacaagggcgucaccgccgccugcccccacgccggcgccaaguccuucuacaagaaccucaucuggcucgucaagaagggcaacuccuaccccaagcucucccaguccuacaucaacgacaagggcaaggagguccucguccucuggggcauccaccaccccuccaccaccgccgaccagcagucccucuaccagaacgccgacgccuacgucuucgucggcaccucccgcuacuccaagaaguucaagcccgagaucgccauccgccccaagguccgcgaccaggagggccgcaugaacuacuacuggacccucgucgagcccggcgacaagaucaccuucgaggccaccggcaaccucgucgucccccgcuacgccuucaccauggagcgcaacgccggcuccggcaucaucaucuccgacacccccguccacgacugcaacaccaccugccagacccccgagggcgccaucaacaccucccuccccuuccagaacauccaccccaucaccaucggcaagugccccaaguacgucaaguccaccaagcuccgccucgccaccggccuccgcaacguccccuccauccagucccgcggccucuucggcgccaucgccggcuucaucgagggcggcuggaccggcauggucgacggcugguacggcuaccaccaccagaacgagcagggcuccggcuacgccgccgaccucaaguccacccagaacgccaucgacaagaucaccaacaaggucaacuccgucaucgagaagaugaacacccaguucaccgccgucggcaaggaguucaaccaccucgagaagcgcaucgagaaccucaacaagaaggucgacgacggcuuccucgacaucuggaccuacaacgccgagcuccucguccuccucgagaacgagcgcacccucgacuaccacgacuccaacgucaagaagcucuacgagaagguccgcaaccagcucaagaacaacgccaaggagaucggcaacggcugcuucgaguucuaccacaagugcgacaacaccugcauggaguccgucaagaacggcaccuacgacuaccccaaguacuccgaggaggccaagcucaaccgcgagaagaucgacggcgucaagcucgaguccacccgcaucuaccagauccucgccaucuacuccaccgucgccuccucccucguccucgucgucucccucggcgccaucuccuucuggaugugcuccaacggcucccuccagugccgcaucugcaucuga

SEQ ID NO: 108756 - RNA, 1701 nt, Artificial Sequence; identical to SEQ ID NO: 106076
  derived and/or modified CDS sequence (opt2) from hemagglutinin__InfluenzaA__AIM56325

SEQ ID NO: 108757 - RNA, 1701 nt, Artificial Sequence
  derived and/or modified CDS sequence (opt2) from hemagglutinin__InfluenzaA__AIM56336
augaaggccauccucgucguccuccucuacaccuucgccaccgccaacgccgacacccucugcaucggcuaccacgccaacaacuccaccgacaccgucgacaccguccucgagaagaacgucaccgucacccacuccgucaaccuccucgaggacaagcacaacggcaagcucugcaagcuccgcggcgucgccccccuccaccucggcaagugcaacaucgccggcuggauccucggcaaccccgagugcgagucccucuccaccgccuccuccugguccuacaucgucgagaccuccuccuccgacaacggcaccugcuaccccggcgacuucaucaacuacgaggagcuccgcgagcagcucuccuccgucuccuccuucgagcgcuucgagaucuuccccaagaccuccuccuggcccaaccacgacuccaacaagggcgucaccgccgccugcccccacgccggcgccaaguccuucuacaagaaccucaucuggcucgucaagaagggcaacuccuaccccaagcucucccaguccuacaucaacgacaagggcaaggagguccucguccucuggggcauccaccaccccuccaccaccgccgaccagcagucccucuaccagaacgccgacgccuacgucuucgucggcaccucccgcuacuccaagaaguucaagcccgagaucgccauccgccccaagguccgcgaccaggagggccgcaugaacuacuacuggacccucgucgagcccggcgacaagaucaccuucgaggccaccggcaaccucgucgucccccgcuacgccuucaccauggagcgcaacgccggcuccggcaucaucaucuccgacacccccguccacgacugcaacaccaccugccagacccccgagggcgccaucaacaccucccuccccuuccagaacauccaccccaucaccaucggcaagugccccaaguacgucaaguccaccaagcuccgccucgccaccggccuccgcaacauccccuccauccagucccgcggccucuucggcgccaucgccggcuucaucgagggcggcuggaccggcauggucgacggcugguacggcuaccaccaccagaacgagcagggcuccggcuacgccgccgaccucaaguccacccagaacgccaucgacaagaucaccaacaaggucaacuccgucaucgagaagaugaacacccaguucaccgccgucggcaaggaguucaaccaccucgagaagcgcaucgagaaccucaacaagaaggucgacgacggcuuccucgacaucuggaccuacaacgccgagcuccucguccuccucgagaacgagcgcacccucgacuaccacgacuccaacgucaagaaccucuacgagaagauccgcaaccagcucaagaacaacgccaaggagaucggcaacggcugcuucgaguucuaccacaagugcgacaacaugugcauggaguccgucaagaacggcaccuacgacuaccccaaguacuccgaggaggccaagcucaaccgcgagaagaucgacggcgucaagcucgaguccacccgcaucuaccagauccucgccaucuacuccaccgucgccuccucccucguccucgucgucucccucggcgccaucuccuucuggaugugcuccaacggcucccuccagugccgcaucugcaucuga

SEQ ID NO: 108758 - RNA, 1701 nt, Artificial Sequence
  derived and/or modified CDS sequence (opt2) from hemagglutinin__InfluenzaA__AIM56347
augaaggccauccucgucguccuccucuacaccuucgccaccgccaacgccgacacccucugcaucggcuaccacgccaacaacuccaccgacaccgucgacaccguccucgagaagaacgucaccgucacccacuccgucaaccuccucgaggacaagcacaacggcaagcucugcaagcuccgcggcgucgccccccuccaccucggcaagugcaacaucgccggcuggauccucggcaaccccgagugcgagucccucuccaccaccuccuccugguccuacaucgucgagaccuccuccuccgacaacggcaccugcuaccccggcgacuucaucaacuacgaggagcuccgcgagcagcucuccuccgucuccuccuucgagcgcuucgagaucuuccccaagaccuccuccuggcccaaccacgacuccaacaagggcgucaccgccgccugcccccacgccggcgccaaguccuucuacaagaaccucaucuggcucgucaagaagggcaacuccuaccccaagcucucccaguccuacaucaacgacaagggcaaggagguccucguccucuggggcauccaccaccccuccaccaccgccgaccagcagucccucuaccagaacgccgacgccuacgucuucgucggcaccucccgcuacuccaagaaguucaagcccgagaucgccauccgccccaagguccgcgaccaggagggccgcaugaacuacuacuggacccucgucgagcccggcgacaagaucaccuucgaggccaccggcaaccucgucgucccccgcuacgccuucaccauggagcgcaacgccggcuccggcaucaucaucuccgacacccccguccacgacugcaacaccaccugccagacccccgagggcgccaucaacaccucccuccccuuccagaacauccaccccaucaccaucggcaagugccccaaguacgucaaguccaccaagcuccgccucgccaccggccuccgcaacguccccuccauccagucccgcggccucuucggcgccaucgccggcuucaucgagggcggcuggaccggcauggucgacggcugguacggcuaccaccaccagaacgagcagggcuccggcuacgccgccgaccucaaguccacccagaacgccaucgacaagaucaccaacaaggucaacuccgucaucgagaagaugaacacccaguucaccgccgucggcaaggaguucaaccaccucgagaagcgcaucgagaaccucaacaagaaggucgacgacggcuuccucgacaucuggaccuacaacgccgagcuccucguccuccucgagaacgagcgcacccucgacuaccacgacuccaacgucaagaaccucuacgagaagguccgcaaccagcucaagaacaacgccaaggagaucggcaacggcugcuucgaguucuaccacaagugcgacaacaccugcauggaguccgucaagaacggcaccuacgacuaccccaaguacuccgaggaggccaagcucaaccgcgagaagaucgacggcgucaagcucgaguccacccgcaucuaccagauccucgccaucuacuccaccgucgccuccucccucguccucgucgucucccucggcgccaucuccuucuggaugugcuccaacggcucccuccagugccgcaucugcaucuga

SEQ ID NO: 108759 - RNA, 1701 nt, Artificial Sequence
  derived and/or modified CDS sequence (opt2) from hemagglutinin__InfluenzaA__AIM56358
augaaggccauccucgucguccuccucuacaccuucgccaccgccaacgccgacacccucugcaucggcuaccacgccaacaacuccaccgacaccgucgacaccguccucgagaagaacgucaccgucacccacuccgucaaccuccucgaggacaagcacaacggcaagcucugcaagcuccgcggcgucgccccccuccaccucggcaagugcaacaucgccggcuggauccucggcaaccccgagugcgagucccucuccaccgccuccuccugguccuacaucgucgagaccuccuccuccgacaacggcaccugcuaccccggcgacuucaucaacuacgaggagcuccgcgagcagcucuccuccgucuccuccuucgagcgcuucgagaucuuccccaagaccuccuccuggcccaaccacgacuccaacaagggcgucaccgccgccugcccccacgccggcgccaaguccuucuacaagaaccucaucuggcucgucaagaagggcaacuccuaccccaagcucucccaguccuacaucaacgacaagggcaaggagguccucguccucuggggcauccaccaccccuccaccaccgccgaccagcagucccucuaccagaacgccgacgccuacgucuucgucggcaccucccgcuacuccaagaaguucaagcccgagaucgccauccgccccaagguccgcgaccaggagggccgcaugaacuacuacuggacccucgucaagcccggcgacaagaucaccuucgaggccaccggcaaccucgucgucccccgcuacgccuucaccauggagcgcaacgccggcuccggcaucaucaucuccgacacccccguccacgacugcaacaccaccugccagacccccgagggcgccaucaacaccucccuccccuuccagaacauccaccccaucaccaucggcaagugccccaaguacgucaaguccaccaagcuccgccucgccaccggccuccgcaacguccccuccauccagucccgcggccucuucggcgccaucgccggcuucaucgagggcggcuggaccggcauggucgacggcugguacggcuaccaccaccagaacgagcagggcuccggcuacgccgccgaccucaaguccacccagaacgccaucgacaagaucaccaacaaggucaacuccgucaucgagaagaugaacacccaguucaccgccgucggcaaggaguucaaccaccucgagaagcgcaucgagaaccucaacaagaaggucgacgacggcuuccucgacaucuggaccuacaacgccgagcuccucguccuccucgagaacgagcgcacccucgacuaccacgacuccaacgucaagaaccucuacgagaagguccgcaaccagcucaagaacaacgccaaggagaucggcaacggcugcuucgaguucuaccacaagugcgacaacaccugcauggaguccgucaagaacggcaccuacgacuaccccaaguacuccgaggaggccaagcucaaccgcgagaagaucgacggcgucaagcucgaguccacccgcaucuaccagauccucgccaucuacuccaccgucgccuccucccucguccucgucgucucccucggcgccaucuccuucuggaugugcuccaacggcucccuccagugccgcaucugcaucuga

SEQ ID NO: 108760 - RNA, 1701 nt, Artificial Sequence; identical to SEQ ID NO: 106076
  derived and/or modified CDS sequence (opt2) from hemagglutinin__InfluenzaA__AIM56369

SEQ ID NO: 108761 - RNA, 1701 nt, Artificial Sequence
  derived and/or modified CDS sequence (opt2) from hemagglutinin__InfluenzaA__AIM56380
augaaggccauccucgucguccuccucuacaccuucgccaccgccaacgccgacacccucugcaucggcuaccacgccaacaacuccaccgacaccgucgacaccguccucgagaagaacgucaccgucacccacuccgucaaccuccucgaggacaagcacaacggcaagcucugcaagcuccgcggcgucgccccccuccaccucggcaagugcaacaucgccggcuggauccucggcaaccccgagugcgagucccucuccaccgccuccuccugguccuacaucgucgagaccuccuccuccgacaacggcaccugcuaccccggcgacuucaucaacuacgaggagcuccgcgagcagcucuccuccgucuccuccuucgagcgcuucgagaucuuccccaagaccuccuccuggcccaaccacgacuccaacaagggcgucaccgccgccugcccccacgccggcgccaaguccuucuacaagaaccucaucuggcucgucaagaagggcaacuccuaccccaagcucucccaguccuacaucaacgacaagggcaaggagguccucguccucuggggcauccaccaccccuccaccaccgccgaccagcagucccucuaccagaacgccgacgccuacgucuucgucggcaccucccgcuacuccaagaaguucaagcccgagaucgccauccgccccaagguccgcgaccaggagggccgcaugaacuacuacuggacccucgucgagcccggcgacaagaucaccuucgaggccaccggcaaccucgucgucccccgcuacgccuucaccauggagcgcaacgccggcuccggcaucaucaucuccgacacccccguccacgacugcaacaccaccugccagacccccgagggcgccaucaacaccucccuccccuuccagaacauccaccccaucaccaucggcaagugccccaaguacgucaaguccaccaagcuccgccucgccaccggccuccgcaacguccccuccauccagucccgcggccucuucggcgccaucgccggcuucaucgagggcggcuggaccggcauggucgacggcugguacggcuaccaccaccagaacgagcagggcuccggcuacgccgccgaccucaaguccacccagaacgccaucgacaagaucaccaacaaggucaacuccgucaucgagaagaugaacacccaguucaccgccgucggcaaggaguucaaccaccucgagaagcgcaucgagaaccucaacaagaaggucgacgacggcuuccucgacaucuggaccuacaacgccgagcuccucguccuccucgagaacgagcgcacccucgacuaccacgacuccaacgucaagaaccucuacgagaagguccgcaaccagcucaagaacaacgccaaggagaucggcaacggcugcuucgaguucuaccacaagugcgacaacaccugcauggaguccgucaagaacggcaccuacgacuaccccaaguacuccgaggaggccaagcucucccgcgagaagaucgacggcgucaagcucgaguccacccgcaucuaccagauccucgccaucuacuccaccgucgccuccucccucguccucgucgucucccucggcgccaucuccuucuggaugugcuccaacggcucccuccagugccgcaucugcaucuga

SEQ ID NO: 108762 - RNA, 1701 nt, Artificial Sequence; identical to SEQ ID NO: 106076
  derived and/or modified CDS sequence (opt2) from hemagglutinin__InfluenzaA__AIM56391

SEQ ID NO: 108763 - RNA, 1701 nt, Artificial Sequence; identical to SEQ ID NO: 106076
  derived and/or modified CDS sequence (opt2) from hemagglutinin__InfluenzaA__AIM56402

SEQ ID NO: 108764 - RNA, 1701 nt, Artificial Sequence; identical to SEQ ID NO: 107929
  derived and/or modified CDS sequence (opt2) from hemagglutinin__InfluenzaA__AIM56413

SEQ ID NO: 108765 - RNA, 1701 nt, Artificial Sequence; identical to SEQ ID NO: 106076
  derived and/or modified CDS sequence (opt2) from hemagglutinin__InfluenzaA__AIM56425

SEQ ID NO: 108766 - RNA, 1701 nt, Artificial Sequence; identical to SEQ ID NO: 106076
  derived and/or modified CDS sequence (opt2) from hemagglutinin__InfluenzaA__AIM56436

SEQ ID NO: 108767 - RNA, 1701 nt, Artificial Sequence; identical to SEQ ID NO: 106076
  derived and/or modified CDS sequence (opt2) from hemagglutinin__InfluenzaA__AIM56447

SEQ ID NO: 108768 - RNA, 1701 nt, Artificial Sequence; identical to SEQ ID NO: 106076
  derived and/or modified CDS sequence (opt2) from hemagglutinin__InfluenzaA__AIM56469

SEQ ID NO: 108769 - RNA, 1701 nt, Artificial Sequence
  derived and/or modified CDS sequence (opt2) from hemagglutinin__InfluenzaA__AIM56480
augaaggccauccucgucguccuccucuacaccuucgccaccaccaacgccgacacccucugcaucggcuaccacgccaacaacuccaccgacaccgucgacaccguccucgagaagaacgucaccgucacccacuccgucaaccuccucgaggacaagcacaacggcaagcucugcaagcuccgcggcgucgccccccuccaccucggcaagugcaacaucgccggcuggauccucggcaaccccgagugcgagucccucuccaccgccuccuccugguccuacaucgucgagaccuccuccuccgacaacggcaccugcuaccccggcgacuucaucaacuacgaggagcuccgcgagcagcucuccuccgucuccuccuucgagcgcuucgagaucuuccccaagaccuccuccuggcccaaccacgacuccaacaagggcgucaccgccgccugcccccacgccggcgccaaguccuucuacaagaaccucaucuggcucgucaagaagggcaacuccuaccccaagcucucccaguccuacaucaacgacaagggcaaggagguccucguccucuggggcauccaccaccccuccaccaccgccgaccagcagucccucuaccagaacgccgacgccuacgucuucgucggcaccucccgcuacuccaagaaguucaagcccgagaucgccauccgccccaagguccgcgaccaggagggccgcaugaacuacuacuggacccucgucgagcccggcgacaagaucaccuucgaggccaccggcaaccucgucgucccccgcuacgccuucaccauggagcgcaacgccggcuccggcaucaucaucuccgacacccccguccacgacugcaacaccaccugccagacccccgagggcgccaucaacaccucccuccccuuccagaacauccaccccaucacccucggcaagugccccaaguacgucaaguccaccaagcuccgccucgccaccggccuccgcaacguccccuccauccagucccgcggccucuucggcgccaucgccggcuucaucgagggcggcuggaccggcauggucgacggcugguacggcuaccaccaccagaacgagcagggcuccggcuacgccgccgaccucaaguccacccagaacgccaucgacaagaucaccaacaaggucaacuccgucaucgagaagaugaacacccaguucaccgccgucggcaaggaguucaaccaccucgagaagcgcaucgagaaccucaacaagaaggucgacgacggcuuccucgacaucuggaccuacaacgccgagcuccucguccuccucgagaacgagcgcacccucgacuaccacgacuccaacgucaagaaccucuacgagaagguccgcaaccagcucaagaacaacgccaaggagaucggcaacggcugcuucgaguucuaccacaagugcgacaacaccugcauggaguccgucaagaacggcaccuacgacuaccccaaguacuccgaggaggccaagcucaaccgcgagaagaucgacggcgucaagcucgaguccacccgcaucuaccagauccucgccaucuacuccaccgucgccuccucccucguccucgucgucucccucggcgccaucuccuucuggaugugcuccaacggcucccuccagugccgcaucugcaucuga

SEQ ID NO: 108770 - RNA, 1701 nt, Artificial Sequence; identical to SEQ ID NO: 106076
  derived and/or modified CDS sequence (opt2) from hemagglutinin__InfluenzaA__AIM56491

SEQ ID NO: 108771 - RNA, 1710 nt, Artificial Sequence
  derived and/or modified CDS sequence (opt2) from hemagglutinin__InfluenzaA__AIM56502
augaaggccauccucgucguccuccucuacaccuucgccaccgccaacgccgacacccucugcaucggcuaccacgccaacaacuccaccgacaccgucgacaccguccucgagaagaacgucaccgucacccacuccgucaaccuccucgaggacaagcacaacggcaagcucugcaagcuccgcggcgucgccccccuccaccucggcaagugcaacaucgccggcuggauccucggcaaccccgagugcgagucccucuccaccgccuccuccugguccuacaucgucgagaccuccuccuccgacaacggcaccugcuaccccggcgacuucaucaacuacgaggagcuccgcgagcagcucuccuccgucuccuccuucgagcgcuucgagaucuuccccaaggccuccuccuggcccaaccacgacuccaacaagggcgucaccgccgccugcccccacgccggcgccaaguccuucuacaagaaccucaucuggcucgucaagaagggcaacuccuaccccaagcucucccaguccuacaucaacgacaagggcaaggagguccucguccucuggggcauccaccaccccuccaccaccgccgaccagcagucccucuaccagaacgccgacgccuacgucuucgucggcaccucccgcuacuccaagaaguucaagcccgagaucgccauccgccccaagguccgcgaccaggagggccgcaugaacuacuacuggacccucgucgagcccggcgacaagaucaccuucgaggccaccggcaaccucgucgucccccgcuacgccuucaccauggagcgcaacgccggcuccggcaucaucaucuccgacacccccguccacgacugcaacaccaccugccagacccccgagggcgccaucaacaccucccucaccucccuccccuuccagaacauccaccccaucaccaucggcaagugccccaaguacgucaaguccaccaagcuccgccucgccaccggccuccgcaacauccccuccauccagucccgcggccucuucggcgccaucgccggcuucaucgagggcggcuggaccggcauggucgacggcugguacggcuaccaccaccagaacgagcagggcuccggcuacgccgccgaccucaaguccacccagaacgccaucgacaagaucaccaacaaggucaacuccgucaucgagaagaugaacacccaguucaccgccgucggcaaggaguucaaccaccucgagaagcgcaucgagaaccucaacaagaaggucgacgacggcuuccucgacaucuggaccuacaacgccgagcuccucguccuccucgagaacgagcgcacccucgacuaccacgacuccaacgucaagaaccucuacgagaagguccgcaaccagcucaagaacaacgccaaggagaucggcaacggcugcuucgaguucuaccacaagugcgacaacaccugcauggaguccgucaagaacggcaccuacgacuaccccaaguacuccgaggaggccaagcucaaccgcgagaagaucgacggcgucaagcucgaguccacccgcaucuaccagauccucgccaucuacuccaccgucgccuccucccucguccucgucgucucccucggcgccaucuccuucuggaugugcuccaacggcucccuccagugccgcaucugcaucuga

SEQ ID NO: 108772 - RNA, 1701 nt, Artificial Sequence; identical to SEQ ID NO: 106076
  derived and/or modified CDS sequence (opt2) from hemagglutinin__InfluenzaA__AIM56513

SEQ ID NO: 108773 - RNA, 1701 nt, Artificial Sequence; identical to SEQ ID NO: 108021
  derived and/or modified CDS sequence (opt2) from hemagglutinin__InfluenzaA__AIM56524

SEQ ID NO: 108774 - RNA, 1701 nt, Artificial Sequence; identical to SEQ ID NO: 106076
  derived and/or modified CDS sequence (opt2) from hemagglutinin__InfluenzaA__AIM56535

SEQ ID NO: 108775 - RNA, 1701 nt, Artificial Sequence; identical to SEQ ID NO: 106076
  derived and/or modified CDS sequence (opt2) from hemagglutinin__InfluenzaA__AIM56546

SEQ ID NO: 108776 - RNA, 1701 nt, Artificial Sequence; identical to SEQ ID NO: 107929
  derived and/or modified CDS sequence (opt2) from hemagglutinin__InfluenzaA__AIM56557

SEQ ID NO: 108777 - RNA, 1701 nt, Artificial Sequence
  derived and/or modified CDS sequence (opt2) from hemagglutinin__InfluenzaA__AIM56568
augaaggccauccucgucguccuccucuacaccuucgccaccgccaacgccgacacccucugcaucggcuaccacgccaacaacuccaccgacaccgucgacaccguccucgagaagaacgucaccgucacccacuccgucaaccuccucgaggacaagcacaacggcaagcucugcaagcuccgcggcgucgccccccuccaccucggcaagugcaacaucgccggcuggauccucggcaaccccgagugcgagucccucuccaccgccuccuccugguccuacaucgucgagaccuccuccuccgacaacggcaccugcuaccccggcgacuucaucaacuacgaggagcuccgcgagcagcucuccuccgucuccuccuucgagcgcuucgagaucuucuccaagaccuccuccuggcccaaccacgacuccaacaagggcgucaccgccgccugcccccacgccggcgccaaguccuucuacaagaaccucaucuggcucgucaagaagggcaacuccuaccccaagcucucccaguccuacaucaacgacaagggcaaggagguccucguccucuggggcauccaccaccccuccaccaccgccgaccagcagucccucuaccagaacgccgacgccuacgucuucgucggcaccucccgcuacuccaagaaguucaagcccgagaucgccauccgccccaagguccgcgaccaggagggccgcaugaacuacuacuggacccucgucgagcccggcgacaagaucaccuucgaggccaccggcaaccucgucgucccccgcuacgccuucaccauggagcgcaacgccggcuccggcaucaucaucuccgacacccccguccacgacugcaacaccaccugccagacccccgagggcgccaucaacaccucccuccccuuccagaacauccaccccaucaccaucggcaagugccccaaguacgucaaguccaccaagcuccgccucgccaccggccuccgcaacguccccuccauccagucccgcggccucuucggcgccaucgccggcuucaucgagggcggcuggaccggcauggucgacggcugguacggcuaccaccaccagaacgagcagggcuccggcuacgccgccgaccucaaguccacccagaacgccaucgacaagaucaccaacaaggucaacuccgucaucgagaagaugaacacccaguucaccgccgucggcaaggaguucaaccaccucgagaagcgcaucgagaaccucaacaagaaggucgacgacggcuuccucgacaucuggaccuacaacgccgagcuccucguccuccucgagaacgagcgcacccucgacuaccacgacuccaacgucaagaaccucuacgagaagguccgcaaccagcucaagaacaacgccaaggagaucggcaacggcugcuucgaguucuaccacaagugcgacaacaccugcauggaguccgucaagaacggcaccuacgacuaccccaaguacuccgaggaggccaagcucaaccgcgagaagaucgacggcgucaagcucgaguccacccgcaucuaccagauccucgccaucuacuccaccgucgccuccucccucguccucgucgucucccucggcgccaucuccuucuggaugugcuccaacggcucccuccagugccgcaucugcaucuga

SEQ ID NO: 108778 - RNA, 1701 nt, Artificial Sequence
  derived and/or modified CDS sequence (opt2) from hemagglutinin__InfluenzaA__AIM56579
augaaggccauccucgucguccuccucuacaccuucgccaccaccaacgccgacacccucugcaucggcuaccacgccaacaacuccaccgacaccgucgacaccguccucgagaagaacgucaccgucacccacuccgucaaccuccucgaggacgagcacaacggcaagcucugcaagcuccgcggcgucgccccccuccaccucggcaagugcaacaucgccggcuggauccucggcaaccccgagugcgagucccucuccaccgccuccuccugguccuacaucgucgagaccuccuccuccgacaacggcaccugcuaccccggcgacuucaucaacuacgaggagcuccgcgagcagcucuccuccgucuccuccuucgagcgcuucgagaucuuccccaagaccuccuccuggcccaaccacgacuccaacaagggcgucaccgccgccugcccccacgccggcgccaaguccuucuacaagaaccucaucuggcucgucaagaagggcaacuccuaccccaagcucucccaguccuacaucaacgacaagggcaaggagguccucguccucuggggcauccaccaccccuccaccaccgccgaccagcagucccucuaccagaacaccgacgccuacgucuucgucggcaccucccgcuacuccaagaaguucaagcccgagaucgccauccgccccaagguccgcgaccaggagggccgcauguccuacuacuggacccucgucgagcccggcgacaagaucaccuucgaggccaccggcaaccucgucgucccccgcuacgccuucaccauggagcgcaacgccggcuccggcaucaucaucuccgacacccccguccacgacugcaacaccaccugccagacccccgagggcgccaucaacaccucccuccccuuccagaacauccaccccaucaccaucggcaagugccccaaguacgucaaguccaccaagcuccgccucgccaccggccuccgcaacguccccuccauccagucccgcggccucuucggcgccaucgccggcuucaucgagggcggcuggaccggcauggucgacggcugguacggcuaccaccaccagaacgagcagggcuccggcuacgccgccgaccucaaguccacccagaacgccaucgacaagaucaccaacaaggucaacuccgucaucgagaagaugaacacccaguucaccgccgucggcaaggaguucaaccaccucgagaagcgcaucgagaaccucaacaagaaggucgacgacggcuuccucgacaucuggaccuacaacgccgagcuccucguccuccucgagaacgagcgcacccucgacuaccacgacuccaacgucaagaaccucuacgagaagguccgcaaccagcucaagaacaacgccaaggagaucggcaacggcugcuucgaguucuaccacaagugcgacaacaccugcauggaguccgucaagaacggcaccuacgacuaccccaaguacuccgaggaggccaagcucaaccgcgagaagaucgacggcgucaagcucgaguccacccgcaucuaccagauccucgccaucuacuccaccgucgccuccucccucguccucgucgucucccucggcgccaucuccuucuggaugugcuccaacggcucccuccagugccgcaucugcaucuga

SEQ ID NO: 108779 - RNA, 1710 nt, Artificial Sequence
  derived and/or modified CDS sequence (opt2) from hemagglutinin__InfluenzaA__AIM56590
augaaggccauccucgucguccuccucuacaccuucgccaccgccaacgccgacacccucugcaucggcuaccacgccaacaacuccaccgacaccgucgacaccguccucgagaagaacgucaccgucacccacuccgucaaccuccucgaggacaagcacaacggcaagcucugcaagcuccgcggcgucgccccccuccaccucggcaagugcaacaucgccggcuggauccucggcaaccccgagugcgagucccucuccaccgccuccuccugguccuacaucgucgagaccuccuccuccgacaacggcaccugcuaccccggcgacuucaucaacuacgaggagcuccgcgagcagcucuccuccgucuccuccuucgagcgcuucgagaucuuccccaagaccuccuccuggcccaaccacgacuccaacaagggcgucaccgccgccugcccccacgccggcgccaaguccuucuacaagaaccucaucuggcucgucaagaagggcaacuccuaccccaagcucucccaguccuacaucaacgacaagggcaaggagguccucguccucuggggcauccaccaccccuccaccaccgccgaccagcagucccucuaccagaacgccgacgccuacgucuucgucggcaccucccgcuacuccaagaaguucaagcccgagaucgccauccgccccaagguccgcgaccaggagggccgcaugaacuacuacuggacccucgucgagcccggcgacaagaucaccuucgaggccaccggcaaccucgucgucccccgcuacgccuucaccauggagcgcaacgccggcuccggcaucaucaucuccgacacccccguccacgacugcaacaccaccugccagacccccgagggcgccaucaacaccucccucaccucccuccccuuccagaacauccaccccaucaccaucggcaagugccccaaguacgucaaguccaccaagcuccgccucgccaccggccuccgcaacguccccuccauccagucccgcggccucuucggcgccaucgccggcuucaucgagggcggcuggaccggcauggucgacggcugguacggcuaccaccaccagaacgagcagggcuccggcuacgccgccgaccucaaguccacccagaacgccaucgacaagaucaccaacaaggucaacuccgucaucgagaagaugaacacccaguucaccgccgucggcaaggaguucaaccaccucgagaagcgcaucgagaaccucaacaagaaggucgacgacggcuuccucgacaucuggaccuacaacgccgagcuccucguccuccucgagaacgagcgcacccucgacuaccacgacuccaacgucaagaaccucuacgagaagguccgcaaccagcucaagaacaacgccaaggagaucggcaacggcugcuucgaguucuaccacaagugcgacgacaccugcauggaguccgucaagaacggcaccuacgacuaccccaaguacuccgaggaggccaagcucaaccgcgagaagaucgacggcgucaagcucgaguccacccgcaucuaccagauccucgccaucuacuccaccgucgccuccucccucguccucgucgucucccucggcgccaucuccuucuggaugugcuccaacggcucccuccagugccgcaucugcaucuga

SEQ ID NO: 108780 - RNA, 1710 nt, Artificial Sequence
  derived and/or modified CDS sequence (opt2) from hemagglutinin__InfluenzaA__AIM56601
augaaggccauccucgucguccuccucuacaccuucgccaccgccaacgccgacacccucugcaucggcuaccacgccaacaacuccaccgacaccgucgacaccguccucgagaagaacgucaccgucacccacuccgucaaccuccucgaggacaagcacaacggcaagcucugcaagcuccgcggcgucgccccccuccaccucggcaagugcaacaucgccggcuggauccucggcaaccccgagugcgagucccucuccaccgccuccuccugguccuacaucgucgagaccuccuccuccgacaacggcaccugcuaccccggcgacuucaucaacuacgaggagcuccgcgagcagcucuccuccgucuccuccuucgagcgcuucgagaucuuccccaagaccuccuccuggcccaaccacgacuccaacaagggcgucaccgccgccugcccccacgccggcgccaaguccuucuacaagaaccucaucuggcucgucaagaagggcaacuccuaccccaagcucucccaguccuacaucaacgacaagggcaaggagguccucguccucuggggcauccaccaccccuccaccaccgccgaccagcagucccucuaccagaacgccgacgccuacgucuucgucggcaccucccgcuacuccaagaaguucaagcccgagaucgccauccgccccaagguccgcgaccaggagggccgcaugaacuacuacuggacccucgucgagcccggcgacaagaucaccuucgaggccaccggcaaccucgucgucccccgcuacgccuucaccauggagcgcaacgccggcuccggcaucaucaucuccgacacccccguccacgacugcaacaccaccugccagacccccgagggcgccaucaacaccucccucaccucccuccccuuccagaacauccaccccaucaccaucggcaagugccccaaguacgucaaguccaccaagcuccgccucgccaccggccuccgcaacguccccuccauccagucccgcggccucuucggcgccaucgccggcuucaucgagggcggcuggaccggcauggucgacggcugguacggcuaccaccaccagaacgagcagggcuccggcuacgccgccgaccucaaguccacccagaacgccaucgacaagaucaccaacaaggucaacuccgucaucgagaagaugaacacccaguucaccgccgucggcaaggaguucaaccaccucgagaagcgcaucgagaaccucaacaagaaggucgacgacggcuuccucgacaucuggaccuacaacgccgagcuccucguccuccucgagaacgagcgcacccucgacuaccacgacuccaacgucaagaaccucuacgagaagguccgcaaccagcucaagaacaacgccaaggagaucggcaacggcugcuucgaguucuaccacaagugcgacaacaccugcauggaguccgucaagaacggcaccuacgacuaccccaaguacuccgaggaggccaagcucaaccgcgagaagaucgacggcgucaagcucgaguccacccgcaucuaccagauccucgccaucuacuccaccgucgccuccucccucguccucgucgucucccucggcgccaucuccuucuggaugugcuccaacggcucccuccagugccgcaucugcaucuga

SEQ ID NO: 108781 - RNA, 1710 nt, Artificial Sequence
  derived and/or modified CDS sequence (opt2) from hemagglutinin__InfluenzaA__AIM56612
augaaggccauccucgucguccuccucuacaccuucgccaccgccaacgccgacacccucugcaucggcuaccacgccaacaacuccaccgacaccgucgacaccguccucgagaagaacgucaccgucacccacuccgucaaccuccucgaggacaagcacaacggcaagcucugcaagcuccgcggcgucgccccccuccaccucggcaagugcaacaucgccggcuggauccucggcaaccccgagugcgagucccucuccaccgccuccuccugguccuacaucgucgagaccuccuccuccgacaacggcaccugcuaccccggcgacuucaucaacuacgaggagcuccgcgagcagcucuccuccgucuccuccuucgagcgcuucgagaucuuccccaagaccuccuccuggcccaaccacgacuccaacaagggcgucaccgccgccugcccccacgccggcgccaaguccuucuacaagaaccucaucuggcucgucaagaagggcaacuccuaccccaagcucucccaguccuacaucaacgacaagggcaaggagguccucguccucuggggcauccaccaccccuccaccaccgccgaccagcagucccucuaccagaacgccgacgccuacgucuucgucggcaccucccgcuacuccaagaaguucaagcccgagaucgccauccgccccaagguccgcgaccaggagggccgcaugaacuacuacuggacccucgucgagcccggcgacaagaucaccuucgaggccaccggcaaccucgucgucccccgcuacgccuucaccauggagcgcaacaccggcuccggcaucaucaucuccgacacccccguccacgacugcaacaccaccugccagacccccgagggcgccaucaacaccucccucaccucccuccccuuccagaacauccaccccaucaccaucggcaagugccccaaguacgucaaguccaccaagcuccgccucgccaccggccuccgcaacguccccuccauccagucccgcggccucuucggcgccaucgccggcuucaucgagggcggcuggaccggcauggucgacggcugguacggcuaccaccaccagaacgagcagggcuccggcuacgccgccgaccucaaguccacccagaacgccaucgacaagaucaccaacaaggucaacuccgucaucgagaagaugaacacccaguucaccgccgucggcaaggaguucaaccaccucgagaagcgcaucgagaaccucaacaagaaggucgacgacggcuuccucgacaucuggaccuacaacgccgagcuccucguccuccucgagaacgagcgcacccucgacuaccacgacuccaacgucaagaaccucuacgagaagguccgcaaccagcucaagaacaacgccaaggagaucggcaacggcugcuucgaguucuaccacaagugcgacaacaccugcauggaguccgucaagaacggcaccuacgacuaccccaaguacuccgaggaggccaagcucaaccgcgagaagaucgacggcgucaagcucgaguccacccgcaucuaccagauccucgccaucuacuccaccgucgccuccucccucguccucgucgucucccucggcgccaucuccuucuggaugugcuccaacggcucccuccagugccgcaucugcaucuga

SEQ ID NO: 108782 - RNA, 1701 nt, Artificial Sequence
  derived and/or modified CDS sequence (opt2) from hemagglutinin__InfluenzaA__AIM56623
augaaggccauccucgucguccuccucuacaccuucgccaccgccaacgccgacacccucugcaucggcuaccacgccaacaacuccaccgacaccgucgacaccguccucgagaagaacgucaccgucacccacuccgucaaccuccucgaggacaagcacaacggcaagcucugcaagcuccgcggcgucgccccccuccaccucggcaagugcaacaucgccggcuggauccucggcaaccccgagugcgagucccucuccaccgccuccuccugguccuacaucgucgagaccuccuccuccgacaacggcaccugcuaccccggcgacuucaucaacuacgaggagcuccgcgagcagcucuccuccgucuccuccuucgagcgcuucgagaucuuccccaagaccuccuccuggcccaaccacgacuccaacaagggcgucaccgccgccugcccccacgccggcgccaaguccuucuacaagaaccucaccuggcucgucaagaagggcaacuccuaccccaagcucucccaguccuacaucaacgacaagggcaaggagguccucguccucuggggcauccaccaccccuccaccaccgccgaccagcagucccucuaccagaacgccgacgccuacgucuucgucggcaccucccgcuacuccaagaaguucaagcccgagaucgccauccgccccaagguccgcgaccaggagggccgcaugaacuacuacuggacccucgucgagcccggcgacaagaucaccuucgaggccaccggcaaccucgucgucccccgcuacgccuucaccauggagcgcaacgccggcuccggcaucaucaucuccgacacccccguccacgacugcaacaccaccugccagacccccgagggcgccaucaacaccucccuccccuuccagaacauccaccccaucaccaucggcaagugccccaaguacgucaaguccaccaagcuccgccucgccaccggccuccgcaacguccccuccauccagucccgcggccucuucggcgccaucgccggcuucaucgagggcggcuggaccggcauggucgacggcugguacggcuaccaccaccagaacgagcagggcuccggcuacgccgccgaccucaaguccacccagaacgccaucgacaagaucaccaacaaggucaacuccgucaucgagaagaugaacacccaguucaccgccgucggcaaggaguucaaccaccucgagaagcgcaucgagaaccucaacaagaaggucgacgacggcuuccucgacaucuggaccuacaacgccgagcuccucguccuccucgagaacgagcgcacccucgacuaccacgacuccaacgucaagaaccucuacgagaagguccgcaaccagcucaagaacaacgccaaggagaucggcaacggcugcuucgaguucuaccacaagugcgacaacaccugcauggaguccgucaagaacggcaccuacgacuaccccaaguacuccgaggaggccaagcucaaccgcgagaagaucgacggcgucaagcucgaguccacccgcaucuaccagauccucgccaucuacuccaccgucgccuccucccucguccucgucgucucccucggcgccaucuccuucuggaugugcuccaacggcucccuccagugccgcaucugcaucuga

SEQ ID NO: 108783 - RNA, 1701 nt, Artificial Sequence
  derived and/or modified CDS sequence (opt2) from hemagglutinin__InfluenzaA__AIM56634
augaaggccauccucgucguccuccucuacaccuucgccaccgccaacgccgacacccucugcaucggcuaccacgccaacaacuccaccgacaccgucgacaccguccucgagaagaacgucaccgucacccacuccgucaaccuccucgaggacaagcacaacggcaagcucugcaagcuccgcggcgucgccccccuccaccucggcaagugcaacaucgccggcuggauccucggcaaccccgagugcgagucccucuccaccgccaacuccugguccuacaucgucgagaccuccuccuccgacaacggcaccugcuaccccggcgacuucaucaacuacgaggagcuccgcgagcagcucuccuccgucuccuccuucgagcgcuucgagaucuuccccaagaccuccuccuggcccaaccacgacuccaacaagggcgucaccgccgccugcccccacgccggcgccaaguccuucuacaagaaccucaucuggcucgucaagaagggcaacuccuaccccaagcucucccaguccuacaucaacgacaagggcaaggagguccucguccucuggggcauccaccaccccuccaccaccgccgaccagcagucccucuaccagaacgccgacgccuacgucuucgucggcaccucccgcuacuccaagaaguucaagcccgagaucgccauccgccccaagguccgcgaccaggagggccgcaugaacuacuacuggacccucgucgagcccggcgacaagaucaccuucgaggccaccggcaaccucgucgucccccgcuacgccuucaccauggagcgcaacgccggcuccggcaucaucaucuccgacacccccguccacgacugcaacaccaccugccagacccccgagggcgccaucaacaccucccuccccuuccagaacauccaccccaucaccaucggcaagugccccaaguacgucaaguccaccaagcuccgccucgccaccggccuccgcaacguccccuccauccagucccgcggccucuucggcgccaucgccggcuucaucgagggcggcuggaccggcauggucgacggcugguacggcuaccaccaccagaacgagcagggcuccggcuacgccgccgaccucaaguccacccagaacgccaucgacaagaucaccaacaaggucaacuccgucaucgagaagaugaacacccaguucaccgccgucggcaaggaguucaaccaccucgagaagcgcaucgagaaccucaacaagaaggucgacgacggcuuccucgacaucuggaccuacaacgccgagcuccucguccuccucgagaacgagcgcacccucgacuaccacgacuccaacgucaagaaccucuacgagaagguccgcaaccagcucaagaacaacgccaaggagaucggcaacggcugcuucgaguucuaccacaagugcgacaacaccugcauggaguccgucaagaacggcaccuacgacuaccccaaguacuccgaggaggccaagcucaaccgcgagaagaucgacggcgucaagcucgaguccacccgcaucuaccagauccucgccaucuacuccaccgucgccuccucccucguccucgucgucucccucggcgccaucuccuucuggaugugcuccaacggcucccuccagugccgcaucugcaucuga

SEQ ID NO: 108784 - RNA, 1710 nt, Artificial Sequence
  derived and/or modified CDS sequence (opt2) from hemagglutinin__InfluenzaA__AIM56645
augaaggccauccucgucguccuccucuacaccuucgccaccgccaacgccgacacccucugcaucggcuaccacgccaacaacuccaccgacaccgucgacaccguccucgagaagaacgucaccgucacccacuccgucaaccuccucgaggacaagcacaacggcaagcucugcaagcuccgcggcgucgccccccuccaccucggcaagugcaacaucgccggcuggauccucggcaaccccgagugcgagucccucuccaccgccuccuccugguccuacaucgucgagaccuccuccuccgacaacggcaccugcuaccccggcgacuucaucaacuacgaggagcuccgcgagcagcucuccuccgucuccuccuucgagcgcuucgagaucuuccccaagaccuccuccuggcccaaccacgacuccaacaagggcgucaccgccgccugcccccacgccggcgccaaguccuucuacaagaaccucaucuggcucgucaagaagggcaacuccuaccccaagcucucccaguccuacaucaacgacaagggcaaggagguccucguccucuggggcauccaccaccccuccaccaccgccgaccagcagucccucuaccagaacgccgacgccuacgucuucgucggcaccucccgcuacuccaagaaguucaagcccgagaucgccauccgccccaagguccgcgaccaggagggccgcaugaacuacuacuggacccucgucgagcccggcgacaagaucaccuucgaggccaccggcaaccucgucgucccccgcuacgccuucaccauggagcgcaacgccggcuccggcaucaucaucuccgacacccccguccacgacugcaacaccaccugccagacccccgagggcgccaucaacaccucccucaccucccuccccuuccagaacauccaccccaucaccaucggcaagugccccaaguacgucaaguccaccaagcuccgccucgccaccggccuccgcaacguccccuccauccagucccgcggccucuucggcgccaucgccggcuucaucgagggcggcuggaccggcauggucgacggcugguacggcuaccaccaccagaacgagcagggcuccggcuacgccgccgaccagaaguccacccagaacgccaucgacaagaucaccaacaaggucaacuccgucaucgagaagaugaacacccaguucaccgccgucggcaaggaguucaaccaccucgagaagcgcaucgagaaccucaacaagaaggucgacgacggcuuccucgacaucuggaccuacaacgccgagcuccucguccuccucgagaacgagcgcacccucgacuaccacgacuccaacgucaagaaccucuacgagaagguccgcaaccagcucaagaacaacgccaaggagaucggcaacggcugcuucgaguucuaccacaagugcgacaacaccugcauggaguccgucaagaacggcaccuacgacuaccccaaguacuccgaggaggccaagcucaaccgcgagaagaucgacggcgucaagcucgaguccacccgcaucuaccagauccucgccaucuacuccaccgucgccuccucccucguccucgucgucucccucggcgccaucuccuucuggaugugcuccaacggcucccuccagugccgcaucugcaucuga

SEQ ID NO: 108785 - RNA, 1701 nt, Artificial Sequence
  derived and/or modified CDS sequence (opt2) from hemagglutinin__InfluenzaA__AIM56656
augaaggccauccucgucguccuccucuacaccuucgccaccgccaacgccgacacccucugcaucggcuaccacgccaacaacuccaccgacaccgucgacaccguccucgagaagaacgucaccgucacccacuccgucaaccuccucgaggacaagcacaacggcaagcucugcaagcuccgcggcgucgccccccuccaccucggcaagugcaacaucgccggcuggauccucggcaaccccgagugcgagucccucuccaccgccuccuccugguccuacaucgucgagaccuccuccuccgacaacggcaccugcuaccccggcgacuucaucaacuacgaggagcuccgcgagcagcucuccuccgucuccuccuucgagcgcuucgagaucuuccccaagaccaacuccuggcccaaccacgacuccaacaagggcgucaccgccgccugcccccacgccggcgccaaguccuucuacaagaaccucaucuggcucgucaagaagggcaacuccuaccccaagcucucccaguccuacaucaacgacaagggcaaggagguccucguccucuggggcauccaccaccccuccaccaccgccgaccagcagucccucuaccagaacgccgacgccuacgucuucgucggcaccucccgcuacuccaagaaguucaagcccgagaucgccauccgccccaagguccgcgaccaggagggccgcaugaacuacuacuggacccucgucgagcccggcgacaagaucaccuucgaggccaccggcaacaucgucgucccccgcuacgccuucaccauggagcgcaacgccggcuccggcaucaucaucuccgacacccccguccacgacugcaacaccaccugccagacccccgagggcgccaucaacaccucccuccccuuccagaacauccaccccaucaccaucggcaagugccccaaguacgucaaguccaccaagcuccgccucgccaccggccuccgcaacguccccuccauccagucccgcggccucuucggcgccaucgccggcuucaucgagggcggcuggaccggcauggucgacggcugguacggcuaccaccaccagaacgagcagggcuccggcuacgccgccgaccucaaguccacccagaacgccaucgacaagaucaccaacaaggucaacuccgucaucgagaagaugaacacccaguucaccgccgucggcaaggaguucaaccaccucgagaagcgcaucgagaaccucaacaagaaggucgacgacggcuuccucgacaucuggaccuacaacgccgagcuccucguccuccucgagaacgagcgcacccucgacuaccacgacuccaacgucaagaaccucuacgagaagguccgcaaccagcucaagaacaacgccaaggagaucggcaacggcugcuucgaguucuaccacaagugcgacaacaccugcauggaguccgucaagaacggcaccuacgacuaccccaaguacuccgaggaggccaagcucaaccgcgagaagaucgacggcgucaagcucgaguccacccgcaucuaccagauccucgccaucuacuccaccgucgccuccucccucguccucgucgucucccucggcgccaucuccuucuggaugugcuccaacggcucccuccagugccgcaucugcaucuga

SEQ ID NO: 108786 - RNA, 1701 nt, Artificial Sequence; identical to SEQ ID NO: 106076
  derived and/or modified CDS sequence (opt2) from hemagglutinin__InfluenzaA__AIM56667

SEQ ID NO: 108787 - RNA, 1701 nt, Artificial Sequence
  derived and/or modified CDS sequence (opt2) from hemagglutinin__InfluenzaA__AIM56678
augaaggccauccucgucguccuccucuacaccuucgccaccgccaacgccgacacccucugcaucggcuaccacgccaacaacuccaccgacaccgucgacaccguccucgagaagaacgucaccgucacccacuccgucaaccuccucgaggacaagcacaacggcaagcucugcaagcuccgcggcguccccccccuccaccucggcaagugcaacaucgccggcuggauccucggcaaccccgagugcgagucccucuccaccgccuccuccugguccuacaucgucgagaccuccuccuccgacaacggcaccugcuaccccggcgacuucaucaacuacgaggagcuccgcgagcagcucuccuccgucuccuccuucgagcgcuucgagaucuuccccaagaccuccuccuggcccaaccacgacuccaacaagggcgucaccgccgccugcccccacgccggcgccaaguccuucuacaagaaccucaucuggcucgucaagaagggcaacuccuaccccaagcucucccaguccuacaucaacgacaagggcaaggagguccucguccucuggggcauccaccaccccuccaccaccgccgaccagcagucccucuaccagaacgccgacgccuacgucuucgucggcaccucccgcuacuccaagaaguucaagcccgagaucgccauccgccccaagguccgcgaccaggagggccgcaugaacuacuacuggacccucgucgagcccggcgacaagaucaccuucgaggccaccggcaaccucgucgucccccgcuacgccuucaccauggagcgcaacgccggcuccggcaucaucaucuccgacacccccguccacgacugcaacaccaccugccagacccccgagggcgccaucaacaccucccuccccuuccagaacauccaccccaucaccaucggcaagugccccaaguacgucaaguccaccaagcuccgccucgccaccggccuccgcaacguccccuccauccagucccgcggccucuucggcgccaucgccggcuucaucgagggcggcuggaccggcauggucgacggcugguacggcuaccaccaccagaacgagcagggcuccggcuacgccgccgaccucaaguccacccagaacgccaucgacaagaucaccaacaaggucaacuccgucaucgagaagaugaacacccaguucaccgccgucggcaaggaguucaaccaccucgagaagcgcaucgagaaccucaacaagaaggucgacgacggcuuccucgacaucuggaccuacaacgccgagcuccucguccuccucgagaacgagcgcacccucgacuaccacgacuccaacgucaagaaccucuacgagaagguccgcaaccagcucaagaacaacgccaaggagaucggcaacggcugcuucgaguucuaccacaagugcgacaacaccugcauggaguccgucaagaacggcaccuacgacuaccccaaguacuccgaggaggccaagcucaaccgcgagaagaucgacggcgucaagcucgaguccacccgcaucuaccagauccucgccaucuacuccaccgucgccuccucccucguccucgucgucucccucggcgccaucuccuucuggaugugcuccaacggcucccuccagugccgcaucugcaucuga

SEQ ID NO: 108788 - RNA, 1701 nt, Artificial Sequence; identical to SEQ ID NO: 108424
  derived and/or modified CDS sequence (opt2) from hemagglutinin__InfluenzaA__AIM56689

SEQ ID NO: 108789 - RNA, 1701 nt, Artificial Sequence; identical to SEQ ID NO: 106076
  derived and/or modified CDS sequence (opt2) from hemagglutinin__InfluenzaA__AIM56700

SEQ ID NO: 108790 - RNA, 1710 nt, Artificial Sequence
  derived and/or modified CDS sequence (opt2) from hemagglutinin__InfluenzaA__AIM56711
augaaggccauccucgucguccuccucuacaccuucgccaccgccaacgccgacacccucugcaucggcuaccacgccaacaacuccaccgacaccgucgacaccguccucgagaagaacgucaccgucacccacuccgucaaccuccucgaggacaagcacaacggcaagcucugcaagcuccgcggcguccccccccuccaccucggcaagugcaacaucgccggcuggauccucggcaaccccgagugcgagucccucuccaccgccuccuccugguccuacaucgucgagaccuccuccuccgacaacggcaccugcuaccccggcgacuucaucaacuacgaggagcuccgcgagcagcucuccuccgucuccuccuucgagcgcuucgagaucuuccccaagaccuccuccuggcccaaccacgacuccaacaagggcgucaccgccgccugcccccacgccggcgccaaguccuucuacaagaaccucaucuggcucgucaagaagggcaacuccuaccccaagcucucccaguccuacaucaacgacaagggcaaggagguccucguccucuggggcauccaccaccccuccaccaccgccgaccagcagucccucuaccagaacgccgacgccuacgucuucgucggcaccucccgcuacuccaagaaguucaagcccgagaucgccauccgccccaagguccgcgaccaggagggccgcaugaacuacuacuggacccucgucgagcccggcgacaagaucaccuucgaggccaccggcaaccucgucgucccccgcuacgccuucaccauggagcgcaacgccggcuccggcaucaucaucuccgacacccccguccacgacugcaacaccaccugccagacccccgagggcgccaucaacaccucccucaccucccuccccuuccagaacauccaccccaucaccaucggcaagugccccaaguacgucaaguccaccaagcuccgccucgccaccggccuccgcaacguccccuccauccagucccgcggccucuucggcgccaucgccggcuucaucgagggcggcuggaccggcauggucgacggcugguacggcuaccaccaccagaacgagcagggcuccggcuacgccgccgaccucaaguccacccagaacgccaucgacaagaucaccaacaaggucaacuccgucaucgagaagaugaacacccaguucaccgccgucggcaaggaguucaaccaccucgagaagcgcaucgagaaccucaacaagaaggucgacgacggcuuccucgacaucuggaccuacaacgccgagcuccucguccuccucgagaacgagcgcacccucgacuaccacgacuccaacgucaagaaccucuacgagaagguccgcaaccagcucaagaacaacgccaaggagaucggcaacggcugcuucgaguucuaccacaagugcgacaacaccugcauggaguccgucaagaacggcaccuacgacuaccccaaguacuccgaggaggccaagcucaaccgcgagaagaucgacggcgucaagcucgaguccacccgcaucuaccagauccucgccaucuacuccaccgucgccuccucccucguccucgucgucucccucggcgccaucuccuucuggaugugcuccaacggcucccuccagugccgcaucugcaucuga

SEQ ID NO: 108791 - RNA, 1701 nt, Artificial Sequence; identical to SEQ ID NO: 108424
  derived and/or modified CDS sequence (opt2) from hemagglutinin__InfluenzaA__AIM56722

SEQ ID NO: 108792 - RNA, 1701 nt, Artificial Sequence; identical to SEQ ID NO: 106076
  derived and/or modified CDS sequence (opt2) from hemagglutinin__InfluenzaA__AIM56733

SEQ ID NO: 108793 - RNA, 1701 nt, Artificial Sequence; identical to SEQ ID NO: 106076
  derived and/or modified CDS sequence (opt2) from hemagglutinin__InfluenzaA__AIM56744

SEQ ID NO: 108794 - RNA, 1701 nt, Artificial Sequence
  derived and/or modified CDS sequence (opt2) from hemagglutinin__InfluenzaA__AIM56755
augaaggccauccucgucguccuccucuacaccuucgccaccgccaacgccgacacccucugcaucggcuaccacgccaacaacuccaccgacaccgucgacaccguccucgagaagaacgucaccgucacccacuccgucaaccuccucgaggacaagcacaacggcaagcucugcaagcuccgcggcgucgccccccuccaccucggcaagugcaacaucgccggcuggauccucggcaaccccgagugcgagucccucuccaccgccuccuccugguccuacaucgucgagaccuccuccuccgacaacggcaccugcuaccccggcgacuucaucaacuacgaggagcuccgcgagcagcucuccuccgucuccuccuucgagcgcuucgagaucuuccccaagaccuccuccuggcccucccacgacuccaacaagggcgucaccgccgccugcccccacgccggcgccaaguccuucuacaagaaccucaucuggcucgucaagaagggcaacuccuaccccaagcucucccaguccuacaucaacgacaagggcaaggagguccucguccucuggggcauccaccaccccuccaccaccgccgaccagcagucccucuaccagaacgccgacgccuacgucuucgucggcaccucccgcuacuccaagaaguucaagcccgagaucgccauccgccccaagguccgcgaccaggagggccgcaugaacuacuacuggacccucgucgagcccggcgacaagaucaccuucgaggccaccggcaaccucgucgucccccgcuacgccuucaccauggagcgcaacgccggcuccggcaucaucaucuccgacacccccguccacgacugcaacaccaccugccagacccccgagggcgccaucaacaccucccuccccuuccagaacauccaccccaucaccaucggcaagugccccaaguacgucaaguccaccaagcuccgccucgccaccggccuccgcaacguccccuccauccagucccgcggccucuucggcgccaucgccggcuucaucgagggcggcuggaccggcauggucgacggcugguacggcuaccaccaccagaacgagcagggcuccggcuacgccgccgaccucaaguccacccagaacgccaucgacaagaucaccaacaaggucaacuccgucaucgagaagaugaacacccaguucaccgccgucggcaaggaguucaaccaccucgagaagcgcaucgagaaccucaacaagaaggucgacgacggcuuccucgacaucuggaccuacaacgccgagcuccucguccuccucgagaacgagcgcacccucgacuaccacgacuccaacgucaagaaccucuacgagaagguccgcaaccagcucaagaacaacgccaaggagaucggcaacggcugcuucgaguucuaccacaagugcgacaacaccugcauggaguccgucaagaacggcaccuacgacuaccccaaguacuccgaggaggccaagcucaaccgcgagaagaucgacggcgucaagcucgaguccacccgcaucuaccagauccucgccaucuacuccaccgucgccuccucccucguccucgucgucucccucggcgccaucuccuucuggaugugcuccaacggcucccuccagugccgcaucugcaucuga

SEQ ID NO: 108795 - RNA, 1710 nt, Artificial Sequence; identical to SEQ ID NO: 108780
  derived and/or modified CDS sequence (opt2) from hemagglutinin__InfluenzaA__AIM56766

SEQ ID NO: 108796 - RNA, 1701 nt, Artificial Sequence
  derived and/or modified CDS sequence (opt2) from hemagglutinin__InfluenzaA__AIM56777
augaaggccauccucgucguccuccucuacaccuucgccaccgccaacgccgacacccucugcaucggcuaccacgccaacaacuccaccgacaccgucgacaccguccucgagaagaacgucaccgucacccacuccgucaaccuccucgagggcaagcacaacggcaagcucugcaagcuccgcggcgucgccccccuccaccucggcaagugcaacaucgccggcuggauccucggcaaccccgagugcgagucccucuccaccgccuccuccugguccuacaucgucgagaccuccuccuccgacaacggcaccugcuaccccggcgacuucaucaacuacgaggagcuccgcgagcagcucuccuccgucuccuccuucgagcgcuucgagaucuuccccaagaccuccuccuggcccaaccacgacuccaacaagggcgucaccgccgccugcccccacgccggcgccaaguccuucuacaagaaccucaucuggcucgucaagaagggcaacuccuaccccaagcucucccaguccuacaucaacgacaagggcaaggagguccucguccucuggggcauccaccaccccuccaccaccgccgaccagcagucccucuaccagaacgccgacgccuacgucuucgucggcaccucccgcuacuccaagaaguucaagcccgagaucgccauccgccccaagguccgcgaccaggagggccgcaugaacuacuacuggacccucgucgagcccggcgacaagaucaccuucgaggccaccggcaaccucgucgucccccgcuacgccuucaccauggagcgcaacgccggcuccggcaucaucaucuccgacacccccguccacgacugcaacaccaccugccagacccccgagggcgccaucaacaccucccuccccuaccagaacauccaccccaucaccaucggcaagugccccaaguacgucaaguccaccaagcuccgccucgccaccggccuccgcaacguccccuccauccagucccgcggccucuucggcgccaucgccggcuucaucgagggcggcuggaccggcauggucgacggcugguacggcuaccaccaccagaacgagcagggcuccggcuacgccgccgaccucaaguccacccagaacgccaucgacaagaucaccaacaaggucaacuccgucaucgagaagaugaacacccaguucaccgccgucggcaaggaguucaaccaccucgagaagcgcaucgagaaccucaacaagaaggucgacgacggcuuccucgacaucuggaccuacaacgccgagcuccucguccuccucgagaacgagcgcacccucgacuaccacgacuccaacgucaagaaccucuacgagaagguccgcaaccagcucaagaacaacgccaaggagaucggcaacggcugcuucgaguucuaccacaagugcgacaacaccugcauggaguccgucaagaacggcaccuacgacuaccccaaguacuccgaggaggccaagcucaaccgcgagaagaucgacggcgucaagcucgaguccacccgcaucuaccagauccucgccaucuacuccaccgucgccuccucccucguccucgucgucucccucggcgccaucuccuucuggaugugcuccaacggcucccuccagugccgcaucugcaucuga

SEQ ID NO: 108797 - RNA, 1701 nt, Artificial Sequence; identical to SEQ ID NO: 106076
  derived and/or modified CDS sequence (opt2) from hemagglutinin__InfluenzaA__AIM56788

SEQ ID NO: 108798 - RNA, 1701 nt, Artificial Sequence; identical to SEQ ID NO: 106076
  derived and/or modified CDS sequence (opt2) from hemagglutinin__InfluenzaA__AIM56799

SEQ ID NO: 108799 - RNA, 1701 nt, Artificial Sequence; identical to SEQ ID NO: 106076
  derived and/or modified CDS sequence (opt2) from hemagglutinin__InfluenzaA__AIM56810

SEQ ID NO: 108800 - RNA, 1701 nt, Artificial Sequence; identical to SEQ ID NO: 106076
  derived and/or modified CDS sequence (opt2) from hemagglutinin__InfluenzaA__AIM56821

SEQ ID NO: 108801 - RNA, 1683 nt, Artificial Sequence
  derived and/or modified CDS sequence (opt2) from hemagglutinin__InfluenzaA__AIN76383
augaacacccagauccucgucuucgcccucaucgccaucguccccaccaacgccgacaagaucugccucggccaccacgccgucuccaacggcaccaaggucaacacccucaccgagcgcggcgucgaggucgucaacgccaccgagaccgucgagcgcaccaacaucccccgcaucugcuccaagggcaagaagaccgucgaccucggccagugcggccuccucggcaccaucaccggccccccccagugcgaccaguuccucgaguucuccgccgaccucaucaucgagcgccgcgagggcuccgacgucugcuaccccggcaaguucgucaacgaggaggcccuccgccagauccuccgcgaguccggcggcaucgacaaggaggccaugggcuucaccuacuccggcauccgcaccaacggcaccaccuccgccugccgccgcuccggcuccuccuucuacgccgagaugaaguggcuccucuccaacaccgacaacgccgccuucccccagaugaccaaguccuacaagaacacccgcaagucccccgcccucaucgucuggggcauccaccacuccgucuccaccgccgagcagaccaagcucuacggcuccggcaacaagcucgucaccgucggcuccuccaacuaccagcaguccuucguccccucccccggcgcccgcccccaggucaacggccucuccggccgcaucgacuuccacuggcucaugcucaaccccaacgacaccgucaccuucuccuucaacggcgccuucaucgcccccgaccgcgccuccuuccuccgcggcaaguccaugggcauccaguccggcguccaggucgacgccaacugcgagggcgacugcuaccacuccggcggcaccaucaucuccaaccuccccuuccagaacaucgacucccgcgccgucggcaagugcccccgcuacgucaagcagaagucccuccuccucgccaccggcaugaagaacguccccgagauccccaagggccgcggccucuucggcgccaucgccggcuucaucgagaacggcugggagggccucaucgacggcugguacggcuuccgccaccagaacgcccagggcgagggcaccgccgccgacuacaaguccacccaguccgccaucgaccagaucaccggcaagcucaaccgccucaucgagaagaccaaccagcaguucgagcucaucgacaacgaguucaacgaggucgagaagcagaucggcaacgucaucaacuggacccgcgacuccaucaccgaggucugguccuacaacgccgagcuccucgucgccauggagaaccagcacaccaucgaccucgccgacuccgagauggacaagcucuacgagcgcgucaagcgccagcuccgcgagaacgccgaggaggacggcaccggcugcuucgagaucuuccacaagugcgacgacgacugcauggccuccauccgcaacaacaccuacgaccacuccaaguaccgcgaggaggccaugcagaaccgcauccagaucgaccccgucaagcucuccuccggcuacaaggacgucauccucugguucuccuucggcgccuccugcuucauccuccucgccaucgucaugggccucgucuucaucugcgucaagaacggcaacaugcgcugcaccaucugcaucuga

SEQ ID NO: 108802 - RNA, 1689 nt, Artificial Sequence
  derived and/or modified CDS sequence (opt2) from hemagglutinin__InfluenzaA__AIP93103
auggccaucaucuaccucauccuccucuucaccgccguccgcggcgaccagaucugcaucggcuaccacgccaacaacuccaccgagaaggucgacaccauccucgagcgcaacgucaccgucacccacgccaaggacauccucgagaagacccacaacggcaagcucugcaagcucaacggcauccccccccucgagcucggcgacugcuccaucgccggcuggcuccucggcaaccccgagugcgaccgccuccuccgcguccccgagugguccuacaucauggagaaggagaacccccgcuacucccucugcuaccccggcuccuucaacgacuacgaggagcucaagcaccuccucuccuccgucaagcacuucgagaaggucaagauccuccccaaggacggcuggacccagcacgagaccgacggcggcuccaaggccugcgccgucuccggcaagcccuccuucuuccgcaacauggucuggcucaccaagaagggccccaacuaccccgucgccaagcgcuccuacaacaacaccuccggcgagcagaugcucaucaucuggggcguccaccaccccaacgacgaggccgagcagcgcgcccucuaccagaacgucggcaccuacgucuccgccuccaccuccacccucaacaagcgcuccacccccgagaucgccgcccgccccaaggucuccggccucggcucccgcauggaguucuccuggacccuccucgacgucugggacaccaucuccuucgaguccaccggcaaccucgucgcccccgaguacggcuucaagaucuccaagcgcggcuccuccggcaucaugaagaccgagggcacccucggcaacugcgagaccaagugccagaccccccucggcgccaucaacaccacccuccccuuccacaacguccacccccucaccaucggcgagugccccaaguacgucaaguccgagaagcucguccucgccaccggcccccgcaacgucccccagaucgagucccgcggccucuucggcgccaucgccggcuucaucgagggcggcuggcagggcauggucgacggcugguacggcuaccaccacuccaacgaccagggcuccggcuacgccgccgacaaggaguccacccagaaggccuucgaccgcaucaccaacaaggucaacuccgucaucgagaagaugaacacccaguucgaggccgucggcaaggaguucuccaaccucgagaagcgccucgagaaccucaacaagaagauggaggacggcuuccucgacgucuggaccuacaacgccgagcuccucguccucauggagaacgagcgcacccucgacuuccacgacuccaacgucaagaaccucuacgacaagguccgcaugcagcuccgcgacaacgucaaggagcucggcaacggcugcuucgaguucuaccacaagugcgacgacgagugcaugaacuccgucaagaacggcaccuacgacuaccccaaguacgaggaggaguccaagcucaagcgcaacgagaucaagggcgucaagcucuccuccaugggcgucuaccagauccucgccaucuacgccaccgucgccggcucccucucccucgccaucaugaucgccggcaucuccuucuggaugugcuccaacggcucccuccagugccgcaucugcaucuga

SEQ ID NO: 108803 - RNA, 1689 nt, Artificial Sequence; identical to SEQ ID NO: 97691
  derived and/or modified CDS sequence (opt2) from hemagglutinin__InfluenzaA__AIP93115

SEQ ID NO: 108804 - RNA, 1701 nt, Artificial Sequence
  derived and/or modified CDS sequence (opt2) from hemagglutinin__InfluenzaA__AIR93971
augaaggccauccucgucguccuccucuacaccuucgccaccaccaacgccgacauccucugcaucggcuaccacgccaacaacuccaccgacaccgucgacaccguccucgagaagaacgucaccgucacccacuccgucaaccuccucgaggacaagcacaacggcaagcucugcaagcuccgcggcgucgccccccuccaccucggcaagugcaacaucgccggcuggauccucggcaaccccgagugcgagucccucuccaccgccuccuccugguccuacaucgucgagaccuccuccuccgacaacggcaccugcuaccccggcgacuucaucgacuacgaggagcuccgcgagcagcucuccuccgucuccuccuucgagcgcuucgagaucuuccccaagaccuccuccuggcccaaccacgacuccaacaagggcgucaccgccgccugcccccacgccggcgcccgcuccuucuacaagaaccucaucuggcucgucaagaagggcaacuccuaccccaagcucuccaaguccuacaucaacgacaagggcaaggagguccucguccucuggggcauccaccaccccuccaccuccgccgaccagcagucccucuaccagaacgccgacgccuacgucuucgucggcaccucccgcuacuccaagaaguucaagcccgagaucgccauccgccccaagguccgcgaccgcgagggccgcaugaacuacuacuggacccucgucgagcccggcgacaagaucaccuucgaggccaccggcaaccucgucgucccccgcuacgccuucgccauggagcgcaacgccggcuccggcaucaucaccuccgacacccccguccacgacugcaacaccaccugccagacccccaagggcgccaucaacaccucccuccccuuccagaacauccaccccaucaccaucggcaagugccccaaguacgucaaguccaccaagcuccgccucgccaccggccuccgcaacguccccuccauccagucccgcggccucuucggcgccaucgccggcuucaucgagggcggcuggaccggcauggucgacggcugguacggcuaccaccaccagaacgagcagggcuccggcuacgccgccgaccucaaguccacccagaacgccaucgacgagaucaccaacaaggucaacuccgucaucgagaagaugaacacccaguucaccgccgucggcaaggaguucaaccaccucgagaagcgcaucgagaaccucaacaagaaggucgacgacggcuuccucgacaucuggaccuacaacgccgagcuccucguccuccucgagaacgagcgcacccucgacuaccacgacuccaacgucaagaaccucuacgagaagguccgcucccagcucaagaacaacgccaaggagaucggcaacggcugcuucgaguucuaccacaagugcgacaacaccugcauggaguccgucaagaacggcaccuacgacuaccccaaguacuccgaggaggccaagcucaaccgcgaggagaucgacggcgucaagcucgaguccacccgcaucuaccagauccucgccaucuacuccaccgucgccuccucccucguccucgucgucucccucggcgccaucuccuucuggaugugcuccaacggcucccuccagugccgcaucugcaucuga

SEQ ID NO: 108805 - RNA, 1701 nt, Artificial Sequence
  derived and/or modified CDS sequence (opt2) from hemagglutinin__InfluenzaA__AIR93982
augaaggccauccucgucguccuccucuacaccaucgccaccgccaacgccgacacccucugcaucggcuaccacgccaacaacuccaccgacaccgucgacaccguccucgagaagaacgucaccgucacccacuccgucaaccuccucgaggacaagcacaacggcaagcucugcaagcuccgcggcgucgccccccuccaccucggcaagugcaacaucgccggcuggauccucggcaaccccgagugcgagucccucuccaccgccuccuccugguccuacaucgucgagaccuccuccuccgacaacggcaccugcuaccccggcgacuucaucgacuacgaggagcuccgcgagcagcucuccuccgucuccuccuucgagcgcuucgagaucuuccccaagaccuccuccuggcccaaccacgacuccaacaagggcgucaccgccgccugcccccacgccggcgcccgcuccuucuacaagaaccucaucuggcucgucaagaagggcaacuccuaccccaagcucuccaaguccuacaucaacgacaagggcaaggagguccucguccucuggggcauccaccaccccuccaccuccgccgaccagcagucccucuaccagaacgccgacgccuacgucuucgucggcaccucccgcuacuccaagaaguucaagcccgagaucgccauccgccccaagguccgcgaccgcgagggccgcaugaacuacuacuggacccucgucgagcccggcgacaagaucaccuucgaggccaccggcaaccucgucgucccccgcuacgccuucaccauggagcgcaacgccggcuccggcaucaucaucuccgacacccccguccacgacugcaacaccaccugccagacccccaagggcgccaucaacaccucccuccccuuccagaacauccaccccaucaccaucggcaagugccccaaguacgucaaguccaccaagcuccgccucgccaccggccuccgcaacguccccuccauccagucccgcggccucuucggcgccaucgccggcuucaucgagggcggcuggaccggcauggucgacggcugguacggcuaccaccaccagaacgagcagggcuccggcuacgccgccgaccucaaguccacccagaacgccaucgacgagaucaccaacaaggucaacuccgucaucgagaagaugaacacccaguucaccgccgucggcaaggaguucaaccaccucgagaagcgcaucgagaaccucaacaagaaggucgacgacggcuuccucgacaucuggaccuacaacgccgagcuccucguccuccucgagaacgagcgcacccucgacuaccacgacuccaacgucaagaaccucuacgagaagguccgcucccagcucaagaccaacgccaaggagaucggcaacggcugcuucgaguucuaccacaagugcgacaacaccugcauggaguccgucaagaacggcaccuacgacuaccccaaguacuccgaggaggccaagcucaaccgcgaggagaucgacggcgucaagcucgaguccacccgcaucuaccagauccucgccaucuacuccaccgucgccuccucccucguccucgucgucucccucggcgccaucuccuucuggaugugcuccaacggcucccuccagugccgcaucugcaucuga

SEQ ID NO: 108806 - RNA, 1701 nt, Artificial Sequence
  derived and/or modified CDS sequence (opt2) from hemagglutinin__InfluenzaA__AIR93993
augaaggccauccucgucguccuccucuacaccuucgccaccgccaacgccgacacccucugcaucggcuaccacgccaacaacuccaccgacaccgucgacaccguccucgagaagaacgucaccgucacccacuccgucaaccuccucgaggacaagcacaacggcaagcucugcaagcucaagggcgucgccccccuccaccucggcaagugcaacaucgccggcuggauccucggcaaccccgagugcggcucccucuccaccgccuccuccugguccuacaucgucgagaccuccuccuccgacaacggcaccugcuaccccggcgacuucaucgacuacgaggagcuccgcgagcagcucuccuccgucuccuccuucgagcgcuucgagaucuuccccaagaccuccuccuggcccaaccacgacuccaacaagggcgucaccgccgccugccccaacgccggcuccaaguccuucuacaagaaccucaucuggcucgucaagaagggcaacuccuaccccaagcucuccaaguccuacaucaacgacaagggcaaggagguccucguccucuggggcauccaccaccccuccaccuccgccgaccagcagucccucuaccagaacgccgacgccuacgucuucgucggcaccucccgcuacuccaagaaguucaagcccgagaucgccauccgccccaagguccgcggccaggagggccgcauggacuacuacuggacccucgucgagcccggcgacaagaucaccuucgaggccaccggcaaccucgucgucccccgcuacgccuucgccauggagcgcaacaccggcuccggcaucaucaucuccgacacccccguccacgacugcaacaccaucugccagacccccaagggcgccaucaacaccucccuccccuuccagaacauccaccccaucaccaucggcaagugccccaaguacgucaaguccaccaagcuccgccucgccaccggccuccgcaacguccccuccauccagucccgcggccucuucggcgccaucgccggcuucaucgagggcggcuggaccggcauggucgacggcugguacggcuaccaccaccagaacgagcagggcuccggcuacgccgccgaccucaaguccacccagaacgccaucgacgagaucaccaacaaggucaacuccgucaucgagaagaugaacacccaguucaccgccgucggcaaggaguucaaccaccucgagaagcgcaucgagaaccucaacaagaaggucgacgacggcuuccucgacaucuggaccuacaacgccgagcuccucguccuccucgagaacgagcgcacccucgacuaccacgacuccaacgucaagaaccucuacgagaagguccgcucccagcucaagaacaacgccaaggagaucggcaagggcugcuucgaguucuaccacaagugcgacaccaugugcauggaguccgucaagaacggcaccuacgacuaccccaaguacuccgaggaggccaagcucaaccgcgaggagaucgacggcgucaagcucgaguccacccgcaucuaccagauccucgccaucuacuccaccgucgccuccucccucguccucgucgucucccucggcgccaucuccuucuggaugugcuccaacggcucccuccagugccgcaucugcaucuga

SEQ ID NO: 108807 - RNA, 1701 nt, Artificial Sequence
  derived and/or modified CDS sequence (opt2) from hemagglutinin__InfluenzaA__AIR94000
augaaggccauccucgucguccuccucuacaccuucgccaccgccaacgccgacacccucugcaucggcuaccacgccaacaacuccaccgacaccgucgacaccguccucgagaagaacgucaccgucacccacuccgucaaccuccucgaggacaagcacaacggcaagcucugcaagcuccgcggcgucgccccccuccaccucggcaagugcaacaucgccggcuggauccucggcaaccccgagugcgagucccucuccaccgccuccuccugguccuacaucgucgagaccuccuccuccgacaacggcaccugcuaccccggcgacuucaucgacuacgaggagcuccgcgagcagcucuccuccgucuccuccuucgagcgcuucgagaucuuccccaagaccuccuccuggcccaaccacgacuccaacaagggcgucaccgccgccugcccccacgccggcgccaaguccuucuacaagaaccucaucuggcucgucaagaagggcaacuccuaccccaagcucuccaaguccuacaucaacgacaagggcaaggagguccucguccucuggggcauccaccaccccuccaccuccgccgaccagcagucccucuaccagaacgccgacgccuacgucuucgucggcaccucccgcuacuccaagaaguucaagcccgagaucgccauccgccccaagguccgcgaccaggagggccgcaugaacuacuacuggacccucgucgagcccggcgacaagaucaccuucgaggccaccggcaaccucgucgucccccgcuacgccuucgccauggagcgcaacgccggcuccggcaucaucaucuccgacacccccguccacgacugcaacaccaccugccagacccccaagggcgccaucaacaccuccuuccccuuccagaacauccaccccaucaccaucggcaagugccccaaguacgucaaguccaccaagcuccgccucgccaccggccuccgcaacguccccuccauccagucccgcggccucuucggcgccaucgccggcuucaucgagggcggcuggaccggcauggucgacggcugguacggcuaccaccaccagaacgagcagggcuccggcuacgccgccgaccucaaguccacccagaacgccaucgacgagaucaccaacaaggucaacuccgucaucgagaagaugaacacccaguucaccgccgucggcaaggaguucaaccaccucgagaagcgcaucgagaaccucaacaagaaggucgacgacggcuuccucgacaucuggaccuacaacgccgagcuccucguccuccucgagaacgagcgcacccucgacuaccacgacuccaacgucaagaaccucuacgagaagguccgcucccagcucaagaccaacgccaaggagaucggcaacggcugcuucgaguucuaccacaagugcgacaacaccugcauggaguccgucaagaacggcaccuacgacuaccccaaguacuccgaggaggccaagcucaaccgcgaggagaucgacggcgucaagcucgaguccacccgcaucuaccagauccucgccaucuacuccaccgucgccuccucccucguccucgucgucucccucggcgccaucuccuucuggaugugcuccaacggcucccuccagugccgcaucugcaucuga

SEQ ID NO: 108808 - RNA, 1683 nt, Artificial Sequence
  derived and/or modified CDS sequence (opt2) from hemagglutinin__InfluenzaA__AIR94116
auggagaccgccucccucaucaccauccuccucgucgucaccgucuccaacgccgacaagaucugcaucggcuaccaguccaccaacuccaccgagaccgucgacacccucaccgagaacaacguccccgucacccacgccaaggagcuccuccacaccgagcacaacggcaugcucugcgccaccucccucggccacccccucauccucgacaccugcaccaucgagggccucaucuacggcaaccccuccugcgaccuccuccucggcggccgcgagugguccuacaucgucgagcgccccuccgccgucaacggccucugcuaccccggcaacgucgagaaccucgaggagcuccgcucccucuucuccuccgcccgcuccuaccagcgcauccagaucuuccccgacaccaucuggaacgucuccuacuccggcaccuccaaggccugcuccgacuccuucuaccgcuccaugcgcuggcucacccagaaggacaacgccuaccccauccaggacgcccaguacaccaacaaccagggcaagaacauccucuucauguggggcaucaaccacccccccaccgacaccgcccagaccaaccucuacacccgcaccgacaccaccaccuccgucgccaccgaggagaucaaccgcaccuucaagccccucaucggcccccgcccccucgucaacggccucaugggccgcaucaacuacuacugguccguccucaagcccggccagacccuccgcaucaaguccaacggcaaccucaucgcccccugguacggccacauccucuccggcgagucccacggccgcauccucaagaccgaccucaagcgcggcuccugcaccguccagugccagaccgagaagggcggccucaacaccacccuccccuuccagaacgucuccaaguacgccuucggcaacugcuccaaguacaucggcaucaagucccucaagcucgccgucggccuccgcaacguccccucccgcuccucccgcggccucuucggcgccaucgccggcuucaucgagggcggcugguccggccucgucgccggcugguacggcuuccagcacuccaacgaccagggcgucggcauggccgccgaccgcgacuccacccagaaggccaucgacaagaucaccuccaaggucaacaacaucgucgacaagaugaacaagcaguacgagaucaucgaccacgaguucaacgaggucgagacccgccucaacaugaucaacaacaagaucgacgaccagauccaggacaucugggccuacaacgccgagcuccucguccuccucgagaaccagaagacccucgacgagcacgacgccaacgucaacaaccucuacaacaaggucaagcgcgcccucggcuccaacgccgucgaggacggcaagggcugcuucgagcucuaccacaagugcgacgaccagugcauggagaccauccgcaacggcaccuacaaccgccgcaaguaccaggaggaguccaagcucgagcgccagaagaucgagggcgucaagcucgaguccgagggcaccuacaagauccucaccaucuacuccaccgucgccuccucccucgucaucgccaugggcuucgccgccuuccucuucugggccauguccaacggcuccugccgcugcaacaucugcaucuga

SEQ ID NO: 108809 - RNA, 1701 nt, Artificial Sequence
  derived and/or modified CDS sequence (opt2) from hemagglutinin__InfluenzaA__AIT38333
augaagaccaucaucacccucuccuacauccucugccacgucuucgcccagaagauccacggcuccgacuccuccaccgccacccucugccucggccaccacgccguccccaacggcacccucgucaagaccaucaccaacgaccagaucgaggucaccaacgccaccgagcucguccaguccuccuccaccggccgcaucugcgacaacccccaccgcauccucgacggcaagaacugcacccucaucgacgcccuccucggcgacccccacugcgacgaguuccagaacaaggagugggaccucuucgucgagcgcuccaacgccuacuccgacugcuaccccuacuacguccccgacuacgccucccuccgcucccucgucgccuccuccggcacccucgaguucaacaacgaguccuucaacuggaccggcaucucccaggacggcaccuccuccuccugccgccgcggcuccgucaaguccuucuucucccgccucaacuggcuccacggccucgaguacaaguaccccgcccagaacgucaccaugcucaacaacgacgaguucgacaagcucuacaucuggggcguccaccaccccuccaccgacuccgaccagaccucccucuacguccagaccuccggccgcgucaccgucuccaccaagcgcucccagcagaccgucauccccaacaucggcucccgccccuggguccgcggcaucuccucccgcaucuccauccacuggaccaucgucaagcccggcgacauccuccucaucaacuccaccggcaaccucaucgccccccgcggcuacuucaagauccgcggcggcaaguccuccaucaugcgcuccgacgcccccaucgacaacugcgacuccgagugcgucacccccaacggcaacauccccaacgacaagcccuuccagaacgucaaccgcaucaccuacggccccugcccccgcuacaucaagcagaacacccucaagcucgccaccggcaugcgcaacguccccgagaagcagacccgcggcguccucggcgccaucgccggcuucaucgagaacggcugggagggcauggucgacggcugguacggcuuccgccaccagaacuccgagggcaccggccaggccgccgaccucaaguccacccaggccgccaucgaccagaucaacggcaagcucaaccgccucaucggcaagaccaacgagaaguuccaccagaucgagaaggaguucuccgagaucgagggccgcguccaggaccucgagaaguacgucgaggacaccaagaucgaccucugguccuacaacgccgagcuccucgucguccucgagaaccagcacaccaucgaccucaccgacuccgagaugaacaagcucuucgagcgcacccgccgccagcuccgcgagaacgccgaggacaugggcaacggcugcuucaagaucuaccacaagugcgacaacgccugcaucggcuccauccgcaacggcaccuacguccacgacgucuaccgcgacgaggcccucaacaaccgcuuccagaucaagggcgucgagcucaaguccggcuacaaggacuggauccucuggaucuccuucgccaucuccugcuuccuccucugcgccguccuccucggcuucaucaccugggccugccagaagggcaacauccgcugcaacaucugcaucuga

SEQ ID NO: 108810 - RNA, 1698 nt, Artificial Sequence
  derived and/or modified CDS sequence (opt2) from hemagglutinin__InfluenzaA__AIT38344
augaagaucaagcuccucauccuccucugcaccuucaccgccaccuacgccgacaccaucugcaucggcuaccacgccaacaacuccaccgacaccgucgacaccguccucgagaagaacgucaccgucacccacuccgucaaccuccucgaggacucccacaacggcaagcucugccuccuccgcggcaucgccccccuccagcucggcaacugcuccgucgccggcuggauccucggcaaccccgagugcgagucccucaucuccaaggaguccugguccuacaucgucgagaagcccaaccccgagaacggcaccugcuaccccggcuacuucgccgacuacgaggagcuccgcgagcagcucuccuccgucuccuccuucgagcgcuucgagaucuuccccaaggaguccuccuggcccaaccacaccgucaccggcgucuccgccuccugcuccuacaacggcaagggcaacuucuacaagaaccuccucuggcucacccgcaagaacggccucuaccccaaccucuccaaguccuacaccaacaacaaggagaaggagguccucauccucuggggcguccaccaccccuccaacaucaaggaccagcgcacccucuaccacaccgagaacgccuacgucuccgucgucuccucccacuacucccgccgcuucacccccgagaucaccaagcgccccaagguccgcgaccaggagggccgcaucaacuacuacuggacccuccucgagcccggcgacaccaucaucuucgaggccaacggcaaccucaucgcccccugguacgccuucgcccucucccgcggcuucggcuccggcaucaucaccuccaacgcccccauggacgagugcgaggccaagugccagaccccccgcggcgccaucaacuccucccuccccuuccagaacguccaccccgucaccaucggcgagugccccaaguacguccgcuccgccaagcuccgcauggucaccggccuccgcaacauccccuccauccagucccgcggccucuucggcgccaucgccggcuucaucgagggcggcuggaccggcaugaucgacggcugguacggcuaccaccaccagaacgagcagggcuccggcuacgccgccgacaaggaguccacccagaacgccaucaacggcaucaccaacaaggucaacuccgucaucgagaagaugaacacccaguucaccaccgucggcaaggaguucaacaagcucgagcgccgcauggagaaccucaacaagaaggucgacgacggcuuccucgacaucuggaccuacaacgccgagcuccucguccuccucgagaacgagcgcacccucgacuuccacgacuccaacgucaagauccucuacgagaaggucaagucccagcucaagaacaacgccaaggagaucggcaacggcugcuucgaguucuaccacaagugcaacaacgagugcauggaguccgucaagaacggcaccuacgacuaccccaaguacuccgaggaguccaagcucaaccgcgagaagaucgacggcgucaagcucgaguccaugggcgucuaccagauccucgccaucuacuccaccgucgccuccucccucguccuccucgucucccucggcgccaucuccuucuggaugugcuccaacggcucccuccagugccgcaucugcaucuga

SEQ ID NO: 108811 - RNA, 1698 nt, Artificial Sequence
  derived and/or modified CDS sequence (opt2) from hemagglutinin__InfluenzaA__AIT38360
augaagaucaagcuccucauccuccucugcaccuucaccgccaccuacgccgacaccaucugcaucggcuaccacgccaacaacuccaccgacaccgucgacaccguccucgagaagaacgucaccgucacccacuccgucaaccuccucgaggacucccacaacggcaagcucugccuccucaagggcaucgccccccuccagcucggcaacugcuccgucgccggcuggauccucggcaaccccgagugcgagucccucaucuccaaggaguccugguccuacaucgucgagaagcccaaccccgagaacggcaccugcuaccccggcuacuucgccgacuacgaggagcuccgcgagcagcucuccuccgucuccuccuucgagcgcuucgagaucuuccccaaggaguccuccuggcccaaccacaccgucaccggcgucuccgccuccugcuccuacaacggcaagggcaacuucuacaagaaccuccucuggcucacccgcaagaacggccucuaccccaaccucuccaaguccuacaccaacaacaaggagaaggagguccucauccucuggggcguccaccaccccuccaacaucgaggaccagcgcacccucuaccacaccgagaacgccuacgucuccgucgucuccucccacuacucccgccgcuucacccccgagaucaccaagcgccccaagguccgcggccaggagggccgcaucaacuacuacuggacccuccucgagcccggcgacaccaucaucuucgaggccaacggcaaccucaucgcccccugguacgccuucgcccucucccgcggccucggcuccggcaucaucaccuccaacgcccccauggacgagugcgaggccaagugccagaccccccgcggcgccaucaacuccucccuccccuuccagaacguccaccccgucaccaucggcgagugccccaaguacguccgcuccgccaagcuccgcauggucaccggccuccgcaacauccccuccauccagucccgcggccucuucggcgccaucgccggcuucaucgagggcggcuggaccggcaugaucgacggcugguacggcuaccaccaccagaacgagcagggcuccggcuacgccgccgacaaggaguccacccagaacgccaucaacggcaucaccaacaaggucaacuccgucaucgagaagaugaacacccaguucaccaccgucggcaaggaguucaacaagcucgagcgccgcauggagaaccucaacaagaaggucgacgacggcuuccucgacaucuggaccuacaacgccgagcuccucguccuccucgagaacgagcgcacccucgacuuccacgacuccaacgucaagaaccucuacgagaaggucaagucccagcucaagaacaacgccaaggagaucggcaacggcugcuucgaguucuaccacaagugcaacaacgagugcauggaguccgucaagaacggcaccuacgacuaccccaaguacuccgaggaguccaagcucaaccgcgagaagaucgacggcgucaagcucgaguccaugggcgucuaccagauccucgccaucuacuccaccgucgccuccucccucguccuccucgucucccucggcgccaucuccuucuggaugugcuccaacggcucccuccagugccgcaucugcaucuga

SEQ ID NO: 108812 - RNA, 1701 nt, Artificial Sequence; identical to SEQ ID NO: 106076
  derived and/or modified CDS sequence (opt2) from hemagglutinin__InfluenzaA__AIT93147

SEQ ID NO: 108813 - RNA, 1701 nt, Artificial Sequence; identical to SEQ ID NO: 98705
  derived and/or modified CDS sequence (opt2) from hemagglutinin__InfluenzaA__AIU39700

SEQ ID NO: 108814 - RNA, 1701 nt, Artificial Sequence
  derived and/or modified CDS sequence (opt2) from hemagglutinin__InfluenzaA__AIU39702
augaaggccauccucgucguccuccucuacaccuucgccaccgccaacgccgacacccucugcaucggcuaccacgccaacaacuccaccgacaccgucgacaccguccucgagaagaacgucaccgucacccacuccgucaaccuccucgaggacaagcacaacggcaagcucugcaagcuccgcggcgucgccccccuccaccucggcaagugcaacaucgccggcuggauccucggcaaccccgagugcgagucccucuccaccgccuccuccugguccuacaucgucgagaccuccuccuccgacaacggcaccugcuaccccggcgacuucaucgacuacgaggagcuccgcgagcagcucuccuccgucuccuccuucgagcgcuucgagaucuuccccaagaccuccuccuggcccaaccacgacuccaacaagggcgucaccgccgccugcccccacgccggcgccaaguccuucuacaagaaccucaucuggcucgucaagaagggcaacuccuaccccaagcucuccaaguccuacaucaacgacaagggcaaggagguccucguccucuggggcauccaccaccccuccaccuccgccgaccagcagucccucuaccagaacgccgacgccuacgucuucgucggcaccucccgcuacuccaagaaguucaagcccgagaucgccauccgccccaagguccgcgaccaggagggccgcaugaacuacuacuggacccucgucgagcccggcgacaagaucaccuucgaggccaccggcaaccucgucgucccccgcuacgccuucgccauggagcgcaacgccggcuccggcaucaucaucuccgacacccccguccacgacugcaacaccaccugccagacccccaagggcgccaucaacaccuccuuccccuuccagaacauccaccccaucaccaucggcaagugccccaaguacgucaaguccaccaagcuccgccucgccaccggccuccgcaacauccccuccauccagucccgcggccucuucggcgccaucgccggcuucaucgagggcggcuggaccggcauggucgacggcugguacggcuaccaccaccagaacgagcagggcuccggcuacgccgccgaccucaaguccacccagaacgccaucgacgagaucaccaacaaggucaacuccgucaucgagaagaugaacacccaguucaccgccgucggcaaggaguucaaccaccucgagaagcgcaucgagaaccucaacaagaaggucgacgacggcuuccucgacaucuggaccuacaacgccgagcuccucguccuccucgagaacgagcgcacccucgacuaccacgacuccaacgucaagaaccucuacgagaagguccgcucccagcucaagaacaacgccaaggagaucggcaacggcugcuucgaguucuaccacaagugcgacaacaccugcauggaguccgucaagaacggcaccuacgacuaccccaaguacuccgaggaggccaagcucaaccgcgaggagaucgacggcgucaagcucgaguccacccgcaucuaccagauccucgccaucuacuccaccgucgccuccucccucguccucgucgucucccucggcgccaucuccuucuggaugugcuccaacggcucccuccagugccgcaucugcaucuga

SEQ ID NO: 108815 - RNA, 1701 nt, Artificial Sequence; identical to SEQ ID NO: 102945
  derived and/or modified CDS sequence (opt2) from hemagglutinin__InfluenzaA__AIU39704

SEQ ID NO: 108816 - RNA, 1704 nt, Artificial Sequence
  derived and/or modified CDS sequence (opt2) from hemagglutinin__InfluenzaA__AIU46609
auggagaagaucguccuccuccucgccaucgucucccucgucaaguccgaccagaucugcaucggcuaccacgccaacaacuccaccgagcaggucgacaccaucauggagaagaacgucaccgucacccacgcccaggacauccucgagaagacccacaacggcaagcucugcgaccucaacggcgucaagccccucauccucaaggacugcuccgucgccggcuggcuccucggcaaccccaugugcgacgaguucauccgcguccccgagugguccuacaucgucgagcgcgccaaccccgccaacgaccucugcuaccccggcaaccucaacgacuacgaggagcucaagcaccuccucucccgcaucaaccacuucgagaagauccucaucauccccaaguccuccuggaccaaccacgagaccucccucggcgucuccgccgccugccccuaccagggcacccccuccuucuuccgcaacgucgucuggcucaucaagaagaacgacgccuaccccaccaucaagaucuccuacaacaacaccaaccaggaggaccuccucauccucuggggcauccaccacuccaacaacgccgccgagcagaccaaccucuacaagaaccccaccaccuacaucuccgucggcaccuccacccucaaccagcgccucguccccaagaucgccacccgcucccaggucaacggccagcgcggccgcauggacuucuucuggaccauccucaagcccaacgacgccauccacuucgaguccaacggcaacuucaucgcccccgaguacgccuacaagaucgucaagaagggcgacuccaccaucaugaaguccgaggucgaguacggccacugcaacaccaagugccagacccccaucggcgccaucaacuccuccaugcccuuccacaacauccacccccucaccaucggcgagugccccaaguacgucaaguccaacaagcucguccucgccaccggccuccgcaacuccccccuccgcgagaagcgccgcaagcgcggccucuucggcgccaucgccggcuucaucgagggcggcuggcagggcauggucgacggcugguacggcuaccaccacuccaacgagcagggcuccggcuacgccgccgacaaggaguccacccagaaggccaucgacggcgucaccaacaaggucaacuccaucaucgacaagaugaacacccaguucgaggccgucggccgcgaguucaacaaccucgagcgccgcaucgagaaccucaacaagaagauggaggacggcuuccucgacgucuggaccuacaacgccgagcuccucguccucauggagaacgagcgcacccucgacuuccacgacuccaacgucaagaaccucuacgacaagguccgccuccagcuccgcgacaacgccaaggagcucggcaacggcugcuucgaguucuaccacaagugcgacaacgagugcauggaguccguccgcaacggcaccuacgacuacccccaguacuccgaggaggcccgccucaagcgcgaggagaucuccggcgucaagcucgaguccaucggcaccuaccagauccucuccaucuacuccaccgucgccuccucccucgcccucgccaucaucgucgccggccucucccucuggaugugcuccaacggcucccuccagugccgcaucugcaucuga

SEQ ID NO: 108817 - RNA, 1689 nt, Artificial Sequence
  derived and/or modified CDS sequence (opt2) from hemagglutinin__InfluenzaA__AIU46714
auggccaucaucuaccucauccuccucuucaccgccguccgcggcgaccagaucugcaucggcuaccacgccaacaacuccaccgagaaggucgacaccauccucgagcgcaacgucaccgucacccacgccaaggacauccucgagaagacccacaacggcaagcucugcaagcucaacggcauccccccccucgagcucggcgacugcuccaucgccggcuggcuccucggcaaccccgagugcgaccgccuccuccgcguccccgagugguccuacaucauggagaaggagaaccccaaguacucccucugcuaccccggcuccuucaacgacuacgaggagcucaagcaccuccucuccuccgucaagcacuucgagaaggucaagauccuccccaaggacggcuggacccagcacaagaccgacggcggcuccaaggccugcgccgucuccggcaagcaguccuucuuccgcaacauggucuggcucaccaagaagggccagaacuaccccgucgccaagcgcuccuacaacaacaccuccggcgagcagaugcucaucaucuggggcguccaccaccccaacgacgaggaggagcagcgcgcccucuaccagaaggucggcaccuacgucuccgccuccaccuccacccucaacaagcgcuccacccccgagaucgccgcccgccccgaggucaacggccucggcucccgcauggaguucuccuggacccuccucgacgucugggacaccaucaacuucgaguccaccggcaaccucgucgcccccgaguacggcuucaagaucuccaagcgcggcuccuccggcaucaucaagaccgagggcacccucggcaacugcgagaccaagugccagaccccccucggcgccaucaacaccacccuccccuuccacaacguccacccccucaccaucggcgagugccccaaguacgucaaguccgagaagcucguccucgccaccggccuccgcaacgucccccagaucgagucccgcggccucuucggcgccaucgccggcuucaucgagggcggcuggcagggcauggucgacggcugguacggcuaccaccacuccaacgaccagggcuccggcuacgccgccgacaaggaguccacccagaaggccuucgaccgcaucaccaacaaggucaacuccgucaucgagaagaugaacacccaguucgaggccgucggcaaggaguucuccaaccucgagcgccgccucgagaaccucaacaagaagauggaggacggcuuccucgacgucuggaccuacaacgccgagcuccucguccucauggagaacgagcgcacccucgacuuccacgacuccaacgucaagaaccucuacgacaagguccgcaugcagcuccgcgacaacgucaaggagcucggcaacggcugcuucgaguucuaccacaagugcgacaacgagugcaugaacuccgucaagaacggcaccuacgacuaccccaaguacgaggaggaguccaagcucaagcgcaacgagaucaagggcgucaagcucuccuccaugggcgucuaccagauccucgccaucuacgccaccgucgccggcucccucucccucgccaucaugaucgccggcaucuccuucuggaugugcuccaacggcucccuccagugccgcaucugcaucuga

SEQ ID NO: 108818 - RNA, 1701 nt, Artificial Sequence
  derived and/or modified CDS sequence (opt2) from hemagglutinin__InfluenzaA__AIV09219
augaaggccauccucgucguccuccucuacaccuucgccaccaccaacgccgacauccucugcaucggcuaccacgccaacaacuccaccgacaccgucgacaccguccucgagaagaacgucaccgucacccacuccgucaaccuccucgaggacaagcacaacggcaagcucugcaagcuccgcggcgucgccccccuccaccucggcaagugcaacaucgccggcuggauccucggcaaccccgagugcgagcuccucuccaccaccuccuccugguccuacaucgucgagaccuccuccuccgacaacggcaccugcuaccccggcgacuucaucgacuacgaggagcuccgcgagcagcucuccuccgucuccuccuucgagcgcuucgagaucuuccccaagaccuccuccuggcccgaccacgacuccaacaagggcgucaccgccgccugcccccacgccggcgccggcuccuucuacaagaaccucaucuggcucgucaagaagggcaacuccuaccccaagcucuccaaguccuacaucaacgacaagggcaaggagguccucguccucuggggcauccaccacccccccaccuccgccgaccagcagcgccucuaccagaacgccgacgccuacgucuucgucggcaccucccgcuacuccaagaaguucaagcccgagaucgccauccgccccaagguccgcgaccaggagggccgcaugaacuacuacuggacccucgucgagcccggcgacaagaucaccuucgaggccaccggcaaccucgucgucccccgcuacgccuucgccauggagcgcaacgccggcuccggcaucaucaccuccgacacccccguccacgacugcaacaccaccugccagacccccaagggcgccaucaacaccucccuccccuuccagaacauccaccccaucaccaucggcaagugccccaaguacgucaaguccaccaagcuccgccucgccaccggccuccgcaacguccccuccauccagucccgcggccucuucggcgccaucgccggcuucaucgagggcggcuggaccggcauggucgacggcugguacggcuaccaccaccagaacgagcagggcuccggcuacgccgccgaccucaaguccacccagaacgccaucgacgagaucaccaacaaggucaacuccgucaucgacaagaugaacacccaguucaccgccgucggcaaggaguucaaccaccucgagaagcgcaucgagaaccucaacaagaaggucgacgacggcuuccucgacaucuggaccuacaacgccgagcuccucguccuccucgagaacgagcgcacccucgacuaccacgacuccaacgucaagaaccucuacgagaagguccgcucccagcucaagaacaacgccaaggagaucggcaacggcugcuucgaguucuaccacaagugcgacaacaccugcauggaguccgucaagaacggcaccuacgacuaccccaaguacuccgaggaggccaagcucaaccgcgaggagaucgacggcgucaagcucgaguccacccgcaucuaccagauccucgccaucuacuccaccgucgccuccucccucguccucgucgucucccucggcgccaucuccuucuggaugugcuccaacggcucccuccagugccgcaucugcaucuga

SEQ ID NO: 108819 - RNA, 1701 nt, Artificial Sequence
  derived and/or modified CDS sequence (opt2) from hemagglutinin__InfluenzaA__AIW60689
augaagaccaucaucgcccucuccuacauccucugccucgucuucgcccagaagcuccccggcaacgacaacuccaccgccacccucugccucggccaccacgccguccccaacggcacccucgucaagaccaucaccaacgaccagaucgaggucaccaacgccaccgagcucguccaguccuccuccaccggccgcaucugcgacuccccccaccgcauccucgacggcaagaacugcacccucaucgacgcccuccucggcgacccccacugcgacggcuuccagaacaaggagugggaccucuucgucgagcgcuccaaggccuacuccgacugcuaccccuacgacguccccgacuacgccucccuccgcucccucgucgccuccuccggcacccucgaguucaccaacgagggcuucaacuggaccggcgucgcccaggacggcaccuccuacgccugcaagcgcggcuccgucaaguccuucuucucccgccucaacuggcuccacaagcucgaguacaaguaccccgcccucaacgucaccaugcccaacaacgacaaguucgacaagcucuacaucuggggcguccaccaccccuccaccgacuccgaccagaccuccaucuacguccaggccuccggccgcgucaccgucuccaccaagcgcucccagcagaccgucauccccaacaucggcucccgccccuggguccgcggcaucuccucccgcaucuccaucuacuggaccaucgucaagcccggcgacauccuccucaucaacuccaccggcaaccucaucgccccccgcggcuacuucaagauccgcuccggcaaguccuccaucaugcgcuccgacgcccccaucggcaacugcaacuccgagugcaucacccccaacggcuccauccccaacgacaagcccuuccagaacgucaaccgcaucaccuacggcgccugcccccgcuacgucaagcagaacacccucaagcucgccaccggcaugcgcaacguccccgagaagcagacccgcggcaucuucggcgccaucgccggcuucaucgagaacggcugggagggcauggucgacggcugguacggcuuccgccaccagaacuacgagggcaccggccaggccgccgaccucaaguccacccaggccgccaucaaccagaucaacggcaagcucaaccgccucaucgagaagaccaacgagaaguuccaccagaucgagaaggaguucuccgaggucgagggccgcauccaggaccucgagaaguacgucgaggacaccaagaucgaccucugguccuacaacgccgagcuccucgucgcccucgagaaccagcacaccaucgaccucaccgacuccgagaugaacaagcucuucgagcgcacccgcaagcagcuccgcgagaacgccgaggacaugggcaacggcugcuucaagaucuaccacaagugcgacaacgccugcaucggcuccauccgcaacggcaccuacgaccacgacgccuaccgcgacgaggcccucaacaaccgcuuccagaucaagggcgucgagcucaaguccggcuacaaggacuggauccucuggaucuccuucgccaucuccugcuuccuccucugcgucguccuccucggcuucaucaugugggccugccagaagggcaacauccgcugcaacaucugcaucuga

SEQ ID NO: 108820 - RNA, 1701 nt, Artificial Sequence
  derived and/or modified CDS sequence (opt2) from hemagglutinin__InfluenzaA__AIW60690
augaagaccaucaucgcccucuccuacauccucugccucgucuucgcccagaagcuccccggcaacgacaacuccaccgccacccucugccucggccaccacgccguccccaacggcacccucgucaagaccaucaccaacgaccagaucgaggucaccaacgccaccgagcucguccaguccuccuccaccggccgcaucugcgacuccccccaccgcauccucgacggcaagaacugcacccucaucgacgcccuccucggcgacccccacugcgacggcuuccagaacaaggagugggaccucuucgucgagcgcuccaaggccuacuccgacugcuaccccuacgacguccccgacuacgccucccuccgcucccucgucgccuccuccggcacccucgaguucaccaacgagggcuucaacuggaccggcgucgcccaggacggcaccuccuacgccugcaagcgcggcuccgucaaguccuucuucucccgccucaacuggcuccacaagcucgaguacaaguaccccgcccucaacgucaccaugcccaacaacgacaaguucgacaagcucuacaucuggggcguccaccaccccuccaccgacuccgaccagaccucccucuacguccaggccuccggccgcgucaccgucuccaccaagcgcucccagcagaccgucauccccaacaucggcucccgccccuggguccgcggcgucuccucccgcaucuccaucuacuggaccaucgucaagcccggcgacauccuccucaucaacuccaccggcaaccucaucgccccccgcggcuacuucaagauccgcuccggcaaguccuccaucaugcgcuccgacgcccccaucggcaacugcaacuccgagugcaucacccccaacggcuccauccccaacgacaagcccuuccagaacgucaaccgcaucaccuacggcgccugcccccgcuacgucaagcagaacacccucaagcucgccaccggcaugcgcaacguccccgagaagcagacccgcggcaucuucggcgccaucgccggcuucaucgagaacggcugggagggcauggucgacggcugguacggcuuccgccaccagaacuacgagggcaccggccaggccgccgaccucaaguccacccaggccgccaucaaccagaucaacggcaagcucaaccgccucaucgagaagaccaacgagaaguuccaccagaucgagaaggaguucuccgaggucgagggccgcauccaggaccucgagaaguacgucgaggacaccaagaucgaccucugguccuacaacgccgagcuccucgucgcccucgagaaccagcacaccaucgaccucaccgacuccgagaugaacaagcucuucgagcgcacccgcaagcagcuccgcgagaacgccgaggacaugggcaacggcugcuucaagaucuaccacaagugcgacaacgccugcaucggcuccauccgcaacggcaccuacgaccacgacgccuaccgcgacgaggcccucaacaaccgcuuccagaucaagggcgucgagcucaaguccggcuacaaggacuggauccucuggaucuccuucgccaucuccugcuuccuccucugcgucguccuccucggcuucaucaugugggccugccagaagggcaacauccgcugcaacaucugcaucuga

SEQ ID NO: 108821 - RNA, 1701 nt, Artificial Sequence
  derived and/or modified CDS sequence (opt2) from hemagglutinin__InfluenzaA__AIW60691
augaagaccaucaucgcccucuccuacauccucugccucgucuucgcccagaagcuccccggcaacgacaacuccaccgccacccucugccucggccaccacgccguccccaacggcacccucgucaaggccaucaccaacgaccagaucgaggucaccaacgccaccgagcucguccaguccuccuccaccggccgcaucugcgacuccccccaccgcauccucgacggcaagaacugcacccucaucgacgcccuccucggcgacccccacugcgacggcuuccagaacaaggagugggaccucuucgucgagcgcuccaaggccuacuccgacugcuaccccuacgacguccccgacuacgccucccuccgcucccucgucgccuccuccggcacccucgaguucaccaacgagggcuucaacuggaccggcgucgcccaggacggcaccuccuacgccugcaagcgcggcuccgucaaguccuucuucucccgccucaacuggcuccacaagcucgaguacaaguaccccgcccucaacgucaccaugcccaacaacgacaaguucgacaagcucuacaucuggggcguccaccaccccuccaccgacuccgaccagacccgccucuacguccaggccuccggccgcgucaccgucuccaccaagcgcucccagcagaccgucauccccaacaucggcucccgccccuggguccgcggcaucuccucccgcaucuccaucuacuggaccaucgucaagcccggcgacauccuccucaucaacuccaccggcaaccucaucgccccccgcggcuacuucaagauccgcuccggcaaguccuccaucaugcgcuccgacgcccccaucggcaacugcaacuccgagugcaucacccccaacggcuccauccccaacgacaagcccuuccagaacgucaaccgcaucaccuacggcgccugcccccgcuacgucaagcagaacacccucaagcucgccaccggcaugcgcaacguccccgagaagcagacccgcggcaucuucggcgccaucgccggcuucaucgagaacggcugggagggcauggucgacggcugguacggcuuccgccaccagaacuccgagggcaccggccaggccgccgaccucaaguccacccaggccgccaucaaccagaucaacggcaagcucaaccgccucaucgagaagaccaacgagaaguuccaccagaucgagaaggaguucuccgaggucgagggccgcauccaggaccucgagaaguacgucgaggacaccaagaucgaccucugguccuacaacgccgagcuccucgucgcccucgagaaccagcacaccaucgaccucaccgacuccgagaugaacaagcucuucgagcgcacccgcaagcagcuccgcgagaacgccgaggacaugggcaacggcugcuucaagaucuaccacaagugcgacaacgccugcaucggcuccauccgcaacggcaccuacgaccacgacgucuaccgcgacgaggcccucaacaaccgcuuccagaucaagggcgucgagcucaaguccggcuacaaggacuggauccucuggaucuccuucgccaucuccugcuuccuccucugcgucguccuccucggcuucaucaugugggccugccagaagggcaacauccgcugcaacaucugcaucuga

SEQ ID NO: 108822 - RNA, 1701 nt, Artificial Sequence
  derived and/or modified CDS sequence (opt2) from hemagglutinin__InfluenzaA__AIW60692
augaagaccaucaucgcccucuccuacauccucugccucgucuucgcccagaagcuccccggcaacgacaacuccaccgccacccucugccucggccaccacgccguccccaacggcacccucgucaaggccaucaccaacgaccagaucgaggucaccaacgccaccgagcucguccaguccuccuccaccggccgcaucugcgacuccccccaccgcauccucgacggcaagaacugcacccucaucgacgcccuccucggcgacccccacugcgacggcuuccagaacaaggagugggaccucuucgucgagcgcuccaaggccuacuccgacugcuaccccuacgacguccccgacuacgccucccuccgcucccucgucgccuccuccggcacccucgaguucaccaacgagggcuucaacuggaccggcgucgcccaggacggcaccuccuacgccugcaagcgcggcuccgucaaguccuucuucucccgccucaacuggcuccacaagcucgaguacaaguaccccgcccucaacgucaccaugcccaacaacgacaaguucgacaagcucuacaucuggggcguccaccaccccuccaccgacuccgaccagaccucccucuacguccaggccuccggccgcgucaccgucuccaccaagcgcucccagcagaccgucauccccaacaucggcucccgccccuggguccgcggcaucuccucccgcaucuccaucuacuggaccaucgucaagcccggcgacauccuccucaucaacuccaccggcaaccucaucgccccccgcggcuacuucaagauccgcuccggcaaguccuccaucaugcgcuccgacgcccccaucggcaacugcaacuccgagugcaucacccccaacggcuccauccccaacgacaagcccuuccagaacgucaaccgcaucaccuacggcgccugcccccgcuacgucaagcagaacacccucaagcucgccaccggcaugcgcaacguccccgagaagcagacccgcggcaucuucggcgccaucgccggcuucaucgagaacggcugggagggcauggucgacggcugguacggcuuccgccaccagaacuccgagggcaccggccaggccgccgaccucaaguccacccaggccgccaucaaccagaucaacggcaagcucaaccgccucaucgagaagaccaacgagaaguuccaccagaucgagaaggaguucuccgaggucgagggccgcauccaggaccucgagaaguacgucgaggacaccaagaucgaccucugguccuacaacgccgagcuccucgucgcccucgagaaccagcacaccaucgaccucaccgacuccgagaugaacaagcucuucgagcgcacccgcaagcagcuccgcgagaacgccgaggacaugggcaacggcugcuucaagaucuaccacaagugcgacaacgccugcaucggcuccauccgcaacggcaccuacgaccacgacgucuaccgcgacgaggcccucaacaaccgcuuccagaucaagggcgucgagcucaaguccggcuacaaggacuggauccucuggaucuccuucgccaucuccugcuuccuccucugcgucguccuccucggcuucaucaugugggccugccagaagggcaacauccgcugcaacaucugcaucuga

SEQ ID NO: 108823 - RNA, 1701 nt, Artificial Sequence
  derived and/or modified CDS sequence (opt2) from hemagglutinin__InfluenzaA__AIW60693
augaagaccaucaucgcccucuccuacauccucugccucgucuucgcccagaagcuccccggcaacgacaacuccaccgccacccucugccucggccaccacgccguccucaacggcacccucgucaagaccaucaccaacgaccagaucgaggucaccaacgccaccgagcucguccagaacuccuccaccggccgcaucugcgacuccccccaccagauccucgacggcgagaacugcacccucaucgacgcccuccucggcgacccccacugcgacggcuuccagaacaaggagugggaccucuucgucgagcgcuccaaggccuacuccaacugcuaccccuacgacguccccgacuacgccucccuccgcucccucgucgccuccuccggcacccucgaguucaacaacgaguccuucaacuggaccggcgucgcccagaacggcaccuccuccgccugcaagcgccgcuccaucaaguccuucuucucccgccucaacuggcuccaccagcucaaguacaaguaccccgcccucaacgucaccaugcccaacaacgagaaguucgacaagcucuacaucuggggcguccaccaccccuccaccgacuccgaccagaccuccaucuacgcccaggccuccggccgcgucaccgucuccaccaagcgcucccagcagaccgucauccccaacaucggcucccgccccuggguccgcggcgucuccuccaucaucuccaucuacuggaccaucgucaagcccggcgacauccuccucaucaacuccaccggcaaccucaucgccccccgcggcuacuucaagauccgcuccggcaaguccuccaucaugcgcuccgacgcccccaucggcaagugcaacuccgagugcaucacccccaacggcuccauccccaacgacaagcccuuccagaacgucaaccgcaucaccuacggcgccugcccccgcuacgucaagcagaacacccucaagcucgccaccggcaugcgcaacguccccgagaagcagacccgcggcaucuucggcgccaucgccggcuucaucgagaacggcugggagggcauggucgacggcugguacggcuuccgccaccagaacuccgagggcaccggccaggccgccgaccucaaguccacccaggccgccaucaaccagaucaacggcaagcucaaccgccucaucgagaagaccaacgagaaguuccaccagaucgagaaggaguucuccgaggucgagggccgcauccaggaccucgagaaguacgucgaggacaccaagaucgaccucugguccuacaacgccgagcuccucgucgcccucgagaaccagcacaccaucgaccucaccgacuccgagaugaacaagcucuucgagcgcacccgcaagcagcuccgcgagaacgccgaggacaugggcaacggcugcuucaagaucuaccacaagugcgacaacgccugcaucggcuccauccgcaacggcaccuacgaccacgacgucuaccgcgacgaggcccucaacaaccgcuuccagaucaagggcgucgagcucaaguccggcuacaaggacuggauccucuggaucuccuucgccaucuccugcuuccuccucugcgucguccuccucggcuucaucaugugggccugccagaagggcaacauccgcugcaacaucugcaucuga

SEQ ID NO: 108824 - RNA, 1701 nt, Artificial Sequence
  derived and/or modified CDS sequence (opt2) from hemagglutinin__InfluenzaA__AIW60694
augaagaccaucaucgcccucuccuacauccucugccucgucuucgcccagaagcuccccggcaacgacaacuccaccgccacccucugccucggccaccacgccguccucaacggcacccucgucaagaccaucaccaacgaccagaucgaggucaccaacgccaccgagcucguccagaacuccuccaccggccgcaucugcgacuccccccaccagauccucgacggcgagaacugcacccucaucgacgcccuccucggcgacccccacugcgacggcuuccagaacaaggagugggaccucuucgucgagcgcuccaaggccuacuccaacugcuaccccuacgacguccccgacuacgccucccuccgcucccucgucgccuccuccggcacccucgaguucaacaacgaguccuucaacuggaccggcgucgcccagaacggcaccuccuccgccugcaagcgccgcuccaucaaguccuucuucucccgccucaacuggcuccaccagcucaaguacaaguaccccgcccucaacgucaccaugcccaacaacgagaaguucgacaagcucuacaucuggggcguccaccaccccuccaccgacuccgaccagaccucccucuacgcccaggccuccggccgcgucaccgucuccaccaagcgcucccagcagaccgucauccccaacaucggcucccgccccuggguccgcggcgucuccucccgcaucuccaucuacuggaccaucgucaagcccggcgacauccuccucaucaacuccaccggcaaccucaucgccccccgcggcuacuucaagauccgcuccggcaaguccuccaucaugcgcuccgacgcccccaucggcaagugcaacuccgagugcaucacccccaacggcuccauccccaacgacaagcccuuccagaacgucaaccgcaucaccuacggcgccugcccccgcuacgucaagcagaacacccucaagcucgccaccggcaugcgcaacguccccgagaagcagacccgcggcaucuucggcgccaucgccggcuucaucgagaacggcugggagggcauggucgacggcugguacggcuuccgccaccagaacuccgagggcaccggccaggccgccgaccucaaguccacccaggccgccaucaaccagaucaacggcaagcucaaccgccucaucgagaagaccaacgagaaguuccaccagaucgagaaggaguucuccgaggucgagggccgcauccaggaccucgagaaguacgucgaggacaccaagaucgaccucugguccuacaacgccgagcuccucgucgcccucgagaaccagcacaccaucgaccucaccgacuccgagaugaacaagcucuucgagcgcacccgcaagcagcuccgcgagaacgccgaggacaugggcaacggcugcuucaagaucuaccacaagugcgacaacgccugcaucggcuccauccgcaacggcaccuacgaccacgacgucuaccgcgacgaggcccucaacaaccgcuuccagaucaagggcgucgagcucaaguccggcuacaaggacuggauccucuggaucuccuucgccaucuccugcuuccuccucugcgucguccuccucggcuucaucaugugggccugccagaagggcaacauccgcugcaacaucugcaucuga

SEQ ID NO: 108825 - RNA, 1701 nt, Artificial Sequence
  derived and/or modified CDS sequence (opt2) from hemagglutinin__InfluenzaA__AIW60695
augaagaccaucaucgcccucuccuacauccucugccucgucuucgcccagaagcuccccggcaacgacaacuccaccgccacccucugccucggccaccacgccguccccaacggcacccucgucaagaccaucaccaacgaccagaucgaggucaccaacgccaccgagcucguccaguccuccuccaccggcggcaucugcgacuccccccaccagauccucgacggcgagaacugcacccucaucgacgcccuccucggcgacccccacugcgacggcuuccagaacaaggagugggaccucuucgucgagcgcuccaaggccuacuccaacugcuaccccuacgacguccccgacuacgccucccuccgcucccucgucgccuccuccggcacccucgaguucaacaacgaguccuucaacuggaccggcgucgcccagaacggcaccuccuccgccugcaagcgccgcuccaacaaguccuucuucucccgccucaacuggcuccaccagcucaacuacaaguaccccgcccucaacgucaccaugcccaacaacgagaaguucgacaagcucuacaucuggggcguccaccaccccuccaccgacuccgaccagaucuccaucuacgcccaggcccccggccgcgucaccgucuccaccaagcgcucccagcagaccgucauccccaacaucggcucccgccccuggguccgcggcgucuccuccaucaucuccaucuacuggaccaucgucaagcccggcgacauccuccucaucaacugcaccggcaaccucaucgccccccgcggcuacuucaagauccgcuccggcaaguccuccaucaugcgcuccgacgccuccaucggcaagugcaacuccgagugcaucacccccaacggcuccauccccaacgacaagcccuuccagaacgucaaccgcaucaccuacggcgccugcccccgcuacgucaagcagaacacccucaagcucgccaccggcaugcgcaacguccccgagaagcagacccgcggcaucuucggcgccaucgccggcuucaucgagaacggcugggagggcauggucgacggcugguacggcuuccgccaccagaacuccgagggcaccggccaggccgccgaccucaaguccacccaggccgccaucaaccagaucaacggcaagcucaaccgccucaucgagaagaccaacgagaaguuccaccagaucgagaaggaguucuccgaggucgagggccgcauccaggaccucgagaaguacgucgaggacaccaagaucgaccucugguccuacaacgccgagcuccucgucgcccucgagaaccagcacaccaucgaccucaccgacuccgagaugaacaagcucuucgagcgcaccaagaagcagcuccgcgagaacgccgaggacaugggcaacggcugcuucaagaucuaccacaagugcgacaacgccugcaucggcuccauccgcaacggcaccuacgaccacgacgucuaccgcgacgaggcccucaacaaccgcuuccagaucaagggcgucgagcucaaguccggcuacaaggacuggauccucuggaucuccuucgccaucuccugcuuccuccucugcgucguccuccucggcuucaucaugugggccugccagaagggcaacauccgcugcaacaucugcaucuga

SEQ ID NO: 108826 - RNA, 1701 nt, Artificial Sequence
  derived and/or modified CDS sequence (opt2) from hemagglutinin__InfluenzaA__AIW60696
augaagaccaucaucgcccucuccuacauccucugccucgucuucgcccagaagcuccccggcaacgacaacuccaccgccacccucugccucggccaccacgccguccccaacggcacccucgucaagaccaucaccaacgaccagaucgaggucaccaacgccaccgagcucguccaguccuccuccaccggcggcaucugcgacuccccccaccagauccucgacggcgagaacugcacccucaucgacgcccuccucggcgacccccacugcgacggcuuccagaacaaggagugggaccucuucgucgagcgcuccaaggccuacuccaacugcuaccccuacgacguccccgacuacgccucccuccgcucccucgucgccuccuccggcacccucgaguucaacaacgaguccuucaacuggaccggcgucgaccagaacggcaccuccuccgccugcaagcgccgcuccaacaaguccuucuucucccgccucaacuggcuccaccagcucaaguacaaguaccccgcccucaacgucgccaugcccaacaacgagaaguucgacaagcucuacaucuggggcguccaccaccccuccaccgacuccgaccagaucucccucuacgcccaggcccccggccgcgucaccgucuccaccaagcgcucccagcagaccgucauccccaacaucggcucccgccccuggguccgcggcgucuccucccgcaucuccaucuacuggaccaucgucaagcccggcgacauccuccucaucaacugcaccggcaaccucaucgccccccgcggcuacuucaagauccgcuccggcaaguccuccaucaugcgcuccgacgccuccaucggcaagugcaacuccgagugcaucacccccaacggcuccauccccaacgacaagcccuuccagaacgucaaccgcaucaccuacggcgccugcccccgcuacgucaagcagaacacccucaagcucgccaccggcaugcgcaacguccccgagaagcagacccgcggcaucuucggcgccaucgccggcuucaucgagaacggcugggagggcauggucgacggcugguacggcuuccgccaccagaacuccgagggcaccggccaggccgccgaccucaaguccacccaggccgccaucaaccagaucaacggcaagcucaaccgccucaucgagaagaccaacgagaaguuccaccagaucgagaaggaguucuccgaggucgagggccgcauccaggaccucgagaaguacgucgaggacaccaagaucgaccucugguccuacaacgccgagcuccucgucgcccucgagaaccagcacaccaucgaccucaccgacuccgagaugaacaagcucuucgagcgcaccaagaagcagcuccgcgagaacgccgaggacaugggcaacggcugcuucaagaucuaccacaagugcgacaacgccugcaucggcuccauccgcaacggcaccuacgaccacgacgucuaccgcgacgaggcccucaacaaccgcuuccagaucaagggcgucgagcucaaguccggcuacaaggacuggauccucuggaucuccuucgccaucuccugcuuccuccucugcgucguccuccucggcuucaucaugugggccugccagaagggcaacauccgcugcaacaucugcaucuga

SEQ ID NO: 108827 - RNA, 1701 nt, Artificial Sequence
  derived and/or modified CDS sequence (opt2) from hemagglutinin__InfluenzaA__AIW60697
augaagaccaucaucgcccucuccuacauccucugccucgucuucgcccagaagcuccccggcaacgacaacuccaccgccacccucugccucggccaccacgccguccccaacggcaccaucgucaagaccaucaccaacgaccagaucgaggucaccaacgccaccgagcucguccaguccuccuccaccggcggcaucugcgacuccccccaccagauccucgacggcgagaacugcacccucaucgacgcccuccucggcgacccccagugcgacggcuuccagaacaagaagugggaccucuucgucgagcgcuccaaggccuacuccaacugcuaccccuacgacguccccgaccacgccucccuccgcucccucgucgccuccuccggcacccucgaguucaacaacgaguccuucgacuggaccggcgucacccagaacggcaccuccuccuccugcaagcgccgcuccaacaaguccuucuucucccgccucaacuggcucacccaccucaaguacaaguaccccgcccucaacgucaccaugcccaacaacgagaaguucgacaagcucuacaucuggggcguccaccaccccgacaccgacuccguccagaucucccucuacgcccaggccuccggccgcaucaccgucuccaccaagcgcucccagcagaccgucauccccaacaucggcucccgcccccgcguccgcgacaucuccucccgcaucuccaucuacuggaccaucgucaagcccggcgacauccuccucaucaacuccaccggcaaccucaucgccccccgcggcuacuucaagauccgcuccggcaaguccuccaucaugcgcuccgacgcccccaucggcaagugcaacuccgagugcaucacccccaacggcuccauccccaacgacaagcccuuccagaacgucaaccgcaucaccuacggcgccugcccccgcuacgucaagcagaacacccucaagcucgccaccggcaugcgcaacguccccgagaagcagacccgcggcaucuucggcgccaucgccggcuucaucgagaacggcugggagggcauggucgacggcugguacggcuuccgccaccagaacuccgagggcaccggccaggccgccgaccucaaguccacccaggccgccaucaaccagaucaacggcaagcucaaccgccucaucggcaagaccaacgagaaguuccaccagaucgagaaggaguucuccgaggucgagggccgcauccaggaccucgagaaguacgucgaggacaccaagaucgaccucugguccuacaacgccgagcuccucgucgcccucgagaaccagcacaccaucgaccucaccgacuccgagaugaacaagcucuucgagcgcaccaagaagcagcuccgcgagaacgccgaggacaugggcaacggcugcuucaagaucuaccacaagugcgacaacgccugcaucggcuccauccgcaacggcaccuacgaccacgacgucuaccgcgacgaggcccucaacaaccgcuuccagaucaagggcgucgagcucaaguccggcuacaaggacuggauccucuggaucuccuucgccaucuccugcuuccuccucugcgucgcccuccucggcuucaucaugugggccugccagaagggcaacauccgcugcaacaucugcaucuga

SEQ ID NO: 108828 - RNA, 1701 nt, Artificial Sequence
  derived and/or modified CDS sequence (opt2) from hemagglutinin__InfluenzaA__AIW60698
augaagaccaucaucgcccucuccuacauccucugccucgucuucgcccagaagcuccccggcaacgacaacuccaccgccacccucugccucggccaccacgccguccccaacggcaccaucgucaagaccaucaccaacgaccagaucgaggucaccaacgccaccgagcucguccaguccuccuccaccggcggcaucugcgacuccccccaccagauccucgacggcgagaacugcacccucaucgacgcccuccucggcgacccccagugcgacggcuuccagaacaagaagugggaccucuucgucgagcgcuccaaggccuacuccaacugcuaccccuacgacguccccgaccacgccucccuccgcucccucgucgccuccuccggcacccucgaguucaacaacgaguccuucgacuggaccggcgucacccagaacggcaccuccuccgccugcaagcgccgcuccaacaaguccuucuucucccgccucaacuggcucacccaccucaaguacaaguaccccgcccucaacgucaccaugcccaacaacgagaaguucgacaagcucuacaucuggggcguccaccaccccggcaccgacuccgaccagaucucccucuacgcccaggccuccggccgcaucaccgucuccaccaagcgcucccagcagaccgucauccccaacaucggcucccgcccccgcguccgcgacaucuccucccgcaucuccaucuacuggaccaucgucaagcccggcgacauccuccucaucaacuccaccggcaaccucaucgccccccgcggcuacuucaagauccgcuccggcaaguccuccaucaugcgcuccgacgcccccaucggcaagugcaacuccgagugcaucacccccaacggcuccauccccaacgacaagcccuuccagaacgucaaccgcaucaccuacggcgccugcccccgcuacgucaagcagaacacccucaagcucgccaccggcaugcgcaacguccccgagaagcagacccgcggcaucuucggcgccaucgccggcuucaucgagaacggcugggagggcauggucgacggcugguacggcuuccgccaccagaacuccgagggcaccggccaggccgccgaccucaaguccacccaggccgccaucaaccagaucaacggcaagcucaaccgccucaucggcaagaccaacgagaaguuccaccagaucgagaaggaguucuccgaggucgagggccgcauccaggaccucgagaaguacgucgaggacaccaagaucgaccucugguccuacaacgccgagcuccucgucgcccucgagaaccagcacaccaucgaccucaccgacuccgagaugaacaagcucuucgagcgcaccaagaagcagcuccgcgagaacgccgaggacaugggcaacggcugcuucaagaucuaccacaagugcgacaacgccugcaucggcuccauccgcaacggcaccuacgaccacgacgucuaccgcgacgaggcccucaacaaccgcuuccagaucaagggcgucgagcucaaguccggcuacaaggacuggauccucuggaucuccuucgccaucuccugcuuccuccucugcgucgcccuccucggcuucaucaugugggccugccagaagggcaacauccgcugcaacaucugcaucuga

SEQ ID NO: 108829 - RNA, 1701 nt, Artificial Sequence
  derived and/or modified CDS sequence (opt2) from hemagglutinin__InfluenzaA__AIW60699
augaagaccaucaucgcccucuccuacauccucugccucgucuucgcccagaagcuccccggcaacgacaacuccaccgccacccucugcaucggccaccacgccguccccaacggcaccaucgucaagaccaucaccaacgaccagaucgaggucaccaacgccaccgagcucguccaguccuccuccaccggcggcaucugcgacuccccccaccagauccucgacggcgagaacugcacccucaucgacgcccuccucggcgacccccagugcgacggcuuccagaacaagaagugggaccucuucgucgagcgcuccaaggccuacuccaacugcuaccccuacgacguccccgacuacgccucccuccgcucccucaucgccuccuccggcacccucgaguucaacaacgaguccuucaacuggaccggcgucacccagaacggcaccuccuccgccugcaagcgccgcuccaacaacuccuucuucucccgccucaacuggcucacccaccucaaguucaaguaccccgcccucaacgucaccaugcccaacaacgaggaguucgacaagcucuacaucuggggcguccaccaccccgucaccgacaacgaccagaucucccucuacgcccaggccuccggcaagaucaccgucuccaccaagcgcucccagcagaccgucauccccaacaucggcucccgcccccgcguccgcgacauccccucccgcaucuccaucuacuggaccaucgucaagcccggcgacauccuccucaucaaguccaccggcaaccucaucgccccccgcggcuacuucaagauccgcuccggcaaguccuccaucaugcgcuccgacgcccccaucggcaagugcaacuccgagugcaucacccccaacggcuccauccccaacgacaagcccuuccagaacgucaaccgcaucaccuacggcgccugcccccgcuacgucaagcagaacacccucaagcucgccaccggcaugcgcaacguccccgagaagcagacccgcggcaucuucggcgccaucgccggcuucaucgagaacggcugggagggcauggucgacggcugguacggcuuccgccaccagaacuccgagggcaucggccaggccgccgaccucaaguccacccaggccgccaucgaccagaucaacggcaagcucaaccgccucaucggcaagaccaacgagaaguuccaccagaucgagaaggaguucuccgaggucgagggccgcauccaggaccucgagaaguacgucgaggacaccaagaucgaccucugguccuacaacgccgagcuccucgucgcccucgagaaccagcacaccaucgaccucaccgacuccgagaugaacaagcucuucgaggagaccaagaagcagcuccgcgagaacgccgaggacaugggcaacggcugcuucaagaucuaccacaagugcgacaacgccugcaucggcuccauccgcaacggcaccuacgaccacgacgucuaccgcgacgaggcccucaacaaccgcuuccagaucaagggcgucgagcucaaguccggcuacaaggacuggauccucuggaucuccuucgccaucuccugcuuccuccucugcgucgcccuccucggcuucaucaugugggccugccagaagggcaacauccgcugcaacaucugcaucuga

SEQ ID NO: 108830 - RNA, 1701 nt, Artificial Sequence
  derived and/or modified CDS sequence (opt2) from hemagglutinin__InfluenzaA__AIW60700
augaagaccaucaucgcccucuccuacauccucugccucgucuucgcccagaagcuccccggcaacgacaacuccaccgccacccucugcaucggccaccacgccguccccaacggcaccaucgucaagaccaucaccaacgaccagaucgaggucaccaacgccaccgagcucguccaguccuccuccaccggcggcaucugcgacuccccccaccagauccucgacggcgagaacugcacccucaucgacgcccuccucggcgacccccagugcgacggcuuccagaacaagaagugggaccucuucgucgagcgcuccaaggccuacuccaacugcuaccccuacgacguccccgacuacgccucccuccgcucccucaucgccuccuccggcacccucgaguucaacaacgaguccuucaacuggaccggcgucacccagaacggcaccuccuccgccugcaagcgccgcuccaacaacuccuucuucucccgccucaacuggcucacccaccucaaguucaaguaccccgcccucaacgucaccaugcccaacaacgaggaguucgacaagcucuacaucuggggcguccaccaccccggcaccgacaacgaccagaucucccucuacgcccaggccuccggcaagaucaccgucuccaccaagcgcucccagcagaccgucauccccaacaucggcucccgcccccgcguccgcgacauccccucccgcaucuccaucuacuggaccaucgucaagcccggcgacauccuccucaucaacuccaccggcaaccucaucgccccccgcggcuacuucaagauccgcuccggcaaguccuccaucaugcgcuccgacgcccccaucggcaagugcaacuccgagugcaucacccccaacggcuccauccccaacgacaagcccuuccagaacgucaaccgcaucaccuacggcgccugcccccgcuacgucaagcagaacacccucaagcucgccaccggcaugcgcaacguccccgagaagcagacccgcggcaucuucggcgccaucgccggcuucaucgagaacggcugggagggcauggucgacggcugguacggcuuccgccaccagaacuccgagggcaucggccaggccgccgaccucaaguccacccaggccgccaucgaccagaucaacggcaagcucaaccgccucaucggcaagaccaacgagaaguuccaccagaucgagaaggaguucuccgaggucgagggccgcauccaggaccucgagaaguacgucgaggacaccaagaucgaccucugguccuacaacgccgagcuccucgucgcccucgagaaccagcacaccaucgaccucaccgacuccgagaugaacaagcucuucgaggagaccaagaagcagcuccgcgagaacgccgaggacaugggcaacggcugcuucaagaucuaccacaagugcgacaacgccugcaucggcuccauccgcaacggcaccuacgaccacgacgucuaccgcgacgaggcccucaacaaccgcuuccagaucaagggcgucgagcucaaguccggcuacaaggacuggauccucuggaucuccuucgccaucuccugcuuccuccucugcgucgcccuccucggcuucaucaugugggccugccagaagggcaacauccgcugcaacaucugcaucuga

SEQ ID NO: 108831 - RNA, 1701 nt, Artificial Sequence
  derived and/or modified CDS sequence (opt2) from hemagglutinin__InfluenzaA__AIW60701
augaagaccaucaucgcccucuccuacauccucugccucgucuucacccagaagcuccccggcaacgacaacuccaccgccacccucugccucggccaccacgccguccccaacggcaccaucgucaagaccaucaccaacgaccagaucgaggucaccaacgccaccgagcucguccaguccuccuccaccggcgagaucugcgacuccccccaccagauccucgacggcgagaacugcacccucaucgacgcccuccucggcgacccccagugcgacggcuuccagaacaagaagugggaccucuucgucgagcgcuccaaggccuacuccaacugcuaccccuacgacguccccgacuacgccucccuccgcucccucgucgccuccuccggcacccucgaguucaacaacgaguccuucaacuggaccggcgucacccagaacggcaccuccuccgccugcauccgccgcuccaacaacuccuucuucucccgccucaacuggcucacccaccucaaguucaaguaccccgcccucaacgucaccaugcccaacaacgagaaguucgacaagcucuacaucuggggcguccaccaccccggcaccgacaacgaccagaucuuccccuacgcccaggccuccggccgcaucaccgucuccaccaagcgcucccagcagaccgucauccccaacaucggcucccgcccccgcguccgcaacauccccucccgcaucuccaucuacuggaccaucgucaagcccggcgacauccuccucaucaacuccaccggcaaccucaucgccccccgcggcuacuucaagauccgcuccggcaaguccuccaucaugcgcuccgacgcccccaucggcaagugcaacuccgagugcaucacccccaacggcuccauccccaacgacaagcccuuccagaacgucaaccgcaucaccuacggcgccugcccccgcuacgucaagcagaacacccucaagcucgccaccggcaugcgcaacguccccgagaagcagacccgcggcaucuucggcgccaucgccggcuucaucgagaacggcugggagggcauggucgacggcugguacggcuuccgccaccagaacuccgagggcaucggccaggccgccgaccucaaguccacccaggccgccaucgaccagaucaacggcaagcucaaccgccucaucggcaagaccaacgagaaguuccaccagaucgagaaggaguucuccgaggucgagggccgcauccaggaccucgagaaguacgucgaggacaccaagaucgaccucugguccuacaacgccgagcuccucgucgcccucgagaaccagcacaccaucgaccucaccgacuccgagaugaacaagcucuucgagaagaccaagaagcagcuccgcgagaacgccgaggacaugggcaacggcugcuucaagaucuaccacaagugcgacaacgccugcaucggcuccauccgcaacggcaccuacgaccacgacgucuaccgcgacgaggcccucaacaaccgcuuccagaucaagggcgucgagcucaaguccggcuacaaggacuggauccucuggaucuccuucgccaucuccugcuuccuccucugcgucgcccuccucggcuucaucaugugggccugccagaagggcaacauccgcugcaacaucugcaucuga

SEQ ID NO: 108832 - RNA, 1701 nt, Artificial Sequence
  derived and/or modified CDS sequence (opt2) from hemagglutinin__InfluenzaA__AIW60702
augaagaccaucaucgcccucuccuacauccucugccucgucuucacccagaagcuccccggcaacgacaacuccaccgccacccucugccucggccaccacgccguccccaacggcaccaucgucaagaccaucaccaacgaccagaucgaggucaccaacgccaccgagcucguccaguccuccuccaccggcgagaucugcgacuccccccaccagauccucgacggcgagaacugcacccucaucgacgcccuccucggcgacccccagugcgacggcuuccagaacaagaagugggaccucuucgucgagcgcuccaaggccuacuccaacugcuaccccuacgacguccccgacuacgccucccuccgcucccucgucgccuccuccggcacccucgaguucaacaacgaguccuucaacuggaccggcgucacccagaacggcaccuccuccgccugcauccgccgcuccaacaacuccuucuucucccgccucaacuggcucacccaccucaaguucaaguaccccgcccucaacgucaccaugcccaacaacgagaaguucgacaagcucuacaucuggggcguccaccaccccggcaccgacaacgaccagaucuuccucuacgcccaggccuccggccgcaucaccgucuccaccaagcgcucccagcagaccgucauccccaacaucggcucccgcccccgcguccgcaacauccccucccgcaucuccaucuacuggaccaucgucaagcccggcgacauccuccucaucaacuccaccggcaaccucaucgccccccgcggcuacuucaagauccgcuccggcaaguccuccaucaugcgcuccgacgcccccaucggcaagugcaacuccgagugcaucacccccaacggcuccauccccaacgacaagcccuuccagaacgucaaccgcaucaccuacggcgccugcccccgcuacgucaagcagaacacccucaagcucgccaccggcaugcgcaacguccccgagaagcagacccgcggcaucuucggcgccaucgccggcuucaucgagaacggcugggagggcauggucgacggcugguacggcuuccgccaccagaacuccgagggcaucggccaggccgccgaccucaaguccacccaggccgccaucgaccagaucaacggcaagcucaaccgccucaucggcaagaccaacgagaaguuccaccagaucgagaaggaguucuccgaggucgagggccgcauccaggaccucgagaaguacgucgaggacaccaagaucgaccucugguccuacaacgccgagcuccucgucgcccucgagaaccagcacaccaucgaccucaccgacuccgagaugaacaagcucuucgagaagaccaagaagcagcuccgcgagaacgccgaggacaugggcaacggcugcuucaagaucuaccacaagugcgacaacgccugcaucggcuccauccgcaacggcaccuacgaccacgacgucuaccgcgacgaggcccucaacaaccgcuuccagaucaagggcgucgagcucaaguccggcuacaaggacuggauccucuggaucuccuucgccaucuccugcuuccuccucugcgucgcccuccucggcuucaucaugugggccugccagaagggcaacauccgcugcaacaucugcaucuga

SEQ ID NO: 108833 - RNA, 1701 nt, Artificial Sequence; identical to SEQ ID NO: 108577
  derived and/or modified CDS sequence (opt2) from hemagglutinin__InfluenzaA__AIZ07211

SEQ ID NO: 108834 - RNA, 1701 nt, Artificial Sequence
  derived and/or modified CDS sequence (opt2) from hemagglutinin__InfluenzaA__AIZ07212
augaagaccaucauggcccucuccuacauccucugccucgucuucgcccagaagcuccccggcaacgacaacuccaccgccacccucugccucggccaccacgccguccccaacggcaccaucgucaagaccaucaccaacgaccgcaucgaggucaccaacgccaccgagcucguccagaacuccuccaucggcgagaucugcgacuccccccaccagauccucgacggcgagaacugcacccucaucgacgcccuccucggcgacccccagugcgacggcuuccagaacaagaagugggaccucuucgucgagcgcuccaaggccuacuccaacugcuaccccuacgacguccccgacuacgccucccuccgcucccucgucgccuccuccggcacccucgaguucaacaacgaguccuucaacugggccggcgucacccagaacggcaccuccuccgccugcauccgcggcuccaacuccuccuucuucucccgccucaacuggcucacccacuccaacuucaaguaccccgcccucaacgucaccaugcccaacaacgagcaguucgacaagcucuacaucuggggcguccaccaccccggcaccgacaaggaccagaucuuccucuacgcccaguccuccggccgcaucaccgucuccaccaagcgcucccagcaggccgucauccccaacaucggcucccgcccccgcauccgcaacauccccucccgcaucuccaucuacuggaccaucgucaagcccggcgacauccuccucaucaacuccaccggcaaccucaucgccccccgcggcuacuucaagauccgcuccggcaaguccuccaucaugcgcuccgacgcccccaucggcaagugcaaguccgagugcaucacccccaacggcuccauccccaacgacaagcccuuccagaacgucaaccgcaucaccuacggcgccugcccccgcuacgucaagcaguccacccucaagcucgccaccggcaugcgcaacguccccgagaagcagacccgcggcaucuucggcgccaucgccggcuucaucgagaacggcugggagggcaugauggacggcugguacggcuuccgccaccagaacuccgagggccgcggccaggccgccgaccucaaguccacccaggccgccaucgaccagaucaacggcaagcucaaccgccucaucggcaagaccaacgagaaguuccaccagaucgagaaggaguucuccgaggucgagggccgcauccaggaccucgagaaguacgucgaggacaccaagaucgaccucugguccuacaacgccgagcuccucgucgcccucgagaaccagcacaccaucgaccucaccgacuccgagaugaacaagcucuucgagaagaccaagaagcagcuccgcgagaacgccgaggacaugggcaacggcugcuucaagaucuaccacaagugcgacaacgccugcaucggcuccauccgcaacggcaccuacgaccacgacgucuaccgcgacgaggcccucaacaaccgcuuccagaucaagggcgucgagcucaaguccggcuacaaggacuggauccucuggaucuccuucgccaucuccugcuuccuccucugcgucgcccuccucggcuucaucaugugggccugccagaagggcaacauccgcugcaacaucugcaucuga

SEQ ID NO: 108835 - RNA, 1683 nt, Artificial Sequence
  derived and/or modified CDS sequence (opt2) from hemagglutinin__InfluenzaA__AJD78175
auggagaccgccucccucaucaccauccuccucgucgucaccgucuccaacgccgacaagaucugcaucggcuaccaguccaccaacuccaccgagaccgucgacacccucaccgagaacaacguccccgucacccacgccaaggagcuccuccacaccgagcacaacggcaugcucugcgccaccucccucggccagccccucauccucgacaccugcaccaucgagggccucaucuacggcaaccccuccugcgaccuccuccucggcggccgcgagugguccuacaucgucgagcgccccuccgccgccaacggccucugcuaccccggcaacgucgagaaccucgaggagcuccgcucccucuucuccuccgcccgcuccuaccagcgcauccagaucuuccccgacaccaucuggaacgucuccuacuccggcaccuccaaggccugcuccgacuccuucuaccgcuccaugcgcuggcucacccagaaggacaacaccuaccccauccaggacgcccaguacaccaacaaccagggcaagaacauccucuucauguggggcaucaaccacccccccaccgacaccgcccagaccaaccucuacacccgcaccgacaccaccaccuccgucgccaccgaggagaucaaccgcaccuucaagccccucaucggcccccgcccccucgucaacggccucaugggccgcaucaacuacuacugguccguccucaagcccggccagacccuccgcaucaaguccaacggcaaccucaucgcccccugguacggccacauccucuccggcgagucccacggccgcauccucaagaccgaccucaagcgcggcuccugcaccguccagugccagaccgagaagggcggccucaacaccacccuccccuuccagaacgucuccaaguacgccuucggcaacugcuccaaguacaucggcaucaagucccucaagcucgccgucggccuccgcaacguccccucccgcuccucccgcggccucuucggcgccaucgccggcuucaucgagggcggcugguccggccucgucgccggcugguacggcuuccagcacuccaacgaccagggcgucggcauggccgccgaccgcgacuccacccagaaggccaucgacaagaucaccuccaaggucaacaacaucgucgacaagaugaacaagcaguacgagaucaucgaccacgaguucaacgaggucgagacccgccucaacaugaucaacaacaagaucgacgaccagauccaggacaucugggccuacaacgccgagcuccucguccuccucgagaaccagaagacccucgacgagcacgacgccaacgucaacaaccucuacaacaaggucaagcgcgcccucggcuccaacgccgucgaggacggcaagggcugcuucgagcucuaccacaagugcgacgaccagugcauggagaccauccgcaacggcaccuacaaccgccgcaaguaccaggaggaguccaagcucgagcgccagaagaucgagggcgucaagcucgaguccgagggcaccuacaagauccucaccaucuacuccaccgucgccuccucccucgucaucgccaugggcuucgccgccuuccucuucugggccauguccaacggcuccugccgcugcaacaucugcaucuga

SEQ ID NO: 108836 - RNA, 1683 nt, Artificial Sequence
  derived and/or modified CDS sequence (opt2) from hemagglutinin__InfluenzaA__AJD78187
auggagaccgccucccucaucaccauccuccucgucgucaccgucuccaacgccgacaagaucugcaucggcuaccaguccaccaacuccaccgagaccgucgacacccucaccgagaacaacguccccgucacccacgccaaggagcuccuccacaccgagcacaacggcaugcucugcgccaccucccucggccacccccucauccucgacaccugcaccaucgagggccucaucuacggcaaccccuccugcgaccuccuccucggcggccgcgagugguccuacaucgucgagcgccccuccgccgucaacggccucugcuaccccggcaacgucgagaaccucgaggagcuccgcucccucuucuccuccgcccgcuccuaccagcgcauccagaucuuccccgacaccaucuggaacgucuccuacuccggcaccuccaagaccugcuccgacuccuucuaccgcuccaugcgcuggcucacccagaaggacaacgccuaccccauccaggacgcccaguacaccaacaaccagggcaagaacauccucuucauguggggcaucaaccacccccccaccgacaccacccagaccaaccucuacacccgcaccgacaccaccaccuccgucgccaccgaggagaucaaccgcaccuucaagccccucaucggcccccgcccccucgucaacggccucaugggccgcaucaacuacuacugguccguccucaagcccggccagacccuccgcaucaaguccaacggcaaccucaucgcccccugguacggccacauccucuccggcgagucccacggccgcauccucaagaccgaccucaagcgcggcuccugcaccguccagugccagaccgagaagggcggccucaacaccacccuccccuuccagaacgucuccaaguacgccuucggcaacugcuccaaguacaucggcaucaagucccucaagcucgccgucggccuccgcaacguccccucccgcuccucccgcggccucuucggcgccaucgccggcuucaucgagggcggcugguccggccucgucgccggcugguacggcuuccagcacuccaacgaccagggcgucggcauggccgccgaccgcgacuccacccagaaggccaucgacaagaucaccuccaaggucaacaacaucgucgacaagaugaacaagcaguacgagaucaucgaccacgaguucuccgaggucgagacccgccucaacaugaucaacaacaagaucgacgaccagauccaggacaucugggccuacaacgccgagcuccucguccuccucgagaaccagaagacccucgacgagcacgacgccaacgucaacaaccucuacaacaaggucaagcgcgcccucggcuccaacgccgucgaggacggcaagggcugcuucgagcucuaccacaagugcgacgaccagugcauggagaccauccgcaacggcaccuacaaccgccgcaaguaccaggaggaguccaagcucgagcgccagaagaucgagggcgucaagcucgaguccgagggcaccuacaagauccucaccaucuacuccaccgucgccuccucccucgucaucgccaugggcuucgccgccuuccucuucugggccauguccaacggcuccugccgcugcaacaucugcaucuga

SEQ ID NO: 108837 - RNA, 1683 nt, Artificial Sequence
  derived and/or modified CDS sequence (opt2) from hemagglutinin__InfluenzaA__AJD78199
auggagaccgucucccucaucaccauccuccucgucgccaccgucuccaacgccgacaagaucugcaucggcuaccaguccaccaacuccaccgagaccgucgacacccucaccgagaacaacguccccgucacccacgccaaggagcuccuccacaccgagcacaacggcaugcucugcgccaccucccucggccagccccucauccucgacaccugcaccaucgagggccucaucuacggcaaccccuccugcgaccucucccucgagggccgcgagugguccuacaucgucgagcgccccuccgccgucaacggccucugcuaccccggcaacgucgagaaccucgaggagcuccgcucccucuucuccuccgcccgcuccuaccagcgcauccagaucuuccccgacaccaucuggaacgucuccuacgacggcaccuccaccgccugcuccggcuccuucuaccgcuccaugcgcuggcucacccgcaagaacggcgacuaccccauccaggacgcccaguacaccaacaaccagggcaagaacauccucuucauguggggcaucaaccacccccccaccgacaccacccagcgcgaccucuacacccgcaccgacaccaccaccuccgucgccaccgaggagaucaaccgcaucuucaagccccucaucggcccccgcccccucgucaacggccucaugggccgcaucgacuacuacugguccguccucaagcccggccagacccuccgcaucaaguccgacggcaaccucaucgcccccugguacggccacauccucuccggcgagucccacggccgcauccucaagaccgaccucaagcgcggcuccugcaccguccagugccagaccgagaagggcggccucaacaccacccuccccuuccagaacgucuccaaguacgccuucggcaacugcuccaaguacaucggcaucaagucccucaagcucgccgucggccuccgcaacguccccucccgcuccucccgcggccucuucggcgccaucgccggcuucaucgagggcggcugguccggccucgucgccggcugguacggcuuccagcacuccaacgaccagggcgucggcauggccgccgaccgcgacuccacccagaaggccaucgacaagaucaccuccaaggucaacaacaucgucgacaagaugaacaagcaguacgagaucaucgaccacgaguucuccgaggucgagacccgccucaacaugaucaacaacaagaucgacgaccagauccaggacaucugggccuacaacgccgagcuccucguccuccucgagaaccagaagacccucgacgagcacgacgccaacgucaacaaccucuacaacaaggucaagcgcgcccucggcuccaacgccgucgaggacggcaagggcugcuucgagcucuaccacaagugcgacgaccagugcauggagaccauccgcaacggcaccuacaaccgccgcaaguaccaggaggaguccaagcucgagcgccagaagaucgagggcgucaagcucgaguccgagggcaccuacaagauccucaccaucuacuccaccgucgccuccucccucgucaucgccaugggcuucgccgccuuccucuucugggccauguccaacggcuccugccgcugcaacaucugcaucuga

SEQ ID NO: 108838 - RNA, 1683 nt, Artificial Sequence
  derived and/or modified CDS sequence (opt2) from hemagglutinin__InfluenzaA__AJD78211
auggagaccgucucccucaucaccauccuccucgucgccaccgucuccaacgccgacaagaucugcaucggcuaccaguccaccaacuccaccgagaccgucgacacccucaccgagaacaacguccccgucacccacgccaaggagcuccuccacaccgagcacaacggcaugcucugcgccaccucccucggccagccccucauccucgacaccugcaccaucgagggccucaucuacggcaaccccuccugcgaccucucccucgagggccgcgagugguccuacaucgucgagcgccccuccgccgucaacggccucugcuaccccggcaacgucgagaaccucgaggagcuccgcucccucuucuccuccgcccgcuccuaccagcgcauccagaucuuccccgacaccaucuggaacgucuccuacgacggcaccuccaccgccugcuccggcuccuucuaccgcuccaugcgcuggcucacccgcaagaacggcgacuaccccauccaggacgcccaguacaccaacaaccagggcaagaacauccucuucauguggggcaucaaccacccccccaccgacaccacccagcgcgaccucuacacccgcaccgacaccaccaccuccgucgccaccgaggagaucaaccgcaucuucaagccccucaucggcccccgcccccucgucaacggccucaugggccgcaucgacuacuacugguccguccucaagcccggccagacccuccgcaucaaguccgacggcaaccucaucgcccccugguacggccacauccucuccggcgagucccacggccgcauccucaagaccgaccucaagcgcggcuccugcaccguccagugccagaccgagaagggcggccucaacaccacccuccccuuccagaacgucuccaaguacgccuucggcaacugcuccaaguacaucggcaucaagucccucaagcucgccgucggccuccgcaacguccccucccgcucccgccgcggccucuucggcgccaucgccggcuucaucgagggcggcugguccggccucgucgccggcugguacggcuuccagcacuccaacgaccagggcgucggcauggccgccgaccgcgacuccacccagaaggccaucgacaagaucaccuccaaggucaacaacaucgucgacaagaugaacaagcaguacgagaucaucgaccacgaguucuccgaggucgagacccgccucaacaugaucaacaacaagaucgacgaccagauccaggacaucugggccuacaacgccgagcuccucguccuccucgagaaccagaagacccucgacgagcacgacgccaacgucaacaaccucuacaacaaggucaagcgcgcccucggcuccaacgccgucgaggacggcaagggcugcuucgagcucuaccacaagugcgacgaccagugcauggagaccauccgcaacggcaccuacaaccgccgcaaguaccaggaggaguccaagcucgagcgccagaagaucgagggcgucaagcucgaguccgagggcaccuacaagauccucaccaucuacuccaccgucgccuccucccucgucaucgccaugggcuucgccgccuuccucuucugggccauguccaacggcuccugccgcugcaacaucugcaucuga

SEQ ID NO: 108839 - RNA, 1689 nt, Artificial Sequence
  derived and/or modified CDS sequence (opt2) from hemagglutinin__InfluenzaA__AJI76401
auggccaucaucuaccucauccuccucuucgccaccguccgcggcgaccagaucugcaucggcuaccacgccaacaacuccaccgagaaggucgacaccauccucgagcgcaacgucaccgucacccacgccaaggacauccucgagaagacccacaacggcaagcucugcaagcucaacggcauccccccccucgagcucggcgacugcuccaucgccggcuggcuccucggcaaccccgagugcgaccgccuccuccgcguccccgagugguccuacaucauggagaaggagaacccccgcuacucccucugcuaccccggcucccucaacgacuacgaggagcucaagcaccuccucuccuccgucaagcacuucgagaagguccgcauccuccccaaggaccgcuggaccaaccacaccaccaccggcggcuccaaggccugcgccgucuccggcaagcccuccuucuuccgcaacauggucuggcucaccaagaagggccccaacuaccccgucgccaagggcuccuacaacaacaccuccggcgagcagaugcucaucaucuggggcguccaccaccccaucgacgaggccgagcagcgcgcccucuaccagaacgucggcaccuacgucuccgccuccaccuccacccucuacaagcgcuccauccccgagaucgccgcccgccccgaggucaacggccucggcucccgcauggaguucuccuggacccuccucgacgucugggacaccaucaacuucgaguccaccggcaaccucgucgcccccgaguacggcuucaagaucuccaagcgcggcuccuccggcaucaugaagaccgagggcacccucggcaacugcgagaccaagugccagaccccccucggcgccaucaacaccacccuccccuuccacaacguccacccccucaccaucggcgagugccccaaguacgucaaguccgagaagcucguccucgccaccggccuccgcaacgucccccagaucgagucccgcggccucuucggcgccaucgccggcuucaucgagggcggcuggcagggcauggucgacggcugguacggcuaccaccacuccaacgaccagggcuccggcuacgccgccgacaaggaguccacccagaaggccuucgacggcaucaccaacaaggucaacuccgucaucgagaagaugaacacccaguucgaggccgucggcaaggaguucaacaaccucgagaagcgccucgagaaccucaacaagcgcauggaggacggcuuccucgacgucuggaccuacaacgccgagcuccucguccucauggagaacgagcgcacccucgacuuccacgacuccaacgucaagaaccucuacgagaagguccgcaugcagcuccgcgacaacguccgcgagcucggcaacggcugcuucgaguucuaccacaagugcgacgacgagugcaugaacuccgucaagaacggcaccuacgacuaccccaaguacgaggaggaguccaagcucaagcgcaacgagaucaagggcgucaagcucuccuccaugggcgucuaccagauccucgccaucuacgccaccgucgccggcucccucucccucgccaucauggucgccggcaucuccuucuggaugugcuccaacggcucccuccagugccgcaucugcaucuga

SEQ ID NO: 108840 - RNA, 1701 nt, Artificial Sequence; identical to SEQ ID NO: 108101
  derived and/or modified CDS sequence (opt2) from hemagglutinin__InfluenzaA__AJI80137

SEQ ID NO: 108841 - RNA, 1701 nt, Artificial Sequence; identical to SEQ ID NO: 108101
  derived and/or modified CDS sequence (opt2) from hemagglutinin__InfluenzaA__AJI80149

SEQ ID NO: 108842 - RNA, 1701 nt, Artificial Sequence; identical to SEQ ID NO: 106076
  derived and/or modified CDS sequence (opt2) from hemagglutinin__InfluenzaA__AJI80161

SEQ ID NO: 108843 - RNA, 1701 nt, Artificial Sequence
  derived and/or modified CDS sequence (opt2) from hemagglutinin__InfluenzaA__AJI80172
augaagaccaucaucgcccucuccuacauccucugccucgucuucgcccagaagcuccccggcaacgacaacuccaccgccacccucugccucggccaccacgccguccccaacggcaccaucgucaagaccaucaccaacgaccgcaucgaggucaccaacgccaccgagcucguccagaacuccuccaucggcgagaucugcgacuccccccaccagauccucgacggcgagaacugcucccucaucgacgcccuccucggcgacccccagugcgacggcuuccagaacaagaagugggaccucuucgucgagcgcuccaaggccuacuccaacugcuaccccuacgacguccccgacuacgccucccuccgcucccucgucgccuccuccggcacccucgaguucaacaacgaguccuucaacugggccggcgucacccagaacggcaccuccuccgccugcauccgcggcuccaacuccuccuucuucucccgccucaacuggcucacccaccucaacuucaaguaccccgcccucaacgucaccaugcccaacaacgagcaguucgacaagcucuacaucuggggcguccaccaccccggcaccgacaaggaccagaucuuccucuacgcccaguccuccggccgcaucaccgucuccaccaagcgcucccagcaggccgucauccccaacaucggcucccgcccccgcauccgcaacauccccucccgcaucuccaucuacuggaccaucgucaagcccggcgacauccuccucaucaacuccaccggcaaccucaucgccccccgcggcuacuucaagauccgcuccggcaaguccuccaucaugcgcuccgacgcccccaucggcaagugcaaguccgagugcaucacccccaacggcuccauccccaacgacaagcccuuccagaacgucaaccgcaucaccuacggcgccugcccccgcuacgucaagcaguccacccucaagcucgccaccggcaugcgcaacguccccgagaagcagacccgcggcaucuucggcgccaucgccggcuucaucgagaacggcugggagggcauggucgacggcugguacggcuuccgccaccagaacuccgagggccgcggccaggccgccgaccucaaguccacccaggccgccaucgaccagaucaacggcaagcucaaccgccucaucggcaagaccaacgagaaguuccaccagaucgagaaggaguucuccgaggucgagggccgcauccaggaccucgagaaguacgucgaggacaccaagaucgaccucugguccuacaacgccgagcuccucgucgcccucgagaaccagcacaccaucgaccucaccgacuccgagaugaacaagcucuucgagaagaccaagaagcagcuccgcgagaacgccgaggacaugggcaacggcugcuucaagaucuaccacaagugcgacaacgccugcaucggcuccauccgcaacggcaccuacgaccacgacgucuaccgcgacgaggcccucaacaaccgcuuccagaucaagggcgucgagcucaaguccggcuacaaggacuggauccucuggaucuccuucgccaucuccugcuuccuccucugcgucgcccuccucggcuucaucaugugggccugccagaagggcaacauccgcugcaacaucugcaucuga

SEQ ID NO: 108844 - RNA, 1701 nt, Artificial Sequence
  derived and/or modified CDS sequence (opt2) from hemagglutinin__InfluenzaA__AJI80196
augaagaccaucaucgcccucuccuacauccucugccucgucuucgcccagaagcuccccggcaacgacaacuccaccgccacccucugccucggccaccacgccguccccaacggcaccaucgucaagaccaucaccaacgaccgcaucgaggucaccaacgccaccgagcucguccagaacuccuccaucggcgagaucugcgacuccccccaccagauccucgacggcgagaacugcacccucaucgacgcccuccucggcgacccccagugcgacggcuuccagaacaaggagugggaccucuucgucgagcgcuccaaggccuacuccaacugcuaccccuacgacguccccgacuacgccucccuccgcucccucgucgccuccuccggcacccucgaguucaacaacgaguccuucaacugggccggcgucacccagaacggcaccuccuccgccugcauccgcggcuccaacuccuccuucuucucccgccucaacuggcucacccaccucaacuucaaguaccccgcccucaacgucaccaugcccaacaacgagcaguucgacaagcucuacaucuggggcguccaccaccccggcaccgacaaggaccagaucuuccucuacgcccaguccuccggccgcaucaccgucuccaccaagcgcucccagcaggccgucauccccaacaucggcucccgcccccgcauccgcaacauccccucccgcaucuccaucuacuggaccaucgucaagcccggcgacauccuccucaucaacuccaccggcaaccucaucgccccccgcggcuacuucaagauccgcuccggcaaguccuccaucaugcgcuccgacgcccccaucggcaagugcaaguccgagugcaucacccccaacggcuccauccccaacgacaagcccuuccagaacaucaaccgcaucaccuacggcgccugcccccgcuacgucaagcaguccacccucaagcucgccaccggcaugcgcaacguccccgagaagcagacccgcggcaucuucggcgccaucgccggcuucaucgagaacggcugggagggcauggucgacggcugguacggcuuccgccaccagaacuccgagggccgcggccaggccgccgaccucaaguccacccaggccgccaucgaccagaucaacggcaagcucaaccgccucaucggcaagaccaacgagaaguuccaccagaucgagaaggaguucuccgaggucgagggccgcauccaggaccucgagaaguacgucgaggacaccaagaucgaccucugguccuacaacgccgaguuccucgucgcccucgagaaccagcacaccaucgaccucaccgacuccgagaugaacaagcucuucgagaagaccaagaagcagcuccgcgagaacgccgaggacaugggcaacggcugcuucaagaucuaccacaagugcgacaacgccugcaucggcuccauccgcaacggcaccuacgaccacgacgucuaccgcgacgaggcccucaacaaccgcuuccagaucaagggcgucgagcucaaguccggcuacaaggacuggauccucuggaucuccuucgccaucuccugcuuccuccucugcgucgcccuccucggcuucaucaugugggccugccagaagggcaacauccgcugcaacaucugcaucuga

SEQ ID NO: 108845 - RNA, 1701 nt, Artificial Sequence; identical to SEQ ID NO: 108651
  derived and/or modified CDS sequence (opt2) from hemagglutinin__InfluenzaA__AJI80208

SEQ ID NO: 108846 - RNA, 1701 nt, Artificial Sequence; identical to SEQ ID NO: 106030
  derived and/or modified CDS sequence (opt2) from hemagglutinin__InfluenzaA__AJI80220

SEQ ID NO: 108847 - RNA, 1701 nt, Artificial Sequence; identical to SEQ ID NO: 108843
  derived and/or modified CDS sequence (opt2) from hemagglutinin__InfluenzaA__AJI80232

SEQ ID NO: 108848 - RNA, 1701 nt, Artificial Sequence; identical to SEQ ID NO: 106030
  derived and/or modified CDS sequence (opt2) from hemagglutinin__InfluenzaA__AJI80244

SEQ ID NO: 108849 - RNA, 1701 nt, Artificial Sequence; identical to SEQ ID NO: 105894
  derived and/or modified CDS sequence (opt2) from hemagglutinin__InfluenzaA__AJI80256

SEQ ID NO: 108850 - RNA, 1701 nt, Artificial Sequence; identical to SEQ ID NO: 106030
  derived and/or modified CDS sequence (opt2) from hemagglutinin__InfluenzaA__AJI80268

SEQ ID NO: 108851 - RNA, 1701 nt, Artificial Sequence
  derived and/or modified CDS sequence (opt2) from hemagglutinin__InfluenzaA__AJI80280
augaagaccaucaucgcccucuccuacauccucugccucgucuucgcccagaagcuccccggcaacgacaacuccaccgccacccucugccucggccaccacgccguccccaacggcaccaucgucaagaccaucaccaacgaccgcaucgaggucaccaacgccaccgagcucguccagaacuccuccaucggcaagaucugcgacuccccccaccagauccucgacggcgagaacugcacccucaucgacgcccuccucggcgacccccagugcgacggcuuccagaacaaggagugggaccucuucgucgagcgcuccaaggccuacuccaacugcuaccccuacgacguccccgacuacgccucccuccgcucccucgucgccuccuccggcacccucgaguucaacaacgaguccuucaacugggccggcgucacccagaacggcaccuccuccgccugcauccgcggcuccaacuccuccuucuucucccgccucaacuggcucacccaccucaacuucaaguaccccgcccucaacgucaccaugcccaacaacgagcaguucgacaagcucuacaucuggggcguccaccaccccggcaccgacaaggaccagaucuuccucuacgcccaguccuccggccgcaucaccgucuccaccaagcgcucccagcaggccgucauccccaacaucggcucccgcccccgcauccgcaacauccccucccgcaucuccaucuacuggaccaucgucaagcccggcgacauccuccucaucaacuccaccggcaaccucaucgccccccgcggcuacuucaagauccgcuccggcaaguccuccaucaugcgcuccgacgcccccaucggcaagugcaaguccgagugcaucacccccaacggcuccauccccaacgacaagcccuuccagaacgucaaccgcaucaccuacggcgccugcccccgcuacgucaagcaguccacccucaagcucgccaccggcaugcgcaacguccccgagaagcagacccgcggcaucuucggcgccaucgccggcuucaucgagaacggcugggagggcauggucgacggcugguacggcuuccgccaccagaacuccgagggccgcggccaggccgccgaccucaaguccacccaggccgccaucgaccagaucaacggcaagcucaaccgccucaucggcaagaccaacgagaaguuccaccagaucgagaaggaguucuccgaggucgagggccgcauccaggaccucgagaaguacgucgaggacaccaagaucgaccucugguccuacaacgccgagcuccucgucgcccucgagaaccagcacaccaucgaccucaccgacuccgagaugaacaagcucuucgagaagaccaagaagcagcuccgcgagaacgccgaggacaugggcaacggcugcuucaagaucuaccacaagugcgacaacgccugcaucggcuccauccgcaacggcaccuacgaccacgacgucuaccgcgacgaggcccucaacaaccgcuuccagaucaagggcgucgagcucaaguccggcuacaaggacuggauccucuggaucuccuucgccaucuccugcuuccuccucugcgucgcccuccucggcuucaucaugugggccugccagaagggcaacauccgcugcaacaucugcaucuga

SEQ ID NO: 108852 - RNA, 1701 nt, Artificial Sequence; identical to SEQ ID NO: 108623
  derived and/or modified CDS sequence (opt2) from hemagglutinin__InfluenzaA__AJI80292

SEQ ID NO: 108853 - RNA, 1701 nt, Artificial Sequence; identical to SEQ ID NO: 108651
  derived and/or modified CDS sequence (opt2) from hemagglutinin__InfluenzaA__AJI80303

SEQ ID NO: 108854 - RNA, 1701 nt, Artificial Sequence; identical to SEQ ID NO: 108623
  derived and/or modified CDS sequence (opt2) from hemagglutinin__InfluenzaA__AJI80315

SEQ ID NO: 108855 - RNA, 1701 nt, Artificial Sequence
  derived and/or modified CDS sequence (opt2) from hemagglutinin__InfluenzaA__AJI80326
augaaggccauccucgucguccuccucuacaccuucgccaccgccaacgccgacacccucugcaucggcuaccacgccaacaacuccaccgacaccgucgacaccguccucgagaagaacgucaccgucacccacuccgucaaccuccucgaggacaagcacaacggcaagcucugcaagcuccgcggcgucgccccccuccaccucggcaagugcaacaucgccggcuggauccucggcaaccccgagugcgagucccucuccaccgccuccuccugguccuacaucgucgagaccuccuccuccgacaacggcaccugcuaccccggcgacuucaucaacuacgaggagcuccgcgagcagcucuccuccgucuccuccuucgagcgcuucgagaucuuccccaagaccuccuccuggcccaaccacgacuccaacaagggcgucaccgccgccugcccccacgccggcgccaaguccuucuacaagaaccucaucuggcucgucaagaagggcaacuccuaccccaagcucucccaguccuacaucaacgacaagggcaaggagguccucguccucuggggcauccaccaccccuccaccaccgccgaccagcagucccucuaccagaacgccgacgccuacgucuucgucggcaccucccgcuacuccaagaaguucaagcccgagaucgccauccgccccaagguccgcgaccaggagggccgcaugaacuacuacuggacccucgucgagcccggcgacaagaucaccuucgaggccaccggcaaccucgucgucccccgcuacgccuucaccauggagaagaacgccggcuccggcaucaucaucuccgacacccccguccacgacugcaacaccaccugccagacccccgagggcgccaucaacaccucccuccccuuccagaacauccaccccaucaccaucggcaagugccccaaguacgucaaguccaccaagcuccgccucgccaccggccuccgcaacguccccuccauccagucccgcggccucuucggcgccaucgccggcuucaucgagggcggcuggaccggcauggucgacggcugguacggcuaccaccaccagaacgagcagggcuccggcuacgccgccgaccucaaguccacccagaacgccaucgacaagaucaccaacaaggucaacuccgucaucgagaagaugaacacccaguucaccgccgucggcaaggaguucaaccaccucgagaagcgcaucgagaaccucaacaagaaggucgacgacggcuuccucgacaucuggaccuacaacgccgagcuccucguccuccucgagaacgagcgcacccucgacuaccacgacuccaacgucaagaaccucuacgagaagguccgcaaccagcucaagaacaacgccaaggagaucggcaacggcugcuucgaguucuaccacaagugcgacaacaccugcauggaguccgucaagaacggcaccuacgacuaccccaaguacuccgaggaggccaagcucaaccgcgagaagaucgacggcgucaagcucgaguccacccgcaucuaccagauccucgccaucuacuccaccgucgccuccucccucguccucgucgucucccucggcgccaucuccuucuggaugugcuccaacggcucccuccagugccgcaucugcaucuga

SEQ ID NO: 108856 - RNA, 1701 nt, Artificial Sequence
  derived and/or modified CDS sequence (opt2) from hemagglutinin__InfluenzaA__AJI80337
augaaggccauccucgucguccuccucuacaccuucgccaccgccaacgccgacacccucugcaucggcuaccacgccaacaacuccaccgacaccgucgacaccguccucgagaagaacgucaccgucacccacuccaucaaccuccucgaggacaagcacaacggcaagcucugcaagcuccgcggcgucgccccccuccaccucggcaagugcaacaucgccggcuggauccucggcaaccccgagugcgagucccucuccaccgccuccuccugguccuacaucgucgagaccuccuccuccgacaacggcaccugcuaccccggcgacuucaucaacuacgaggagcuccgcgagcagcucuccuccgucuccuccuucgagcgcuucgagauguuccccaagaccuccuccuggcccaaccacgacuccaacaagggcgucaccgccgccugcccccacgccggcgccaaguccuucuacaagaaccucaucuggcucgucaagaagggcaacuccuaccccaagcucuccaaguccuacaucaacgacaagggcaaggagguccucguccucuggggcauccaccaccccuccaccaccgccgaccagcagucccucuaccagaacgccaacgccuacgucuucgucggcaccuccaaguacuccaagaaguucaagcccgagaucgccauccgccccaagguccgcgaccaggagggccgcaugaacuacuacuggacccucaucgagcccggcgacaagaucaccuucgaggccaccggcaaccucgucgucccccgcuacgccuucgccauggagcgcaacgccggcuccggcaucaucaucuccgacacccccguccacgacugcaacaccaccugccagacccccgagggcgccaucaacaccucccuccccuuccagaacauccaccccaucaccaucggcaagugccccaaguacgucaaguccaccaagcuccgccucgccaccggccuccgcaacauccccuccauccagucccgcggccucuucggcgccaucgccggcuucaucgagggcggcuggaccggcauggucgacggcugguacggcuaccaccaccagaacgagcagggcuccggcuacgccgccgaccucaaguccacccagaacgccaucgacaagaucaccaacaaggucaacuccgucaucgagaagaugaacacccaguucaccgccgucggcaaggaguucaaccaccucgagaagcgcaucgagaaccucaacaagaaggucgacgacggcuuccucgacaucuggaccuacaacgccgagcuccucguccuccucgagaacgagcgcacccucgacuaccacgacuccaacgucaagaaccucuacgagaagguccgcaaccagcucaagaacaacgccaaggagaucggcaacggcugcuucgaguucuaccacaagugcgacaacaccugcauggaguccgucaagaacggcaccuacgacuaccccaaguacuccgaggaggccaagcucaaccgcgagaagaucgacggcgucaagcucgaguccacccgcaucuaccagauccucgccaucuacuccaccgucgccuccucccucguccucgucgucucccucggcgccaucuccuucuggaugugcuccaacggcucccuccagugccgcaucugcaucuga

SEQ ID NO: 108857 - RNA, 1701 nt, Artificial Sequence; identical to SEQ ID NO: 106030
  derived and/or modified CDS sequence (opt2) from hemagglutinin__InfluenzaA__AJI80348

SEQ ID NO: 108858 - RNA, 1701 nt, Artificial Sequence; identical to SEQ ID NO: 105894
  derived and/or modified CDS sequence (opt2) from hemagglutinin__InfluenzaA__AJI80360

SEQ ID NO: 108859 - RNA, 1701 nt, Artificial Sequence; identical to SEQ ID NO: 105894
  derived and/or modified CDS sequence (opt2) from hemagglutinin__InfluenzaA__AJI80372

SEQ ID NO: 108860 - RNA, 1701 nt, Artificial Sequence; identical to SEQ ID NO: 106076
  derived and/or modified CDS sequence (opt2) from hemagglutinin__InfluenzaA__AJI80384

SEQ ID NO: 108861 - RNA, 1701 nt, Artificial Sequence; identical to SEQ ID NO: 106076
  derived and/or modified CDS sequence (opt2) from hemagglutinin__InfluenzaA__AJI80395

SEQ ID NO: 108862 - RNA, 1701 nt, Artificial Sequence; identical to SEQ ID NO: 106076
  derived and/or modified CDS sequence (opt2) from hemagglutinin__InfluenzaA__AJI80406

SEQ ID NO: 108863 - RNA, 1701 nt, Artificial Sequence; identical to SEQ ID NO: 106076
  derived and/or modified CDS sequence (opt2) from hemagglutinin__InfluenzaA__AJI80417

SEQ ID NO: 108864 - RNA, 1701 nt, Artificial Sequence; identical to SEQ ID NO: 106076
  derived and/or modified CDS sequence (opt2) from hemagglutinin__InfluenzaA__AJI80428

SEQ ID NO: 108865 - RNA, 1701 nt, Artificial Sequence; identical to SEQ ID NO: 106030
  derived and/or modified CDS sequence (opt2) from hemagglutinin__InfluenzaA__AJI80439

SEQ ID NO: 108866 - RNA, 1701 nt, Artificial Sequence; identical to SEQ ID NO: 106030
  derived and/or modified CDS sequence (opt2) from hemagglutinin__InfluenzaA__AJI80462

SEQ ID NO: 108867 - RNA, 1701 nt, Artificial Sequence
  derived and/or modified CDS sequence (opt2) from hemagglutinin__InfluenzaA__AJI80474
augaaggccauccucgucguccuccucuacaccuucgccaccgccaacgccgacacccucugcaucggcuaccacgccaacaacuccaccgacaccgucgacaccguccucgagaagaacgucaccgucacccacuccaucaaccuccucgaggacaagcacaacggcaagcucugcaagcuccgcggcgucgccccccuccaccucggcaagugcaacaucgccggcuggauccucggcaaccccgagugcgagucccucuccaccgccuccuccugguccuacaucgucgagaccuccuccuccgacaacggcaccugcuaccccggcgacuucaucaacuacgaggagcuccgcgagcagcucuccuccgucuccuccuucgagcgcuucgagaucuuccccaagaccuccuccuggcccaaccacgacuccaacaagggcgucaccgccgccugcccccacgccggcgccaaguccuucuacaagaaccucaucuggcucgucaagaagggcaacuccuaccccaagcucucccaguccuacaucaacgacaagggcaaggagguccucguccucuggggcauccaccaccccuccaccaccgccgaccagcagucccucuaccagaacgccgacgccuacgucuucgucggcaccucccgcuacuccaagaaguucaagcccgagaucgccauccgccccaagguccgcgaccaggagggccgcaugaacuacuacuggacccucgucgagcccggcgacaagaucaccuucgaggccaccggcaaccucgucgucccccgcuacgccuucaccauggagcgcaacgccggcuccggcaucaucaucuccgacacccccguccacgacugcaacaccaccugccagacccccgagggcgccaucaacaccucccuccccuuccagaacauccaccccaucaccaucggcaagugccccaaguacgucaaguccaccaagcuccgccucgccaccggccuccgcaacguccccuccauccagucccgcggccucuucggcgccaucgccggcuucaucgagggcggcuggaccggcauggucgacggcugguacggcuaccaccaccagaacgagcagggcuccggcuacgccgccgaccucaaguccacccagaacgccaucgacaagaucaccaacaaggucaacuccgucaucgagaagaugaacacccaguucaccgccgucggcaaggaguucaaccaccucgagaagcgcaucgagaaccucaacaagaaggucgacgacggcuuccucgacaucuggaccuacaacgccgagcuccucguccuccucgagaacgagcgcacccucgacuaccacgacuccaacgucaagaaccucuacgagaagguccgcaaccagcucaagaacaacgccaaggagaucggcaacggcugcuucgaguucuaccacaagugcgacaacaccugcauggaguccgucaagaacggcaccuacgacuaccccaaguacuccgaggaggccaagcucaaccgcgagaagaucgacggcgucaagcucgaguccacccgcaucuaccagauccucgccaucuacuccaccgucgccuccucccucguccucgucgucucccucggcgccaucuccuucuggaugugcuccaacggcucccuccagugccgcaucugcaucuga

SEQ ID NO: 108868 - RNA, 1701 nt, Artificial Sequence; identical to SEQ ID NO: 108867
  derived and/or modified CDS sequence (opt2) from hemagglutinin__InfluenzaA__AJI80485

SEQ ID NO: 108869 - RNA, 1701 nt, Artificial Sequence; identical to SEQ ID NO: 106076
  derived and/or modified CDS sequence (opt2) from hemagglutinin__InfluenzaA__AJI80496

SEQ ID NO: 108870 - RNA, 1701 nt, Artificial Sequence; identical to SEQ ID NO: 108679
  derived and/or modified CDS sequence (opt2) from hemagglutinin__InfluenzaA__AJI80507

SEQ ID NO: 108871 - RNA, 1701 nt, Artificial Sequence; identical to SEQ ID NO: 106076
  derived and/or modified CDS sequence (opt2) from hemagglutinin__InfluenzaA__AJI80518

SEQ ID NO: 108872 - RNA, 1701 nt, Artificial Sequence; identical to SEQ ID NO: 104168
  derived and/or modified CDS sequence (opt2) from hemagglutinin__InfluenzaA__AJJ98765

SEQ ID NO: 108873 - RNA, 1701 nt, Artificial Sequence
  derived and/or modified CDS sequence (opt2) from hemagglutinin__InfluenzaA__AJJ98777
augaagaccaucaucgcccucuccuacauccucugccucgucuucgcccagaagcuccccggcaacgacaacuccaccgccacccucugccucggccaccacgccguccccaacggcaccaucgucaagaccaucaccaacgaccagaucgaggucaccaacgccaccgagcucguccaguccuucuccaccggcgagaucugcaacuccccccaccagauccucgacggcgagaacugcacccucaucgacgcccuccucggcgacccccagugcgacggcuuccagaacaagaagugggaccucuucgucgagcgcuccaaggccuacuccaacugcuaccccuacgacguccccgacuacgccucccuccgcucccucgucgccuccuccggcacccucgaguucaacaacgaguccuucaacuggaccggcgucacccagaacggcaccuccuccgccugcauccgccgcuccaacaacuccuucuucucccgccucaacuggcucacccaccucaaguucaaguaccccgcccucaacgucaccaugcccaacaacgaggaguucgacaagcucuacaucuggggcguccaccaccccggcaccgacaacgaccagaucuuccucuacgcccaggccuccggccgcaucaccgucuccaccaagcgcucccagcagaccgucauccccaacaucggcucccgcccccgcguccgcaacauccccucccgcaucuccaucuacuggaccaucgucaagcccggcgacauccuccucaucaacuccaccggcaaccucaucgccccccgcggcuacuucaagauccgcuccggcaaguccuccaucaugcgcuccgacgcccccaucggcaagugcaacuccgagugcaucacccccaacggcuccauccccaacgacaagcccuuccagaacgucaaccgcaucaccuacggcgccugcccccgcuacgucaagcagaacacccucaagcucgccaccggcaugcgcaacguccccgagaagcagacccgcggcaucuucggcgccaucgccggcuucaucgagaacggcugggagggcauggucgacggcugguacggcuuccgccaccagaacuccgagggcaucggccaggccgccgaccucaaguccacccaggccgccaucgaccagaucaacggcaagcucaaccgccucaucggcaagaccaacgagaaguuccaccagaucgagaaggaguucuccgaggucgagggccgcauccaggaccucgagaaguacgucgaggacaccaagaucgaccucugguccuacaacgccgagcuccucgucgcccucgagaaccagcacaccaucgaccucaccgacuccgagaugaacaagcucuucgagaagaccaagaagcagcuccgcgagaacgccgaggacaugggcaacggcugcuucaagaucuaccacaagugcgacaacgccugcaucggcuccauccgcaacggcaccuacgaccacgacgucuaccgcgacgaggcccucaacaaccgcuuccagaucaagggcgucgagcucaaguccggcuacaaggacuggauccucuggaucuccuucgccaucuccugcuuccuccucugcgucgcccuccucggcuucaucaugugggccugccagaagggcaacauccgcugcaacaucugcaucuga

SEQ ID NO: 108874 - RNA, 1701 nt, Artificial Sequence; identical to SEQ ID NO: 105489
  derived and/or modified CDS sequence (opt2) from hemagglutinin__InfluenzaA__AJJ98789

SEQ ID NO: 108875 - RNA, 1701 nt, Artificial Sequence
  derived and/or modified CDS sequence (opt2) from hemagglutinin__InfluenzaA__AJJ98801
augaagaccaucaucgcccucuccuacauccucugccucgucuucgcccagaagcuccccggcaacgacaacuccaccgccacccucugccucggccaccacgccguccccaacggcaccaucgucaagaccaucaccaacgaccagaucgaggucaccaacgccaccgagcucguccagaacuccuccaucggcgagaucugcgacuccccccaccagauccucgacggcgagaacugcacccucaucgacgcccuccucggcgacccccagugcgacggcuuccagaacaagaagugggaccucuucgucgagcgcaacaaggccuacuccaacugcuaccccuacgacguccccgacuacgccucccuccgcucccucgucgccuccuccggcacccucgaguucaacaacgaguccuucaacuggaccggcgucacccagaacggcaccuccuccgccugcauccgccgcuccaacaacuccuucuucucccgccucaacuggcucacccaccucaacuucaaguaccccgcccucaacgucaccaugcccaacaacgagcaguucgacaagcucuacaucuggggcguccaccaccccggcaccgacaaggaccagaucuuccucuacgcccaguccuccggccgcaucaccgucuccaccaagcgcucccagcaggccgucauccccaacaucggcucccgcccccgcauccgcaacauccccucccgcaucuccaucuacuggaccaucgucaagcccggcgacauccuccucaucaacuccaccggcaaccucaucgccccccgcggcuacuucaagauccgcuccggcaaguccuccaucaugcgcuccgacgcccccaucggcaagugcaaguccgagugcaucacccccaacggcuccauccccaacgacaagcccuuccagaacgucaaccgcaucaccuacggcgccugcccccgcuacgucaagcaguccacccucaagcucgccaccggcaugcgcaacguccccgagaagcagacccgcggcaucuucggcgccaucgccggcuucaucgagaacggcugggagggcauggucgacggcugguacggcuuccgccaccagaacuccgagggccgcggccaggccgccgaccucaaguccacccaggccgccaucgaccagaucaacggcaagcucaaccgccucaucggcaagaccaacgagaaguuccaccagaucgagaaggaguucuccgaggucgagggccgcauccaggaccucgagaaguacgucgaggacaccaagaucgaccucugguccuacaacgccgagcuccucgucgcccucgagaaccagcacaccaucgaccucaccgacuccgagaugaacaagcucuucgagaagaccaagaagcagcuccgcgagaacgccgaggacaugggcaacggcugcuucaagaucuaccacaagugcgacaacgccugcaucggcuccauccgcaacggcaccuacgaccacgacgucuaccgcgacgaggcccucaacaaccgcuuccagaucaagggcgucgagcucaaguccggcuacaaggacuggauccucuggaucuccuucgccaucuccugcuuccuccucugcgucgcccuccucggcuucaucaugugggccugccagaagggcaacauccgcugcaacaucugcaucuga

SEQ ID NO: 108876 - RNA, 1701 nt, Artificial Sequence
  derived and/or modified CDS sequence (opt2) from hemagglutinin__InfluenzaA__AJJ98813
augaagaccaucaucgcccucuccuacauccucugccucgucuucgcccagaagcuccccggcaacgacaacuccaccgccacccucugccucggccaccacgccguccccaacggcaccaucgucaagaccaucaccaacgaccgcaucgaggucaccaacgccaccgagcucguccagaacuccuccaucggcgagaucugcgacuccccccaccagauccucgacggcgagaacugcacccucaucgacgcccuccucggcgacccccagugcgacggcuuccagaacaagaagugggaccucuucgucgagcgcuccaaggccuacuccaacugcuaccccuacgacguccccgacuacgccucccuccgcucccucgucgccuccuccggcacccucgaguucaacaacgaguccuucaacuggaccggcgucacccagaacggcaccuccuccgccugcauccgccgcuccaacuccuccuucuucucccgccucaacuggcucacccaccucaacuucaaguaccccgcccucaacgucaccaugcccaacaacgagcaguucgacaagcucuacaucuggggcguccaccaccccggcaccgacaaggaccagaucuuccucuacgcccaguccuccggccgcaucaccgucuccaccaagcgcucccagcaggccgucguccccaacaucggcucccgcccccgcauccgcaacauccccucccgcaucuccaucuacuggaccaucgucaagcccggcgacauccuccucaucaacuccaccggcaaccucaucgccccccgcggcuacuucaagauccgcuccggcaaguccuccaucaugcgcuccgacgcccccaucggcaagugcaaguccgagugcaucacccccaacggcuccauccccaacgacaagcccuuccagaacgucaaccgcaucaccuacggcgccugcccccgcuacgucaagcaguccacccucaagcucgccaccggcaugcgcaacguccccgagaagcagacccgcggcaucuucggcgccaucgccggcuucaucgagaacggcugggagggcauggucgacggcugguacggcuuccgccaccagaacuccgagggccgcggccaggccgccgaccucaaguccacccaggccgccaucgaccagaucaacggcaagcucaaccgccucaucggcaagaccaacgagaaguuccaccagaucgagaaggaguucuccgaggucgagggccgcauccaggaccucgagaaguacgucgaggacaccaagaucgaccucugguccuacaacgccgagcuccucgucgcccucgagaaccagcacaccaucgaccucaccgacuccgagaugaacaagcucuucgagaagaccaagaagcagcuccgcgagaacgccgaggacaugggcaacggcugcuucaagaucuaccacaagugcgacaacgccugcaucggcuccauccgcaacggcaccuacgaccacgacgucuaccgcgacgaggcccucaacaaccgcuuccagaucaagggcgucgagcucaaguccggcuacaaggacuggauccucuggaucuccuucgccaucuccugcuuccuccucugcgucgcccuccucggcuucaucaugugggccugccagaagggcaacauccgcugcaacaucugcaucuga

SEQ ID NO: 108877 - RNA, 1701 nt, Artificial Sequence
  derived and/or modified CDS sequence (opt2) from hemagglutinin__InfluenzaA__AJJ98825
augaagaccaucaucgcccucuccuacauccucugccucgucuucgcccaggagcuccccggcaacgacaacuccaccgccacccucugccucggccaccacgccguccccaacggcaccaucgucaagaccaucaccaacgaccgcaucgaggucaccaacgccaccgagcucguccagaacuccuccaucggcgagaucugcgacuccccccaccagauccucgacggcgagaacugcacccucaucgacgcccuccucggcgacccccagugcgacggcuuccagaacaagaagugggaccucuucgucgagcgcuccaaggccuacuccaacugcuaccccuacgacguccccgacuacgccucccuccgcucccucgucgccuccuccggcacccucgaguucaacaacgaguccuucaacuggaccggcgucacccagaacggcaccuccuccgccugcauccgccgcuccaacaacuccuucuucucccgccucaacuggcucacccaccucaacuucaaguaccccgcccucaacgucaccaugcccaacaacgagcaguucgacaagcucuacaucuggggcguccaccaccccggcaccgacaaggaccagaucuuccucuacgcccaguccuccggccgcaucaccgucuccaccaagcgcucccagcaggccgucauccccaacaucggcucccgccaccgcauccgcaacauccccucccgcaucuccaucuacuggaccaucgucaagcccggcgacauccuccucaucaacuccaccggcaaccucaucgccccccgcggcuacuucaagauccgcuccggcaaguccuccaucaugcgcuccgacgcccccaucggcaagugcaaguccgagugcaucacccccaacggcuccauccccaacgacaagcccuuccagaacgucaaccgcaucaccuacggcgccugcccccgcuacgucaagcaguccacccucaagcucgccaccggcaugcgcaacguccccgagaagcagacccgcggcaucuucggcgccaucgccggcuucaucgagaacggcugggagggcauggucgacggcugguacggcuuccgccaccagaacuccgagggccgcggccaggccgccgaccucaaguccacccaggccgccaucgaccagaucaacggcaagcucaaccgccucaucggcaagaccaacgagaaguuccaccagaucgagaaggaguucuccgaggucgagggccgcauccaggaccucgagaaguacgucgaggacaccaagaucgaccucugguccuacaacgccgagcuccucgucgcccucgagaaccagcacaccaucgaccucaccgacuccgagaugaacaagcucuucgagaagaccaagaagcagcuccgcgagaacgccgaggacaugggcaacggcugcuucaagaucuaccacaagugcgacaacgccugcaucggcuccauccgcaacggcaccuacgaccacgacgucuaccgcgacgaggcccucaacaaccgcuuccagaucaagggcgucgagcucaaguccggcuacaaggacuggauccucuggaucuccuucgccaucuccugcuuccuccucugcgucgcccuccucggcuucaucaugugggccugccagaagggcaacauccgcugcaacaucugcaucuga

SEQ ID NO: 108878 - RNA, 1701 nt, Artificial Sequence
  derived and/or modified CDS sequence (opt2) from hemagglutinin__InfluenzaA__AJJ98837
augaagaccaucaucgcccucuccuacauccucugccucgucuucgcccagaagcuccccggcaacgacaacuccaccgccacccucugccucggccaccacgccguccccaacggcaccaucgucaagaccaucaccaacgaccagaucgaggucaccaacgccaccgagcucguccaguccuccuccaccggcgagaucugcaacuccccccaccagauccucgacggcgagaacugcacccucaucgacgcccuccucggcgacccccagugcgacggcuuccagaacaagaagugggaccucuucgucgagcgcuccaaggcccacuccaacugcuaccccuacgacguccccgacuacgccucccuccgcucccucgucgccuccuccggcacccucgaguucaacaacgaguccuucaacuggaccggcgucacccagaacggcaccuccuccgccugcauccgccgcuccaacaacuccuucuucucccgccucaacuggcucacccaccucaacuucaaguaccccgcccucaacgucaccaugcccaacaacgagcaguucgacaagcucuacaucuggggcguccaccaccccggcaccgacaaggaccagaucuuccucuacgcccaggccuccggccgcaucaccgucuccaccaagcgcucccagcaggccgucauccccaacaucggcucccgcccccgcguccgcaacauccccucccgcgucuccaucuacuggaccaucgucaagcccggcgacauccuccucaucaacuccaccggcaaccucaucgccccccgcggcuacuucaagauccgcuccggcaaguccuccaucaugcgcuccgacgcccccaucggcaagugcaacuccgccugcaucacccccaacggcuccauccccaacgacaagcccuuccagaacgucaaccgcaucaccuacggcgccugcccccgcuacgucaagcaguccacccucaagcucgccaccggcaugcgcaacguccccgagaagcagacccgcggcaucuucggcgccaucgccggcuucaucgagaacggcugggagggcauggucgacggcugguacggcuuccgccaccagaacuccgagggccgcggccaggccgccgaccucaaguccacccaggccgccaucgaccagaucaacggcaagcucaaccgccucaucggcaagaccaacgagaaguuccaccagaucgagaaggaguucuccgaggucgagggccgcauccaggaccucgagaaguacgucgaggacaccaagaucgaccucugguccuacaacgccgagcuccucgucgcccucgagaaccagcacaccaucgaccucaccgacuccgagaugaacaagcucuucgagaagaccaagaagcagcuccgcgagaacgccgaggacaugggcaacggcugcuucaagaucuaccacaagugcgacaacgccugcaucggcuccauccgcaacggcaccuacgaccacgacgucuaccgcgacgaggcccucaacaaccgcuuccagaucaagggcgucgagcucaaguccggcuacaaggacuggauccucuggaucuccuucgccaucuccugcuuccuccucugcgucgcccuccucggcuucaucaugugggccugccagaagggcaacauccgcugcaacaucugcaucuga

SEQ ID NO: 108879 - RNA, 1701 nt, Artificial Sequence
  derived and/or modified CDS sequence (opt2) from hemagglutinin__InfluenzaA__AJJ98849
augaagaccaucaucgcccucuccuacauccucugccucgucuucgcccaggagcuccccggcaacgacaacuccaccgccacccucugccucggccaccacgccguccccaacggcaccaucgucaagaccaucaccaacgaccagaucgaggucaccaacgccaccgagcucguccaguccuccuccaccggcgagaucugcaacuccccccaccagauccucgacggcgagaacugcacccucaucgacgcccuccucggcgacccccagugcgacggcuuccagaacaagaagugggaccucuucgucgagcgcuccaaggcccacuccaacugcuaccccuacgacguccccgacuacgccucccuccgcucccucgucgccuccuccggcacccucgaguucaacaacgaguccuucaacuggaccggcgucacccagaacggcaccuccuccgccugcauccgccgcuccaacaacuccuucuucucccgccucaacuggcucacccaccucaacuucaaguaccccgcccucaacgucaccaugcccaacaacgagcaguucgacaagcucuacaucuggggcguccaccaccccggcaccgacaaggaccagaucuuccucuacgcccaggccuccggccgcaucaccgucuccaccaagcgcucccagcaggccgucauccccaacaucggcucccgccuccgcguccgcaacauccccucccgcgucuccaucuacuggaccaucgucaagcccggcgacauccuccucaucaacuccaccggcaaccucaucgccccccgcggcuacuucaagauccgcuccggcaaguccuccaucaugcgcuccgacgcccccaucggcaagugcaacuccgccugcaucacccccaacggcuccauccccaacgacaagcccuuccagaacgucaaccgcaucaccuacggcgccugcccccgcuacgucaagcagaacacccucaagcucgccaccggcaugcgcaacguccccgagaagcagacccgcggcaucuucggcgccaucgccggcuucaucgagaacggcugggagggcauggucgacggcugguacggcuuccgccaccagaacuccgagggccgcggccaggccgccgaccucaaguccacccaggccgccaucgaccagaucaacggcaagcucaaccgccucaucggcaagaccaacgagaaguuccaccagaucgagaaggaguucuccgaggucgagggccgcauccaggaccucgagaaguacgucgaggacaccaagaucgaccucugguccuacaacgccgagcuccucgucgcccucgagaaccagcacaccaucgaccucaccgacuccgagaugaacaagcucuucgagaagaccaagaagcagcuccgcgagaacgccgaggacaugggcaacggcugcuucaagaucuaccacaagugcgacaacgccugcaucggcuccauccgcaacggcaccuacgaccacgacgucuaccgcgacgaggcccucaacaaccgcuuccagaucaagggcgucgagcucaaguccggcuacaaggacuggauccucuggaucuccuucgccaucuccugcuuccuccucugcgucgcccuccucggcuucaucaugugggccugccagaagggcaacauccgcugcaacaucugcaucuga

SEQ ID NO: 108880 - RNA, 1701 nt, Artificial Sequence
  derived and/or modified CDS sequence (opt2) from hemagglutinin__InfluenzaA__AJJ98861
augaagaccaucaucgcccucuccuacauccucugccucgucuucgcccagaagcuccccggcaacgacaacuccaccgccacccucugccucggccaccacgccguccccaacggcaccaucgucaagaccaucaccaacgaccagaucgaggucaccaacgccaccgagcucguccagaucuccuccaccggcgagaucugcgacuccccccaccagauccucgacggcgagaacugcacccucaucgacgcccuccucggcgacccccagugcgacggcuuccagaacaagaagugggaccucuucgucgagcgcuccaaggccuacuccaacugcuaccccuacgacguccccgacuacgccucccuccgcucccucgucgccuccuccggcacccucgaguucaacaacgaguccuucaacuggaccggcgucacccagaacggcaccuccuccgccugcauccgccgcuccaacaacuccuucuucucccgccucaacuggcucacccaccucaaguucaaguaccccgcccucaacgucaccaugcccaacaacgagcaguucgacaagcucuacaucuggggcguccaccaccccggcaccgacaacgaccagaucuuccucuacgcccaggccuccggccgcaucaccgucuccaccaagcgcucccagcagaccgucauccccaacaucggcucccgcccccgcguccgcaacauccccucccgcaucuccaucuacuggaccaucgucaagcccggcgacauccuccucaucaacuccaccggcaaccucaucgccccccgcggcuacuucaagauccgcuccggcaaguccuccaucaugaaguccgacgcccccaucggcaagugcaacuccgagugcaucacccccaacggcuccauccccaacgacaagcccuuccagaacgucaaccgcaucaccuacggcgccugcccccgcuacgucaagcagaacacccucaagcucgccaccggcaugcgcaacguccccgagaagcagacccgcggcaucuucggcgccaucgccggcuucaucgagaacggcugggagggcauggucgacggcugguacggcuuccgccaccagaacuccgagggccgcggccaggccgccgaccucaaguccacccaggccgccaucgaccagaucaacggcaagcucaaccgccucaucggcaagaccaacgagaaguuccaccagaucgagaaggaguucuccgaggucgagggccgcauccaggaccucgagaaguacgucgaggacaccaagaucgaccucugguccuacaacgccgagcuccucgucgcccucgagaaccagcacaccaucgaccucaccgacuccgagaugaacaagcucuucgagaagaccaagaagcagcuccgcgagaacgccgaggacaugggcaacggcugcuucaagaucuaccacaagugcgacaacgccugcaucggcuccauccgcaacggcaccuacgaccacgacgucuaccgcgacgaggcccucaacaaccgcuuccagaucaagggcgucgagcucaaguccggcuacaaggacuggauccucuggaucuccuucgccaucuccugcuuccuccucugcgucgcccuccucggcuucaucaugugggccugccagaagggcaacauccgcugcaacaucugcaucuga

SEQ ID NO: 108881 - RNA, 1701 nt, Artificial Sequence
  derived and/or modified CDS sequence (opt2) from hemagglutinin__InfluenzaA__AJJ98873
augaagaccaucaucgcccucuccuacucccucugccucgucuucgcccagaagcuccccggcaacgacaacuccaccgccacccucugccucggccaccacgccguccccaacggcaccaucgucaagaccaucaccaacgaccagaucgaggucaccaacgccaccgagcucguccaguccuccuccaccggcgagaucugcgacuccccccaccagauccucgacggcgagaacugcacccucaucgacgcccuccucggcgacccccagugcgacggcuuccagaacaagaagugggaccucuucgucgagcgcuccaaggccuacuccaacugcuaccccuacgacguccccgacuacgccucccuccgcucccucgucgccuccuccggcacccucgaguucaacaacgaguccuucaacuggaccggcgucacccagaacggcaccuccuccgccugcauccgcaaguccaacaacuccuucuucucccgccucaacuggcucacccaccucaaguucaaguaccccgcccucaacgucaccaugcccaacaacgagcaguucgacaagcucuacaucuggggcguccaccaccccggcaccgacaacgaccagaucuuccucuacgcccaggccuccggccgcaucaccgucuccaccaagcgcucccagcagaccgucauccccaacaucggcucccgcccccgcguccgcaacauccccucccgcaucuccaucuacuggaccaucgucaagcccggcgacauccuccucaucaacuccaccggcaaccucaucgccccccgcggcuacuucaagauccgcuccggcaaguccuccaucaugcgcuccgacgcccccaucggcaagugcaacuccgagugcaucacccccaacggcuccauccccaacgacaagcccuuccagaacgucaaccgcaucaccuacggcgccugcccccgcuacgucaagcagaacacccucaagcucgccaccggcaugcgcaacguccccgagaagcagacccgcggcaucuucggcgccaucgccggcuucaucgagaacggcugggagggcauggucgacggcugguacggcuuccgccaccagaacuccgagggccgcggccaggccgccgaccucaaguccacccaggccgccaucgaccagaucaacggcaagcucaaccgccucaucggcaagaccaacgagaaguuccaccagaucgagaaggaguucuccgaggucgagggccgcauccaggaccucgagaaguacgucgaggacaccaagaucgaccucugguccuacaacgccgagcuccucgucgcccucgagaaccagcacaccaucgaccucaccgacuccgagaugaacaagcucuucgagaagaccaagaagcagcuccgcgagaacgccgaggacaugggcaacggcugcuucaagaucuaccacaagugcgacaacgccugcaucggcuccauccgcaacggcaccuacgaccacgacgucuaccgcgacgaggcccucaacaaccgcuuccagaucaagggcgucgagcucaaguccggcuacaaggacuggauccucuggaucuccuucgccaucuccugcuuccuccucugcgucgcccuccucggcuucaucaugugggccugccagaagggcaacauccgcugcaacaucugcaucuga

SEQ ID NO: 108882 - RNA, 1701 nt, Artificial Sequence
  derived and/or modified CDS sequence (opt2) from hemagglutinin__InfluenzaA__AJJ98885
augaagaccaucaucgcccucuccaacauccucugccucgucuucgcccagaagcuccccggcaacgacaacuccaccgccacccucugccucggccaccacgccguccccaacggcaccaucgucaagaccaucaccaacgaccagaucgaggucaccaacgccaccgagcucguccaguccuccuccaccggcgagaucugcgacuccccccaccagauccucgacggcgagaacugcacccucaucgacgcccuccucggcgacccccagugcgacggcuuccagaacaagaagugggaccucuucgucgagcgcuccaaggccuacuccaacugcuaccccuacgacguccccgacuacgccucccuccgcucccucgucgccuccuccggcacccucgaguucaacaacgaguccuucaacuggaccggcgucacccagaacggcaccuccuccgccugcauccgccgcuccaacaacuccuucuucucccgccucaacuggcucacccaccucaaguucaaguaccccgcccucaacgucaccaugcccaacaaggagaaguucgacaagcucuacaucuggggcguccaccaccccggcaccgacaacgaccagaucuuccucuacgcccaggccuccggccgcaucaccgucuccaccaagcgcucccagcagaccgucauccccaacaucggcucccgcccccgcguccgcaacauccccucccgcaucuccaucuacuggaccaucgucaagcccggcgacauccuccucaucaacuccaccggcaaccucaucgccccccgcggcuacuucaagauccgcuccggcaaguccuccaucaugcgcuccgacgcccccaucggcaagugcaacuccgagugcaucacccccaacggcuccauccccaacgacaagcccuuccagaacgucaaccgcaucaccuacggcgccugcccccgcuacgucaagcagaacacccucaagcucgccaccggcaugcgcaacguccccgagaagcagacccgcggcaucuucggcgccaucgccggcuucaucgagaacggcugggagggcauggucgacggcugguacggcuuccgccaccagaacuccgagggcaucggccaggccgccgaccucaaguccacccaggccgccaucgaccagaucaacggcaagcucaaccgccucaucggcaagaccaacgagaaguuccaccagaucgagaaggaguucuccgaggucgagggccgcauccaggaccucgagaaguacgucgaggacaccaagaucgaccucugguccuacaacgccgagcuccucgucgcccucgagaaccagcacaccaucgaccucaccgacuccgagaugaacaagcucuucgagaagaccaagaagcagcuccgcgagaacgccgaggacaugggcaacggcugcuucaagaucuaccacaagugcgacaacgccugcaucggcuccauccgcaacggcaccuacgaccacgacgucuaccgcgacgaggcccucaacaaccgcuuccagaucaagggcgucgagcucaaguccggcuacaaggacuggauccucuggaucuccuucgccaucuccugcuuccuccucugcgucgcccuccucggcuucaucaugugggccugccagaagggcaacauccgcugcaacaucugcaucuga

SEQ ID NO: 108883 - RNA, 1701 nt, Artificial Sequence
  derived and/or modified CDS sequence (opt2) from hemagglutinin__InfluenzaA__AJJ98897
augaagaccaucaucgcccucuccuacauccucugccucgucuucgcccagaagcuccccggcaacgacaacuccaccgccacccucugccucggccaccacgccguccccaacggcaccaucgucaagaccaucaccaacgaccagaucgaggucaccaacgccaccgagcucguccaguccuccuccaccggcgagaucugcgacuccccccaccagauccucgacggcgagaacugcacccucaucgacgcccuccucggcgacccccagugcgacggcuuccagaacaagaagugggaccucuucgucgagcgcuccaaggccuacuccaacugcuaccccuacgacguccccgacuacgccucccuccgcucccucgucgccuccuccggcacccucgaguucaacaacgaguccuucaacuggaccggcgucacccagaacggcaccuccuccgccugcauccgccgcuccaacuccuccuucuucucccgccucaacuggcucacccaccucaaguucaaguaccccgcccucaacgucaccaugcccaacaacgagaaguucgacaagcucuacaucuggggcguccaccaccccggcaccgacaacgaccagaucuuccucuacgcccaggccuccggccgcaucaccgucuccaccaagcgcucccagcagaccgucauccccaacaucggcucccgcccccgcguccgcaacauccccucccgcaucuccaucuacuggaccaucgucaagcccggcgacauccuccucaucaacuccaccggcaaccucaucgccccccgcggcuacuucaagauccgcuccggcaaguccuccaucaugcgcuccgacgcccccaucggcaagugcaacuccgagugcaucacccccaacggcuccauccccaacgacaagcccuuccagaacgucaaccgcaucaccuacggcgccugcccccgcuacgucaagcagaacacccucaagcucgccaccggcaugcgcaacguccccgagaagcagacccgcggcaucuucggcgccaucgccggcuucaucgagaacggcugggagggcauggucgacggcugguacggcuuccgccaccagaacuccgagggcaucggccaggccgccgaccucaaguccacccaggccgccaucgaccagaucaacggcaagcucaaccgccucaucggcaagaccaacgagaaguuccaccagaucgagaaggaguucuccgaggucgagggccgcauccaggaccucgagaaguacgucgaggacaccaaggucgaccucugguccuacaacgccgagcuccucgucgcccucgagaaccagcacaccaucgaccucaccgacuccgagaugaacaagcucuucgagaagaccaagaagcagcuccgcgagaacgccgaggacaugggcaacggcugcuucaagaucuaccacaagugcgacaacgccugcaucggcuccauccgcaacggcaccuacgaccacgacgucuaccgcgacgaggcccucaacaaccgcuuccagaucaagggcgucgagcucaaguccggcuacaaggacuggauccucuggaucuccuucgccaucuccugcuuccuccucugcgucgcccuccucggcuucaucaugugggccugccagaagggcaacauccgcugcaacaucugcaucuga

SEQ ID NO: 108884 - RNA, 1701 nt, Artificial Sequence; identical to SEQ ID NO: 107806
  derived and/or modified CDS sequence (opt2) from hemagglutinin__InfluenzaA__AJJ98909

SEQ ID NO: 108885 - RNA, 1701 nt, Artificial Sequence
  derived and/or modified CDS sequence (opt2) from hemagglutinin__InfluenzaA__AJJ98921
augaagaccaucaucgcccucuccuacauccucugccucgucuucgcccagaagcuccccggcaaggacaacuccaccgccacccucugccucggccaccacgccguccccaacggcaccaucgucaagaccaucaccaacgaccagaucgaggucaccaacgccaccgagcucguccaguccuccuccaccggcgagaucugcaacuccccccaccagauccucgacggcgagaacugcacccucaucgacgcccuccucggcgacccccagugcgacggcuuccagaacaagaagugggaccucuucgucgagcgcuccaaggccuacuccaacugcuaccccuacgacguccccgacuacgccucccuccgcucccucgucgccuccuccggcacccucgaguucaacaacgaguccuucaacuggaccggcgucaagcagaacggcaccuccuccgccugcauccgccgcuccaacuccuccuucuucucccgccucaacuggcucacccaccucaacuucaaguaccccgcccucaacgucaccaugcccaacaacgagcaguucgacaagcucuacaucuggggcguccaccaccccggcaccgacaaggaccagaucuuccucuacgcccaguccuccggccgcaucaccgucuccaccaagcgcucccagcaggccgucauccccaacaucggcucccgcccccgcauccgcaacauccccucccgcaucuccaucuacuggaccaucgucaagcccggcgacauccuccucaucaacuccaccggcaaccucaucgccccccgcggcuacuucaagauccgcuccggcaaguccuccaucaugcgcuccgacgcccccaucggcaagugcaacuccgagugcaucacccccaacggcuccauccccaacgacaagcccuuccagaacgucaaccgcaucaccuacggcgccugcccccgcuacgucaagcaguccacccucaagcucgccaccggcaugcgcaacguccccgagaagcagacccgcggcaucuucggcgccaucgccggcuucaucgagaacggcugggagggcauggucgacggcugguacggcuuccgccaccagaacuccgagggccgcggccaggccgccgaccucaaguccacccaggccgccaucgaccagaucaacggcaagcucaaccgccucaucggcaagaccaacgagaaguuccaccagaucgagaaggaguucuccgaggucgagggccgcauccaggaccucgagaaguacgucgaggacaccaagaucgaccucugguccuacaacgccgagcuccucgucgcccucgagaaccagcacaccaucgaccucaccgacuccgagaugaacaagcucuucgagaagaccaagaagcagcuccgcgagaacgccgaggacaugggcaacggcugcuucaagaucuaccacaagugcgacaacgccugcaucggcuccauccgcaacggcaccuacaaccacgacgucuaccgcgacgaggcccucaacaaccgcuuccagaucaagggcgucgagcucaaguccggcuacaaggacuggauccucuggaucuccuucgccaucuccugcuuccuccucugcgucgcccuccucggcuucaucaugugggccugccagaagggcaacauccgcugcaacaucugcaucuga

SEQ ID NO: 108886 - RNA, 1701 nt, Artificial Sequence; identical to SEQ ID NO: 105489
  derived and/or modified CDS sequence (opt2) from hemagglutinin__InfluenzaA__AJJ98933

SEQ ID NO: 108887 - RNA, 1701 nt, Artificial Sequence; identical to SEQ ID NO: 103018
  derived and/or modified CDS sequence (opt2) from hemagglutinin__InfluenzaA__AJJ98945

SEQ ID NO: 108888 - RNA, 1701 nt, Artificial Sequence
  derived and/or modified CDS sequence (opt2) from hemagglutinin__InfluenzaA__AJJ98957
augaagaccaucaucgcccucuccuacauccucugccucgucuucgcccagaagcuccccggcaacgacaacuccaccgccacccucugccucggccaccacgccguccccaacggcaccaucgucaagaccaucaccaacgaccagaucgaggucaccaacgccaccgagcucguccaguccuccuccaccggcgagaucugcgacuccccccaccagauccucgacggcgagaacugcacccucaucgacgcccuccucggcgacccccagugcgacggcuuccagaacaagaagugggaccucuucgucgagcgcuccaaggccuacuccaacugcuaccccuacgacguccccgacuacgccucccuccgcucccucgucgccuccuccggcacccucgaguucaacaacgaguccuucaacuggaccggcgucacccagaacggcaccuccuccgccugcauccgccgcuccaacaacuccuucuucucccgccucaacuggcucacccacuccaaguucaaguaccccgcccucaacgucaccaugcccaacaacgagcaguucgacaagcucuacaucuggggcguccaccaccccggcaccgacaacgaccagaucuuccucuacgcccaggccuccggccgcaucaccgucuccaccaagcgcucccagcagaccgucauccccaacaucggcucccgcccccgcguccgcaacauccccucccgcaucuccaucuacuggaccaucgucaagcccggcgacauccuccucaucaacuccaccggcaaccucaucgccccccgcggcuacuucaagauccgcuccggcaaguccuccaucaugcgcuccgacgcccccaucggcaagugcaacuccgagugcaucacccccaacggcuccauccccaacgacaagcccuuccagaacgucaaccgcaucaccuacggcgccugcccccgcuacgucaagcagaacacccucaagcucgccaccggcaugcgcaacguccccgagaagcagacccgcggcaucuucggcgccaucgccggcuucaucgagaacggcugggagggcauggucgacggcugguacggcuuccgccaccagaacuccgagggccgcggccaggccgccgaccucaaguccacccaggccgccaucgaccagaucaacggcaagcucaaccgccucaucggcaagaccaacgagaaguuccaccagaucgagaaggaguucuccgaggucgagggccgcauccaggaccucgagaaguacgucgaggacaccaagaucgaccucugguccuacaacgccgagcuccucgucgcccucgagaaccagcacaccaucgaccucaccgacuccgagaugaacaagcucuucgagaagaccaagaagcagcuccgcgagaacgccgaggacaugggcaacggcugcuucaagaucuaccacaagugcgacaacgccugcaucggcuccauccgcaacggcaccuacgaccacgacgucuaccgcgacgaggcccucaacaaccgcuuccagaucaagggcgucgagcucaaguccggcuacaaggacuggauccucuggaucuccuucgccaucuccugcuuccuccucugcgucgcccuccucggcuucaucaugugggccugccagaagggcaacauccgcugcaacaucugcaucuga

SEQ ID NO: 108889 - RNA, 1701 nt, Artificial Sequence; identical to SEQ ID NO: 98470
  derived and/or modified CDS sequence (opt2) from hemagglutinin__InfluenzaA__AJJ98969

SEQ ID NO: 108890 - RNA, 1701 nt, Artificial Sequence
  derived and/or modified CDS sequence (opt2) from hemagglutinin__InfluenzaA__AJJ98981
augaagaccaucaucgcccucuccuacauccucugccucgucuucgcccagaagcuccccggcaacgacaacuccaccgccacccucugccucggccaccacgccguccccaacggcaccaucgucaagaccaucaccaacgaccgcaucgaggucaccaacgccaccgagcucguccagaacuccuccaucggcgagaucugcgacuccccccaccacauccucgacggcgagaacugcacccucaucgacgcccuccucggcgacccccagugcgacggcuuccagaacaagaagugggaccucuucgucgagcgcuccaaggccuacuccaacugcuaccccuacgacguccccgacuacgccucccuccgcucccucgucgccuccuccggcacccucgaguucaacaacgaguccuucaacuggaccggcgucacccagaacggcaccuccuccgccugcauccgccgcuccaacuccuccuucuucucccgccucaacuggcucacccaccucaacuucaaguaccccgcccucaacgucaccaugcccaacaacgagcaguucgacaagcucuacaucuggggcguccaccaccccggcaccgacaaggaccagaucuuccucuacgcccaguccuccggccgcaucaccgucuccaccaagcgcucccagcaggccgucauccccaacaucggcucccgcccccgcauccgcaacguccccucccgcaucuccaucuacuggaccaucgucaagcccggcgacauccuccucaucaacuccaccggcaaccucaucgccccccgcggcuacuucaagauccgcuccggcaaguccuccaucaugcgcuccgacgcccccaucggcaagugcaaguccgagugcaucacccccaacggcuccauccccaacgacaagcccuuccagaacgucaaccgcaucaccuacggcgccugcccccgcuacgucaagcaguccacccucaagcucgccaccggcaugcgcaacguccccgagaagcagacccgcggcaucuucggcgccaucgccggcuucaucgagaacggcugggagggcauggucgacggcugguacggcuuccgccaccagaacuccgagggccgcggccaggccgccgaccucaaguccacccaggccgccaucgaccagaucaacggcaagcucaaccgccucaucggcaagaccaacgagaaguuccaccagaucgagaaggaguucuccgaggucgagggccgcauccaggaccucgagaaguacgucgaggacaccaagaucgaccucugguccuacaacgccgagcuccucgucgcccucgagaaccagcacaccaucgaccucaccgacuccgagaugaacaagcucuucgagaagaccaagaagcagcuccgcgagaacgccgaggacaugggcaacggcugcuucaagaucuaccacaagugcgacaacgccugcaucggcuccauccgcaacggcaccuacgaccacaacgucuaccgcgacgaggcccucaacaaccgcuuccagaucaagggcgucgagcucaaguccggcuacaaggacuggauccucuggaucuccuucgccaucuccugcuuccuccucugcgucgcccuccucggcuucaucaugugggccugccagaagggcaacauccgcugcaacaucugcaucuga

SEQ ID NO: 108891 - RNA, 1701 nt, Artificial Sequence
  derived and/or modified CDS sequence (opt2) from hemagglutinin__InfluenzaA__AJJ98993
augaagaccaucaucgcccucuccuacauccucugccucgucuucgcccagaagcuccccggcaacgacaacuccaccgccacccucugccucggccaccacgccguccccaacggcaccaucgucaagaccaucaccaacgaccagaucgaggucaccaacgccaccgagcucguccagaacuccuccaucggcgagaucugcgacaacccccaccagauccucgacggcgagaacugcacccucaucgacgcccuccucggcgacccccagugcgacggcuuccagaacaagaagugggaccucuucgucgagcgcuccaaggccuacuccaacugcuaccccuacgacguccccgacuacgccucccuccgcucccucgucgccuccuccggcacccucgaguucaacaacgaguccuucaacuggaccggcgucacccagaacggcaccuccuccgccugcaugcgccgcuccaacuccuccuucuucucccgccucaacuggcucacccaccucaacuucaaguaccccgcccucaacgucaccaugcccaacaacgagcaguucgacaagcucuacaucuggggcguccaccaccccggcaccgacaaggaccagaucuuccucuacgcccaguccuccggccgcaucaccgucuccaccaagcgcucccagcaggccgucauccccaacaucggcucccgcccccgcauccgcaacauccccucccgcaucuccaucuacuggaccaucgucaagcccggcgacauccuccucaucaacuccaccggcaaccucaucgccccccgcggcuacuucaagauccgcuccggcaaguccuccaucaugcgcuccgacgcccccaucggcaagugcaacuccgagugcaucacccccaacggcuccauccccaacgacaagcccuuccagaacgucaaccgcaucaccuacggcgccugcccccgcuacgucaagcaguccacccucaagcucgccaccggcaugcgcaacguccccgagaagcagacccgcggcaucuucggcgccaucgccggcuucaucgagaacggcugggagggcauggucgacggcugguacggcuuccgccaccagaacuccgagggccgcggccaggccgccgaccucaaguccacccaggccgccaucgaccagaucaacggcaagcucaaccgccucaucggcaagaccaacgagaaguuccaccagaucgagaaggaguucuccgaggucgagggccgcauccaggaccucgagaaguacgucgaggacaccaagaucgaccucugguccuacaacgccgagcuccucgucgcccucgagaaccagcacaccaucgaccucaccgacuccgagaugaacaagcucuucgagaagaccaagaagcagcuccgcgagaacgccgaggacaugggcaacggcugcuucaagaucuaccacaagugcgacaacgccugcaucggcuccauccgcaacggcaccuacgaccacgacgucuaccgcgacgaggcccucaacaaccgcuuccagaucaagggcgucgagcucaaguccggcuacaaggacuggauccucuggaucuccuucgccaucuccugcuuccuccucugcgucgcccuccucggcuucaucaugugggccugccagaagggcaacauccgcugcaacaucugcaucuga

SEQ ID NO: 108892 - RNA, 1701 nt, Artificial Sequence
  derived and/or modified CDS sequence (opt2) from hemagglutinin__InfluenzaA__AJJ99005
augaagaccaucaucgcccucuccuacauccucugccucgucuucgcccagaagcuccccggcaacgacaacuccaccgccacccucugccucggccaccacgccguccccaacggcaccaucgucaagaccaucaccaacgaccagaucgaggucaccaacgccaccgagcucguccaguccuccuccaccggcgagaucugcaacuccccccaccagauccucgacggcgagaacugcacccucaucgacgcccuccucggcgacccccagugcgacggcuuccagaacaagaagugggaccucuucgucgagcgcuccaaggcccacuccaacugcuaccccuacgacguccccgacuacgccucccuccgcucccucgucgccuccuccggcacccucgaguucaacaacgaguccuucaacuggaucggcgucacccagaacggcaccuccuccgccugcauccgccgcuccaacaacuccuucuucucccgccucaacuggcucacccaccucaacuucaaguaccccgcccucaacgucaccaugcccaacaacgagcaguucgacaagcucuacaucuggggcguccaccaccccggcaccgacaaggaccagaucuuccucuacgcccaggccuccggccgcaucaccgucuccaccaagcgcucccagcaggccgucauccccaacaucggcucccgcccccgcguccgcaacauccccucccgcgucuccaucuacuggaccaucgucaagcccggcgacauccuccucaucaacuccaccggcaaccucaucgccccccgcggcuacuucaagauccgcuccggcaaguccuccaucaugcgcuccgacgcccccaucggcaagugcaacuccgccugcaucacccccaacggcuccauccccaacgacaagcccuuccagaacgucaaccgcaucaccuacggcgccugcccccgcuacgucaagcagaacacccucaagcucgccaccggcaugcgcaacguccccgagaagcagacccgcggcaucuucggcgccaucgccggcuucaucgagaacggcugggagggcauggucgacggcugguacggcuuccgccaccagaacuccgagggccgcggccaggccgccgaccucaaguccacccaggccgccaucgaccagaucaacggcaagcucaaccgccucaucggcaagaccaacgagaaguuccaccagaucgagaaggaguucuccgaggucgagggccgcauccaggaccucgagaaguacgucgaggacaccaagaucgaccucugguccuacaacgccgagcuccucgucgcccucgagaaccagcacaccaucgaccucaccgacuccgagaugaacaagcucuucgagaagaccaagaagcagcuccgcgagaacgccgaggacaugggcaacggcugcuucaagaucuaccacaagugcgacaacgccugcaucggcuccauccgcaacggcaccuacgaccacgacgucuaccgcgacgaggcccucaacaaccgcuuccagaucaagggcgucgagcucaaguccggcuacaaggacuggauccucuggaucuccuucgccaucuccugcuuccuccucugcgucgcccuccucggcuucaucaugugggccugccagaagggcaacauccgcugcaacaucugcaucuga

SEQ ID NO: 108893 - RNA, 1701 nt, Artificial Sequence; identical to SEQ ID NO: 99447
  derived and/or modified CDS sequence (opt2) from hemagglutinin__InfluenzaA__AJJ99017

SEQ ID NO: 108894 - RNA, 1701 nt, Artificial Sequence
  derived and/or modified CDS sequence (opt2) from hemagglutinin__InfluenzaA__AJJ99029
augaagaccaucaucgcccucuccuacauccucugccucgucuucgcccagaagcuccccggcaacgacaacuccaccgccacccucugccucggccaccacgccguccccaacggcaccaucgucaagaccaucaccaacgaccagaucgaggucaccaacgccaccgagcucguccaguccuccuccaccggcgagaucugcgacuccccccaccagauccucgacggcgagaacugcacccucaucgacgcccuccucggcgacccccagugcgacggcuuccagaacaagaagugggaccucuucaucgagcgcuccaaggccuacuccaacugcuaccccuacgacguccccgacuacgccucccuccgcucccucgucgccuccuccggcacccucgaguucaacaacgaguccuucaacuggaccggcgucacccagaacggcaccuccuccuccugcauccgccgcuccaacaacuccuucuucucccgccucaacuggcucacccaccucaaguucaaguaccccgcccucaacgucaccaugcccaacaacgagcaguucgacaagcucuacaucuggggcguccaccaccccggcaccgacaacgaccagaucuuccucuacgcccaggccuccggccgcaucaccgucuccaccaagcgcucccagcagaccgucauccccaacaucggcucccgcccccgcguccgcaacauccccucccgcaucuccaucuacuggaccaucgucaagcccggcgacauccuccucaucaacuccaccggcaaccucaucgccccccgcggcuacuucaagauccgcuccggcaaguccuccaucaugcgcuccgacgcccccaucggcaagugcaacuccgagugcaucacccccaacggcuccauccccaacgacaagcccuuccagaacgucaaccgcaucaccuacggcgccugcccccgcuacgucaagcagaacacccucaagcucgccaccggcaugcgcaacguccccgagaagcagacccgcggcaucuucggcgccaucgccggcuucaucgagaacggcugggagggcauggucgacggcugguacggcuuccgccaccagaacuccgagggccgcggccaggccgccgaccucaaguccacccaggccgccaucgaccagaucaacggcaagcucaaccgccucaucggcaagaccaacgagaaguuccaccagaucgagaaggaguucuccgaggucgagggccgcauccaggaccucgagaaguacgucgaggacaccaagaucgaccucugguccuacaacgccgagcuccucgucgcccucgagaaccagcacaccaucgaccucaccgacuccgagaugaacaagcucuucgagaagaccaagaagcagcuccgcgagaacgccgaggacaugggcaacggcugcuucaagaucuaccacaagugcgacaacgccugcaucggcuccauccgcaacggcaccuacgaccacaacgucuaccgcgacgaggcccucaacaaccgcuuccagaucaagggcgucgagcucaaguccggcuacaaggacuggauccucuggaucuccuucgccaucuccugcuuccuccucugcgucgcccuccucggcuucaucaugugggccugccagaagggcaacauccgcugcaacaucugcaucuga

SEQ ID NO: 108895 - RNA, 1701 nt, Artificial Sequence
  derived and/or modified CDS sequence (opt2) from hemagglutinin__InfluenzaA__AJJ99041
augaagaccaucaucgcccucuccuacauccucugccucgucuucgcccagaagcuccccggcaacgacaacuccaccgccacccucugccucggccaccacgccguccccaacggcaccaucgucaagaccaucaccaacgaccagaucgaggucaccaacgccaccgagcucguccaguccuccuccaccggcgagaucugcgacuccccccaccagauccucgacggcgagaacugcacccucaucgacgcccuccucggcgacccccagugcgacggcuuccagaacaagaagugggaccucuucgucgagcgcuccaaggccuacuccaacugcuaccccuacgacguccccgacuacgccucccuccgcucccucgucgccuccuccggcacccucgaguucaacaacgaguccuucaacuggaccggcgucacccagaacggcaccuccuccgccugcaagcgcggcuccgacaacuccuucuucucccgccucaacuggcucacccaccucaaguucaaguaccccgcccucaacgucaccaugcccaacaacgagaaguucgacaagcucuacaucuggggcguccaccaccccggcaccgacaacgaccagaucuuccccuacgcccaggccuccggccgcaucaccgucuccaccaagcgcucccagcagaccgucauccccaacaucggcucccgcccccgcguccgcaacauccccucccgcaucuccaucuacuggaccaucgucaagcccggcgacauccuccucaucaacuccaccggcaaccucaucgccccccgcggcuacuucaagauccgcuccggcaaguccuccaucaugcgcuccgacgcccccaucggcaagugcaacuccggcugcaucacccccaacggcuccauccccaacgacaagcccuuccagaacgucaaccgcaucaccuacggcgccugcccccgcuacgucaagcaguccacccucaagcucgccaccggcaugcgcaacguccccgagaagcagacccgcggcaucuucggcgccaucgccggcuucaucgagaacggcugggagggcauggucgacggcugguacggcuuccgccaccagaacuccgagggcaucggccaggccgccgaccucaaguccacccaggccgccaucaaccagaucaacggcaagcucaaccgccucaucggcaagaccaacgagaaguuccaccagaucgagaaggaguucuccgaggucgagggccgcauccaggaccucgagaaguacgucgaggacaccaagaucgaccucugguccuacaacgccgagcuccucgucgcccucgagaaccagcacaccaucgaccucaccgacuccgagaugaacaagcucuucgagcgcaccaagaagcagcuccgcgagaacgccgaggacaugggcaacggcugcuucaagaucuaccacaagugcgacaacgccugcaucggcuccauccgcaacggcaccuacgaccacgacgucuaccgcgacgaggcccucaacaaccgcuuccagaucaagggcgucgagcucaaguccggcuacaaggacuggauccucuggaucuccuucgccaucuccugcuuccuccucugcgucgcccuccucggcuucaucaugugggccugccagaagggcaacauccgcugcaacaucugcaucuga

SEQ ID NO: 108896 - RNA, 1701 nt, Artificial Sequence; identical to SEQ ID NO: 105894
  derived and/or modified CDS sequence (opt2) from hemagglutinin__InfluenzaA__AJJ99053

SEQ ID NO: 108897 - RNA, 1701 nt, Artificial Sequence; identical to SEQ ID NO: 105894
  derived and/or modified CDS sequence (opt2) from hemagglutinin__InfluenzaA__AJJ99065

SEQ ID NO: 108898 - RNA, 1701 nt, Artificial Sequence
  derived and/or modified CDS sequence (opt2) from hemagglutinin__InfluenzaA__AJJ99089
augaagaccaucaucgcccucuccuacauccucugccucgucuucgcccagaagcuccccggcaacgacaacuccaccgccacccucugccucggccaccacgccguccccaacggcaccaucgucaagaccaucaccaacgaccgcaucgaggucaccaacgccaccgagcucguccagaacuccuccaucggcgagaucugcgacuccccccaccagauccucgacggcgagaacugcacccucaucgacgcccuccucggcgacccccagugcgacggcuuccagaacaagaagugggaccucuucgucgagcgcaacaaggccuacuccaacugcuaccccuacgacguccccgacuacgccucccuccgcucccucgucgccuccuccggcacccucgaguucaacaacgaguccuucaacuggaccggcgucacccagaacggcaccuccuccgccugcauccgccgcuccaacuccuccuucuucucccgccucaacuggcucacccaccucaacuucaaguaccccgcccucaacgucaccaugcccaacaacgagcaguucgacaagcucuacaucuggggcguccaccaccccggcaccgacaaggaccagaucuuccucuacgcccaguccuccggccgcaucaccgucuccaccaagcgcucccagcaggccgucauccccaacaucggcucccgcccccgcauccgcaacauccccucccgcaucuccaucuacuggaccaucgucaagcccggcgacauccuccucaucaacuccaccggcaaccucaucgccccccgcggcuacuucaagauccgcuccggcaaguccuccaucaugcgcuccgacgcccccaucggcaagugcaaguccgagugcaucacccccaacggcuccauccccaacgacaagcccuuccagaacgucaaccgcaucaccuacggcgccugcccccgcuacgucaagcaguccacccucaagcucgccaccggcaugcgcaacguccccgagaagcagacccgcggcaucuucggcgccaucgccggcuucaucgagaacggcugggagggcauggucgacggcugguacggcuuccgccaccagaacuccgagggccgcggccaggccgccgaccucaaguccacccaggccgccaucgaccagaucaacggcaagcucaaccgccucaucggcaagaccaacgagaaguuccaccagaucgagaaggaguucuccgaggucgagggccgcauccaggaccucgagaaguacgucgaggacaccaagaucgaccucugguccuacaacgccgagcuccucgucgcccucgagaaccagcacaccaucgaccucaccgacuccgagaugaacaagcucuucgagaagaccaagaagcagcuccgcgagaacgccgaggacaugggcaacggcugcuucaagaucuaccacaagugcgacaacgccugcaucggcuccauccgcaacggcaccuacgaccacgacgucuaccgcgacgaggcccucaacaaccgcuuccagaucaagggcgucgagcucaaguccggcuacaaggacuggauccucuggaucuccuucgccaucuccugcuuccuccucugcgucgcccuccucggcuucaucaugugggccugccagaagggcaacauccgcugcaacaucugcaucuga

SEQ ID NO: 108899 - RNA, 1701 nt, Artificial Sequence; identical to SEQ ID NO: 105584
  derived and/or modified CDS sequence (opt2) from hemagglutinin__InfluenzaA__AJJ99101

SEQ ID NO: 108900 - RNA, 1701 nt, Artificial Sequence; identical to SEQ ID NO: 105489
  derived and/or modified CDS sequence (opt2) from hemagglutinin__InfluenzaA__AJJ99113

SEQ ID NO: 108901 - RNA, 1701 nt, Artificial Sequence
  derived and/or modified CDS sequence (opt2) from hemagglutinin__InfluenzaA__AJJ99125
augaagaccaucaucgcccucuccuacauccucugcauggucuucgcccagaagcuccccggcaacgacaacuccaccgccacccucugccucggccaccacgccguccccaacggcaccaucgucaagaccaucaccaacgaccagaucgaggucaccaacgccaccgagcucguccaguccuccuccaccggcgagaucugcaacuccccccaccagauccucgacggcgagaacugcacccucaucgacgcccuccucggcgacccccagugcgacggcuuccagaacaagaagugggaccucuucgucgagcgcuccaaggcccacuccaacugcuaccccuacgacguccccgacuacgccucccuccgcucccucgucgccuccuccggcacccucgaguucaacaacgaguccuucaacuggaccggcgucacccagaacggcaccuccuccgccugcauccgccgcuccuccaacuccuucuucucccgccucaacuggcucacccaccucaacuucaaguaccccgcccucaacgucaccaugcccaacaacgagcaguucgacaagcucuacaucuggggcguccaccaccccggcaccgacaaggaccagaucuuccucuacgcccaggccuccggccgcaucaccgucuccaccaagcgcucccagcaggccgucauccccaacaucggcucccgcccccgcguccgcaacauccccucccgcgucuccaucuacuggaccaucgucaagcccggcgacauccuccucaucaacuccaccggcaaccucaucgccccccgcggcuacuucaagauccgcuccggcaaguccuccaucaugcgcuccgacgcccccaucggcaagugcaacuccgccugcaucacccccaacggcuccauccccaacgacaagcccuuccagaacgucaaccgcaucaccuacggcgccugcccccgcuacgucaagcagaacacccucaagcucgccaccggcaugcgcaacguccccgagaagcagacccgcggcaucuucggcgccaucgccggcuucaucgagaacggcugggagggcauggucgacggcugguacggcuuccgccaccagaacuccgagggccgcggccaggccgccgaccucaaguccacccaggccgccaucgaccagaucaacggcaagcucaaccgccucaucggcaagaccaacgagaaguuccaccagaucgagaaggaguucuccgaggucgagggccgcauccaggaccucgagaaguacgucgaggacaccaagaucgaccucugguccuacaacgccgagcuccucgucgcccucgagaaccagcacaccaucgaccucaccgacuccgagaugaacaagcucuucgagaagaccaagaagcagcuccgcgagaacgccgaggacaugggcaacggcugcuucaagaucuaccacaagugcgacaacgccugcaucggcuccauccgcaacggcaccuacgaccacgacgucuaccgcgacgaggcccucaacaaccgcuuccagaucaagggcgucgagcucaaguccggcuacaaggacuggauccucuggaucuccuucgccaucuccugcuuccuccucugcgucgcccuccucggcuucaucaugugggccugccagaagggcaacauccgcugcaacaucugcaucuga

SEQ ID NO: 108902 - RNA, 1701 nt, Artificial Sequence
  derived and/or modified CDS sequence (opt2) from hemagglutinin__InfluenzaA__AJJ99137
augaagaccaucaucgcccucuccuacauccucugccucgucuucgcccagaagcuccccggcaacgacaacuccaccgccacccucugccucggccaccacgccguccccaacggcaccaucgucaagaccaucaccaacgaccagaucgaggucaccaacgccaccgagcucguccaguccuccuccaccggcgagaucugcaacuccccccaccagauccucgacggcgagaacugcacccucaucgacgcccuccucggcgacccccagugcgacggcuuccagaacaagaagugggaccucuucgucgagcgcuccaaggcccacuccaacugcuaccccuacgacguccccgacuacgccucccuccgcucccucgucgccuccuccggcacccucgaguucaacaacgaguccuucaacuggaccggcgucacccagaacggcaccuccuccgccugcauccgccgcuccaacaacuccuucuucucccgccucaacuggcucacccaccucaacuucaaguaccccgcccucaacgucaccaugcccaacaacgagcaguucgacaagcucuacaucuggggcguccaccaccccggcaccgacaaggaccagaucuuccucuacgcccaggccuccggccgcaucaccgucuccaccaagcgcucccagcaggccgucauccccaacaucggcucccgcccccgcguccgcaacauccccucccgcgucuccaucuacuggaccaucgucaagcccggcgacauccuccucaucaacuccaccggcaaccucaucgccccccgcggcuacuucaagauccgcuccggcaaguccuccaucaugcgcuccgacgcccccaucggcaagugcaacuccgccugcaucacccccaacggcuccauccccaacgacaagcccuuccagaacgucaaccgcaucaccuacggcgccugcccccgcuacgucaagcagaacacccucaagcucgccaccggcaugcgcaacguccccgagaagcagacccgcggcaucuucggcgccaucgccggcuucaucgagaacggcugggagggcauggucgacggcugguacggcuuccgccaccagaacuccgagggccgcggccaggccgccgaccucaaguccacccaggccgccaucgaccagaucaacggcaagcucaaccgccucaucggcaagaccaacgagaaguuccaccagaucgagaaggaguucuccgaggucgagggccgcauccaggaccucgagaaguacgucgaggacaccaagaucgaccucugguccuacaacgccgagcuccucgucgcccucgagaaccagcacaccaucgaccucaccgacuccgagaugaacaagcucuucgagaagaccaagaagcagcuccgcgagaacgccgaggacaugggcaacggcugcuucaagaucuaccacaagugcgacaacgccugcaucgucuccauccgcaacggcaccuacgaccacgacgucuaccgcgacgaggcccucaacaaccgcuuccagaucaagggcgucgagcucaaguccggcuacaaggacuggauccucuggaucuccuucgccaucuccugcuuccuccucugcgucgcccuccucggcuucaucaugugggccugccagaagggcaacauccgcugcaacaucugcaucuga

SEQ ID NO: 108903 - RNA, 1701 nt, Artificial Sequence
  derived and/or modified CDS sequence (opt2) from hemagglutinin__InfluenzaA__AJJ99149
augaagaccaucaucgcccucuccuacauccucugccucgucuucgcccagaaguuccccggcaacgacaacuccaccgccacccucugccucggccaccacgccguccccaacggcaccaucgucaagaccaucaccaacgaccagaucgaggucaccaacgccaccgagcucguccaguccuccuccaccggcgagaucugcgacuccccccaccagauccucgacggcaagaacugcacccucaucgacgcccuccucggcgacccccagugcgacggcuuccagaacaagaagugggaccucuucgucgagcgcuccaaggccuacuccaacugcuaccccuacgacaugcccgacuacgccucccuccgcucccucgucgccuccuccggcacccucgaguucaacaacgaguccuucaacuggaccggcgucacccagaacggcaccuccuccgccugcauccgccgcuccaacuccuccuucuucucccgccucaacuggcucacccaccucaacuucaaguaccaggcccucaacgucaccaugcccaacaacgagcaguucgacaagcucuacaucuggggcguccaccaccccggcaccgacaaggaccagaucuuccucuacgcccaggccuccggccgcaucaccgucuccaccaagcgcucccagcagaccgucauccccaacaucggcucccgcccccgcguccgcaacauccccucccgcaucuccaucuacuggaccaucgucaagcccggcgacauccuccucaucaacuccaccggcaaccucaucgccccccgcggcuacuucaagauccaguccggcaaguccuccaucaugcgcuccgacgcccccaucggcaagugcaacuccgagugcaucacccccaacggcuccauccccaacgacaagcccuuccagaacgucaaccgcaucaccuacggcgccugcccccgcuacgucaagcagaacacccucaagcucgccaccggcaugcgcaacguccccgagaagcagacccgcggcaucuucggcgccaucgccggcuucaucgagaacggcugggagggcauggucgacggcugguacggcuuccgccaccagaacuccgagggccgcggccaggccgccgaccucaaguccacccaggccgccaucgaccagaucaacggcaagcucaaccgccucaucggcaagaccaacgagaaguuccaccagaucgagaaggaguucuccgaggucgagggccgcauccaggaccucgagaaguacgucgaggacaccaagaucgaccucugguccuacaacgccgagcuccucgucgcccucgagaaccagcacaccaucgaccucaccgacuccgagaugaacaagcucuucgagaagaccaagaagcagcuccgcgagaacgccgaggacaugggcaacggcugcuucaagaucuaccacaagugcgacaacgccugcaucggcuccauccgcaacggcaccuacgaccacgacgucuaccgcgacgaggcccucaacaaccgcuuccagaucaagggcgucgagcucaaguccggcuacaaggacuggauccucuggaucuccuucgccaucuccugcuuccuccucugcgucgcccuccucggcuucaucaugugggccugccagaagggcaacauccgcugcaacaucugcaucuga

SEQ ID NO: 108904 - RNA, 1701 nt, Artificial Sequence
  derived and/or modified CDS sequence (opt2) from hemagglutinin__InfluenzaA__AJJ99161
augaagaccaucaucgcccucuccuacauccucugccucgucuucgcccagaagcuccccggcaacgacaacuccaccgccacccucugccucggccaccacgccguccccaacggcaccaucgucaagaccaucaccaacgaccagaucgaggucaccaacgccaccgagcucguccaguccuccuccaccggcgagaucugcgacuccccccaccagauccucgacggcgagaacugcacccucaucgacgcccuccucggcgacccccagugcgacggcuuccagaacaagaagugggaccucuucgucgagcgcuccaaggccuacuccaacugcuaccccuacgacguccccgacuacgccucccuccgcucccucgucgccuccuccggcacccucgaguucaacaacgaguccuucaacuggaccggcgucacccagaacggcaccuccuccgccugcauccgccgcuccaacaacuccuucuucucccgccucaacuggcucacccaccucaaguucaaguaccccgcccucaacgucaccaugcccaacaacgagcaguucgacaagcucuacaucuggggcguccaccaccccggcaccgacaacgaccagaucuuccucuacgcccaggccuccggccgcaucaccgucuccaccaagcgcucccagcagaccgucauccccaacaucggcucccgcccccgcguccgcgacauccccucccgcaucuccaucuacuggaccaucgucaagcccggcgacauccuccucaucaacuccaccggcaaccucaucgccccccgcggcuacuucaagauccgcuccggcaaguccuccaucaugcgcuccgacgcccccaucggcaagugcaacuccgagugcaucacccccaacggcuccauccccaacgacaagcccuuccagaacgucaaccgcaucaccuacggcgccugcccccgcuacgucaagcagaacacccucaagcucgccaccggcaugcgcaacguccccgagaagcagacccgcggcaucuucggcgccaucgccggcuucaucgagaacggcugggagggcauggucgacggcugguacggcuuccgccaccagaacuccgagggccgcggccaggccgccgaccucaaguccacccaggccgccaucgaccagaucaacggcaagcucaaccgccucaucggcaagaccaacgagaaguuccaccagaucgagaaggaguucuccgaggucgagggccgcauccaggaccucgagaaguacgucgaggacaccaagaucgaccucugguccuacaacgccgagcuccucgucgcccucgagaaccagcacaccaucgaccucaccgacuccgagaugaacaagcucuucgagaagaccaagaagcagcuccgcgagaacgccgaggacaugggcaacggcugcuucaagaucuaccacaagugcgacaacgccugcaucggcuccauccgcaacggcaccuacgaccacgacgucuaccgcgacgaggcccucaacaaccgcuuccagaucaagggcgucgagcucaaguccggcuacaaggacuggauccucuggaucuccuucgccaucuccugcuuccuccucugcgucgcccuccucggcuucaucaugugggccugccagaagggcaacauccgcugcaacaucugcaucuga

SEQ ID NO: 108905 - RNA, 1701 nt, Artificial Sequence
  derived and/or modified CDS sequence (opt2) from hemagglutinin__InfluenzaA__AJJ99173
augaagaccaucaucgcccucuccuacauccucugccucgucuucgcccagaagcuccccggcaacgacaacuccaccgccacccucugccucggccaccacgccguccccaacggcaccaucgucaagaccaucaccaacgaccagaucgaggucaccaacgccaccgagcucguccaguccuccuccaccggcgagaucugcaacuccccccaccagauccucgacggcgagaacugcacccucaucgacgcccuccucggcgacccccagugcgacggcuuccagaacaagaagugggaccucuucgucgagcgcuccaaggccuacuccaacugcuaccccuacgacguccccgacuacgccucccuccgcucccucgucgccuccuccggcacccucgaguucaacaacgaguccuucaacuggaccggcgucacccagaacggcaccuccuccgccugcauccgccgcuccaacuccuccuucuucucccgccucaacuggcucacccaccucaaguucaaguaccccgcccucaacgucaccaugcccaacaacgagcaguucgacaagcucuacaucuggggcguccaccaccccggcaccgacaacgaccagaucuuccucuacgcccaggccuccggccgcaucaccgucuccaccaagcgcucccagcagaccgucauccccaacaucggcucccgcccccgcguccgcaacauccccucccgcaucuccaucuacuggaccaucgucaagcccggcgacauccuccucaucaacuccaccggcaaccucaucgccccccgcggcuacuucaagauccgcuccggcaaguccuccaucaugcgcuccgacgcccccaucggcaagugcaacuccgagugcaucacccccaacggcuccauccccaacgacaagcccuuccagaacgucaaccgcaucaccuacggcgccugcccccgcuacgucaagcagaacacccucaagcucgccaccggcaugcgcaacguccccgagaagcagacccgcggcaucuucggcgccaucgccggcuucaucgagaacggcugggagggcauggucgacggcugguacggcuuccgccaccagaacuccgagggccgcggccaggccgccgaccucaaguccacccaggccgccaucgaccagaucaacggcaagcucaaccgccucaucggcaagaccaacgagaaguuccaccagaucgagaaggaguucuccgaggucgagggccgcauccaggaccucgagaaguacgucgaggacaccaagaucgaccucugguccuacaacgccgagcuccucgucgcccucgagaaccagcacaccaucgaccucaccgacuccgagaugaacaagcucuucgagaagaccaagaagcagcuccgcgagaacgccgaggacaugggcaacggcugcuuccgcaucuaccacaagugcgacaacgccugcaucggcuccauccgcaacggcaccuacgaccacgacgucuaccgcgacgaggcccucaacaaccgcuuccagaucaagggcgucgagcucaaguccggcuacaaggacuggauccucuggaucuccuucgccaucuccugcuuccuccucugcgucgcccuccucggcuucaucaugugggccugccagaagggcaacauccgcugcaacaucugcaucuga

SEQ ID NO: 108906 - RNA, 1701 nt, Artificial Sequence
  derived and/or modified CDS sequence (opt2) from hemagglutinin__InfluenzaA__AJJ99185
augaagaccaucaucgcccucuccuacauccucugccucgucuucgcccagaagcuccccggcaacgacaacuccaccgccacccucugccucggccaccacgccguccccaacggcaccaucgucaagaccaucaccaacgaccagaucgaggucaccaacgccaccgagcucguccaguccuccuccaccggcgagaucugcgacuccccccaccagauccucgacggcgagaacugcacccucaucgacgcccuccucggcgacccccagugcgacggcuuccagaacaagaagugggaccucuucgucgagcgcuccaaggccuacuccaacugcuaccccuacgacguccccgacuacgccucccuccgcucccucgucgccuccuccggcacccucgaguucaacaacgaguccuucaacuggaccggcgucacccagaacggcaccuccuccgccugcauccgcaaguccaacaacuccuucuucucccgccucaacuggcucacccaccucaaguucaaguaccccgcccucaacgucaccaugcccaacaacgagcaguucgacaagcucuacaucuggggcguccaccaccccggcaccgacaacgaccagaucuuccucuacgcccaggccuccggccgcaucaccgucuccaccaagcgcucccagcagaccgucauccccaacaucggcucccgcccccgcguccgcaacauccccucccgcaucuccaucuacuggaccaucgucaagcccggcgacauccuccucaucaacuccaccggcaaccucaucgccccccgcggcuacuucaagauccgcuccggcaaguccuccaucaugcgcgccgacgcccccaucggcaagugcaacuccgagugcaucacccccaacggcuccauccccaacgacaagcccuuccagaacgucaaccgcaucaccuacggcgccugcccccgcuacgucaagcagaacacccucaagcucgccaccggcaugcgcaacguccccgagaagcagacccgcggcaucuucggcgccaucgccggcuucaucgagaacggcugggagggcauggucgacggcugguacggcuuccgccaccagaacuccgagggccgcggccaggccgccgaccucaaguccacccaggccgccaucgaccagaucaacggcaagcucaaccgccucaucggcaagaccaacgagaaguuccaccagaucgagaaggaguucuccgaggucgagggccgcauccaggaccucgagaaguacgucgaggacaccaagaucgaccucugguccuacaacgccgagcuccucgucgcccucgagaaccagcacaccaucgaccucaccgacuccgagaugaacaagcucuucgagaagaccaagaagcagcuccgcgagaacgccgaggacaugggcaacggcugcuucaagaucuaccacaagugcgacaacgccugcaucggcuccauccgcaacggcaccuacgaccacgacgucuaccgcgacgaggcccucaacaaccgcuuccagaucaagggcgucgagcucaaguccggcuacaaggacuggauccucuggaucuccuucgccaucuccugcuuccuccucugcgucgcccuccucggcuucaucaugugggccugccagaagggcaacauccgcugcaacaucugcaucuga

SEQ ID NO: 108907 - RNA, 1701 nt, Artificial Sequence; identical to SEQ ID NO: 104844
  derived and/or modified CDS sequence (opt2) from hemagglutinin__InfluenzaA__AJJ99197

SEQ ID NO: 108908 - RNA, 1701 nt, Artificial Sequence
  derived and/or modified CDS sequence (opt2) from hemagglutinin__InfluenzaA__AJJ99209
augaagaccaucaucgcccucuccuacauccucugccucgucuucgcccagaagcuccccggcaacgacaacuccaccgccacccucugccucggccaccacgccguccccaacggcaccaucgucaagaccaucaccaacgaccagaucgaggucaccaacgccaccgagcucguccaguccuccuccaccggcggcaucugcgacuccccccaccagauccucgacggcgagaacugcacccucaucgacgcccuccucggcgacccccagugcgacggcuuccagaacaagaagugggaccucuucgucgagcgcuccaaggccuacuccaacugcuaccccuacgacguccccgacuacgccucccuccgcucccucgucgccuccuccggcacccucgaguucaacaacgaguccuucaacuggaccggcgucacccagaacggcaccuccuccgccugcaagcgcaaguccgacaacuccuucuucucccgccucaacuggcucacccaccucaaguucaaguaccccgcccucaacgucaccaugcccaacaacgaggaguucgacaagcucuacaucuggggcguccaccaccccggcaccgacaacgaccagaucuuccucuacgcccaggccuccggccgcaucaccgucuccaccaagcgcucccagcagaccgucauccccaacaucggcucccgcccccgcguccgcaacauccccucccgcaucuccaucuacuggaccaucgucaagcccggcgacauccuccucaucaacuccaccggcaaccucaucgccccccgcggcuacuucaagauccgcuccggcaaguccuccaucaugcgcuccgacgcccccaucggcaagugcaacuccgagugcaucacccccaacggcuccauccccaacgacaagcccuuccagaacgucaaccgcaucaccuacggcgccugcccccgcuacgucaagcaguccacccucaagcucgccaccggcaugcgcaacguccccgagaagcagacccgcggcaucuucggcgccaucgccggcuucaucgagaacggcugggagggcauggucgacggcugguacggcuuccgccaccagaacuccgagggcaucggccaggccgccgaccucaaguccacccaggccgccaucaaccagaucaacggcaagcucaaccgccucaucggcaagaccaacgagaaguuccaccagaucgagaaggaguucuccgaggucgagggccgcauccaggaccucgagaaguacgucgaggacaccaagaucgaccucugguccuacaacgccgagcuccucgucgcccucgagaaccagcacaccaucgaccucaccgacuccgagaugaacaagcucuucgagcgcaccaagaagcagcuccgcgagaacgccgaggacaugggcaacggcugcuucaagaucuaccacaagugcgacaacgccugcaucggcuccauccgcaacggcaccuacgaccacgacgucuaccgcgacgaggcccucaacaaccgcuuccagaucaagggcgucgagcucaaguccggcuacaaggacuggauccucuggaucuccuucgccauguccugcuuccuccucugcgucgcccuccucggcuucaucaugugggccugccagaagggcaacauccgcugcaacaucugcaucuga

SEQ ID NO: 108909 - RNA, 1701 nt, Artificial Sequence
  derived and/or modified CDS sequence (opt2) from hemagglutinin__InfluenzaA__AJJ99221
augaagaccaucaucgcccucuccuacauccucugccucgucuucgcccagaagcuccccggcaacgacaacuccaccgccacccucugccucggccaccacgccguccccaacggcaccaucgucaagaccaucaccaacgaccagaucgaggucaccaacgccaccgagcucguccaguccuccuccaccggcgagaucugcgacuccccccaccagauccucgacggcgagaacugcacccucaucgacgcccuccucggcgacccccagugcgacggcuuccagaacaagaagugggaccucuucgucgagcgcuccaaggccuacuccaacugcuaccccuacgacguccccgacuacgccucccuccgcucccucgucgccuccuccggcacccucgaguucaacaacgaguccuucaacuggaccggcgucacccagaacggcaccuccuccgccugcauccgccgcuccaacuccuccuucuucucccgccucaacuggcucacccaccucaaguucaaguaccccgcccucaacgucaccaugcccaacaacgagaaguucgacaagcucuacaucuggggcguccaccaccccggcaccgacaacgaccagaucuuccucuacgcccaggccuccggccgcaucaccgucuccaccaagcgcucccagcagaccgucauccccaacaucggcucccgcccccgcguccgcaacauccccucccgcaucuccaucuacuggaccaucgucaagcccggcgacauccuccucaucaacuccaccggcaaccucaucgccccccgcggcuacuucaagauccaguccggcaaguccuccaucaugcgcuccgacgcccccaucggcaagugcaacuccgagugcaucacccccaacggcuccauccccaacgacaagcccuuccagaacgucaaccgcaucaccuacggcgccugcccccgcuacgucaagcagaacacccucaagcucgccaccggcaugcgcaacguccccgagaagcagacccgcggcaucuucggcgccaucgccggcuucaucgagaacggcugggagggcauggucgacggcugguacggcuuccgccaccagaacuccgagggcaucggccaggccgccgaccucaaguccacccaggccgccaucgaccagaucaacggcaagcucaaccgccucaucggcaagaccaacgagaaguuccaccagaucgagaaggaguucuccgaggucgagggccgcauccaggaccucgagaaguacgucgaggacaccaagaucgaccucugguccuacaacgccgagcuccucgucgcccucgagaaccagcacaccaucgaccucaccgacuccgagaugaacaagcucuucgagaagaccaagaagcagcuccgcgagaacgccgaggacaugggcaacggcugcuucaagaucuaccacaagugcgacaacgccugcaucggcuccauccgcaacggcaccuacgaccacgacgucuaccgcgacgaggcccucaacaaccgcuuccagaucaagggcgucgagcucaaguccggcuacaaggacuggauccucuggaucuccuucgccaucuccugcuuccuccucugcgucgcccuccucggcuucaucaugugggccugccagaagggcaacauccgcugcaacaucugcaucuga

SEQ ID NO: 108910 - RNA, 1701 nt, Artificial Sequence; identical to SEQ ID NO: 97951
  derived and/or modified CDS sequence (opt2) from hemagglutinin__InfluenzaA__AJJ99233

SEQ ID NO: 108911 - RNA, 1701 nt, Artificial Sequence
  derived and/or modified CDS sequence (opt2) from hemagglutinin__InfluenzaA__AJJ99244
augaaggccauccucgucgucaugcucuacaccuucgccaccgccaacgccgacacccucugcaucggcuaccacgccaacaacuccaccgacaccgucgacaccguccucgagaagaacgucaccgucacccacuccgucaaccuccucgaggacaagcacaacggcaagcucugcaagcuccgcggcgucgccccccuccaccucggcaagugcaacaucgccggcuggauccucggcaaccccgagugcgagucccucuccaccgccuccuccugguccuacaucgucgagaccuccggcuccgacaacggcaccugcuaccccggcgacuucaucgacuacgaggagcuccgcgagcagcucuccuccgucuccuccuucgagcgcuucgagaucuuccccaagaccuccuccuggcccaaccacgacuccaacaagggcgucaccgccgccugcccccacgccggcgccaagggcuucuacaagaaccucaucuggcucgucaagaagggcaacuccuaccccaagcucuccaaguccuacaucaacgacaagggcaaggagguccucguccucuggggcauccaccaccccuccaccaccgccgaccagcagucccucuaccagaacgccgacaccuacgucuucgucggcaccucccgcuacuccaagaaguucaagcccgagaucgccauccgccccaagguccgcgaccaggagggccgcaugaacuacuacuggacccucgucgagcccggcgacaagaucaccuucgaggccaccggcaaccucgucgucccccgcuacgccuucgccauggagcgcaacgccggcuccggcaucaucaucuccgacacccccguccacgacugcaacaccaccugccagacccccaagggcgccaucaacaccucccuccccuuccagaacauccaccccaucaccaucggcaagugccccaaguacgucaaguccaccaagcuccgccucgccaccggccuccgcaacguccccuccauccagucccgcggccucuucggcgccaucgccggcuucaucgagggcggcuggaccggcauggucgacggcugguacggcuaccaccaccagaacgagcagggcuccggcuacgccgccgaccucaaguccacccagaacgccaucgacaagaucaccaacaaggucaacuccgucaucgagaagaugaacacccaguucaccgccgucggcaaggaguucaaccaccucgagaagcgcaucgagaaccucaacaagaaggucgacgacggcuuccucgacaucuggaccuacaacgccgagcuccucguccuccucgagaacgagcgcacccucgacuaccacgacuccaacgucaagaaccucuacgagaagguccgcaaccagcucaagaacaacgccaaggagaucggcaacggcugcuucgaguucuaccacaagugcgacaacaccugcauggaguccgucaagaacggcaccuacgacuaccccaaguacuccgaggaggccaagcucaaccgcgaggagaucgacggcgucaagcucgaguccacccgcaucuaccagauccucgccaucuacuccaccgucgccuccucccucguccucgucgucucccucggcgccaucuccuucuggaugugcuccaacggcucccuccagugccgcaucugcaucuga

SEQ ID NO: 108912 - RNA, 1701 nt, Artificial Sequence
  derived and/or modified CDS sequence (opt2) from hemagglutinin__InfluenzaA__AJJ99255
augaaggccauccucgucguccuccucuacaccuucgccaccgccaacgccgacacccucugcaucggcuaccacgccaacaacuccaccgacaccgucgacaccguccucgagaagaacgucaccgucacccacuccgucaaccuccucgaggacaaccacaacggcaagcucugcaagcuccgcggcgucgccccccuccaccucggcaagugcaacaucgccggcuggauccucggcaaccccgagugcgagucccucuccaccgccuccuccugguccuacaucgucgagaccuccuccuccgacaacggcaccugcuaccccggcgacuucaucaacuacgaggagcuccgcgagcagcucuccuccgucuccuccuucgagcgcuucgagaucuuccccaagaccuccuccuggcccaaccacgacuccaacaagggcgucaccgccgccugcccccgcgccggcgccaaguccuucuacaagaaccucaucuggcucgucaagaagggcaacuccuaccccaagcucuccaaguccuacaucaacgacaagggcaaggagguccucgucauguggggcauccaccaccccuccaccaccgccgaccagcagucccucuaccagaacgccgacgccuacgucuucgucggcaccucccgcuacuccaaggaguucaagcccgagaucgccauccgccccaagguccgcgaccaggagggccgcaugaacuacuacuggacccucgucgagcccggcgacaagaucaccuucgaggccaccggcaaccuccucgucccccgcuacgccuucgccauggagcgcaacgccggcuccggcaucaucaucuccgacacccccguccacgacugcaacaccaccugccagacccccaagggcgccaucaacaccucccuccccuuccagaacauccaccccaucaccaucggcaagugccccaaguacgucaaguccaccaagcuccgccucgccaccggccuccgcaacguccccuccauccagucccgcggccucuucggcgccaucgccggcuucaucgagggcggcuggaccggcauggucgacggcugguacggcuaccaccaccagaacgagcagggcuccggcuacgccgccgaccucaaguccacccagaacgccaucgacaagaucaccaacaaggucaacuccgucaucgagaagaugaacacccaguucaccgccgucggcaaggaguucaaccaccucgagaagcgcaucgagaaccucaacaagaaggucgacgacggcuuccucgacaucuggaccuacaacgccgagcuccucguccuccucgagaacgagcgcacccucgacuaccacgacuccaacgucaagaaccucuacgagaagguccgcaaccagcucaagaacaacgccaaggagaucggcaacggcugcuucgaguucuaccacaagugcgacaacaccugcauggaguccgucaagaacggcaccuacgacuaccccaaguacuccgaggaggccaagcucaaccgcgaggagaucgacggcgucaagcucgaguccacccgcaucuaccagauccucgccaucuacuccaccgucgccuccucccucguccucgucgucucccucggcgccaucuccuucuggaugugcuccaacggcucccuccagugccgcaucugcaucuga

SEQ ID NO: 108913 - RNA, 1698 nt, Artificial Sequence
  derived and/or modified CDS sequence (opt2) from hemagglutinin__InfluenzaA__AJJ99267
augaaggucaagcuccucguccuccucugcaccuucaccgccaccuacgccgacaccaucugcaucggcuaccacgccaacaacuccaccgacaccgucgacaccguccucgagaagaacgucaccgucacccacuccgucaaccuccucgagaacucccacaacggcaagcucugccuccucaagggcaucgccccccuccagcucggcaacugcuccgucgccggcuggauccucggcaaccccgagugcgagcuccucaucuccaaggaguccugguccuacaucgucgagaagcccaaccccgagaacggcaccugcuaccccggccacuucgccgacuacgaggagcuccgcgagcagcucuccuccgucuccuccuucgagcgcuucgagaucuuccccaaggaguccuccuggcccaaccacaccaucaccggcgucuccgccuccugcucccacaacggcgaguccuccuucuaccgcaaccuccucuggcucaccggcaagaacggccucuaccccaaccucuccaaguccuacgccaacaacaaggagaaggagguccucguccucuggggcguccaccacccccccaacaucggcgaccagaaggcccucuaccacaccgagaacgccuacgucuccgucgucuccucccacuacucccgcaaguucacccccgagaucgccaagcgccccaagguccgcgaccaggagggccgcaucaacuacuacuggacccuccucgagcccggcgacaccaucaucuucgaggccaacggcaaccucaucgccccccgcuacgccuucgcccucucccgcggcuucggcuccggcaucaucaacuccaacgcccccauggacaagugcgacgccaagugccagaccccccagggcgccaucaacuccucccuccccuuccagaacguccaccccgucaccaucggcgagugccccaaguacguccgcuccgccaagcuccgcauggucaccggccuccgcaacauccccuccauccagucccgcggccucuucggcgccaucgccggcuucaucgagggcggcuggaccggcauggucgacggcugguacggcuaccaccaccagaacgagcagggcuccggcuacgccgccgaccagaaguccacccagaacgccaucaacggcaucaccaacaaggucaacuccgucaucgagaagaugaacacccaguucaccgccgucggcaaggaguucaacaagcucgagcgccgcauggagaaccucaacaagaaggucgacgacggcuucaucgacaucuggaccuacaacgccgagcuccucguccuccucgagaacgagcgcacccucgacuuccacgacuccaacgucaagaaccucuacgagaaggucaagucccagcucaagaacaacgccaaggagaucggcaacggcugcuucgaguucuaccacaagugcaacgacgagugcauggaguccgucaagaacggcaccuacgacuaccccaaguacuccgaggaguccaagcucaaccgcgagaagaucgacggcgucaagcucgaguccaugggcgucuaccagauccucgccaucuacuccaccgucgccuccucccucguccuccucgucucccucggcgccgucuccuucuggaugugcuccaacggcucccuccagugccgcgucugcaucuga

SEQ ID NO: 108914 - RNA, 1701 nt, Artificial Sequence; identical to SEQ ID NO: 103086
  derived and/or modified CDS sequence (opt2) from hemagglutinin__InfluenzaA__AJJ99278

SEQ ID NO: 108915 - RNA, 1701 nt, Artificial Sequence; identical to SEQ ID NO: 103089
  derived and/or modified CDS sequence (opt2) from hemagglutinin__InfluenzaA__AJJ99289

SEQ ID NO: 108916 - RNA, 1698 nt, Artificial Sequence
  derived and/or modified CDS sequence (opt2) from hemagglutinin__InfluenzaA__AJJ99301
augaaggucaagcuccucguccuccucugcaccuucaccgccaccuacgccgacaccaucugcaucggcuaccacgccaacaacuccaccgacaccgucgacaccguccucgagaagaacgucaccgucacccacuccgucaaccuccucgagaacucccacaacggcaagcucugccuccucaagggcaucgccccccuccagcucggcaacugcuccgucgccggcuggauccucggcaaccccgagugcgagucccucaucuccaaggaguccugguccuacaucgucgagaagcccaaccccgagaacggcaccugcuaccccggccacuucgccgacuacgaggagcuccgcgagcagcucuccuccgucuccuccuucgagcgcuucgagaucuuccccaaggaguccuccuggcccaaccacaccgucaccggcgucuccgccuccugcucccacaacggcgaguccuccuucuaccgcaaccuccucuggcucaccggcaagaacggccucuaccccaaccucuccaaguccuacgccaacaacaaggagaaggagguccucguccucuggggcguccaccacccccccaacaucggcgaccagaaggcccucuaccacaccgagaacgccuacgucuccgucgucuccucccacuacucccgcaaguucacccccgagaucgccaagcgccccaagguccgcgaccaggagggccgcaucaacuacuacuggacccuccucgagcccggcgacaccaucaucuucgaggccaacggcaaccucaucgccccccgcuacgccuucgcccucucccgcggcuucggcuccggcaucaucaacuccaacgcccccauggacaagugcgacgccaagugccagaccccccagggcgccaucaacuccucccuccccuuccagaacguccaccccgucaccaucggcgagugccccaaguacguccgcuccgccaagcuccgcauggucaccggccuccgcaacauccccuccauccagucccgcggccucuucggcgccaucgccggcuucaucgagggcggcuggaccggcauggucgacggcugguacggcuaccaccaccagaacgagcagggcuccggcuacgccgccgaccagaaguccacccagaacgccaucaacggcaucaccaacaaggucaacuccgucaucgagaagaugaacacccaguucaccgccgucggcaaggaguucaacaagcucgagcgccgcauggagaaccucaacaagaaggucgacgacggcuucaucgacaucuggaccuacaacgccgagcuccucguccuccucgagaacgagcgcacccucgacuuccacgacuccaacgucaagaaccucuacgagaaggucaagucccagcucaagaacaacgccaaggagaucggcaacggcugcuucgaguucuaccacaagugcaacgacgagugcauggaguccgucaagaacggcaccuacgacuaccccaaguacuccgaggaguccaagcucaaccgcgagaagaucgacggcgucaagcucgaguccaugggcgucuaccagauccucgccaucuacuccaccgucgccuccucccucguccuccucgucucccucggcgccaucuccuucuggaugugcuccaacggcucccuccagugccgcaucugcaucuga

SEQ ID NO: 108917 - RNA, 1698 nt, Artificial Sequence
  derived and/or modified CDS sequence (opt2) from hemagglutinin__InfluenzaA__AJJ99324
augaaggucaagcuccucguccuccucugcaccuucaccgccaccuacgccgacaccaucugcaucggcuaccacgccaacaacuccaccgacaccgucgacaccguccucgagaagaacgucaccgucacccacuccgucaaccuccucgagaacucccacaacggcaagcucugccuccucaagggcaucgccccccuccagcucggcaacugcuccgucgccggcuggauccucggcaaccccgagugcgagcuccucaucuccaaggaguccugguccuacaucgucgagaagcccaaccccgagaacggcaccugcuaccccggccacuucgccgacuacgaggagcuccgcgagcagcucuccuccgucuccuccuucgagcgcuucgagaucuuccccaaggaguccuccuggcccaaccacaccgucaccggcgucuccgccuccugcucccacaacggcgagaacuccuucuaccgcaaccuccucuggcucaccggcaaguccggccucuaccccaaccucuccaaguccuacgccaacaacaaggagaaggagguccucguccucuggggcguccaccacccccccaacaucgccgaccagaagacccucuaccacaccgagaacgccuacgucuccgucgucuccucccacuacucccgcaaguucacccccgagaucgccaagcgccccaagguccgcgaccaggagggccgcaucaacuacuacuggacccuccucgagcccggcgacaccaucaucuucgaggccaacggcaaccucaucgccccccgcuacgccuucgcccucucccgcggcuucggcuccggcaucaucaacuccaacgcccccauggacaagugcgacgccaagugccagaccccccagggcgccaucaacuccucccuccccuuccagaacguccaccccgucaccaucggcgagugccccaaguacguccgcuccgccaagcuccgcauggucaccggccuccgcaacauccccuccauccagucccgcggccucuucggcgccaucgccggcuucaucgagggcggcuggaccggcauggucgacggcugguacggcuaccaccaccagaacgagcagggcuccggcuacgccgccgaccagaaguccacccagaacgccaucaacggcaucaccaacaaggucaacuccgucaucgagaagaugaacacccaguucaccgccgucggcaaggaguucaacaagcucgagcgccgcauggagaaccucaacaagaaggucgacgacggcuucaucgacaucuggaccuacaacgccgagcuccucguccuccucgagaacgagcgcacccucgacuuccacgacuccaacgucaagaaccucuacgagaaggucaagucccagcucaagaacaacgccaaggagaucggcaacggcugcuucgaguucuaccacaagugcaacgacgagugcauggaguccgucaagaacggcaccuacgacuaccccaaguacuccgaggaguccaagcucaaccgcgagaagaucgacggcgucaagcucgaguccaugggcgucuaccagauccucgccaucuacuccaccgucgccuccucccucguccuccucgucucccucggcgccaucuccuucuggaugugcuccaacggcucccuccagugccgcaucugcaucuga

SEQ ID NO: 108918 - RNA, 1701 nt, Artificial Sequence
  derived and/or modified CDS sequence (opt2) from hemagglutinin__InfluenzaA__AJJ99335
auggaggccauccucgucguccuccucuacaccuucgccaccgccaacgccgacacccucugcaucggcuaccacgccaacaacuccaccgacaccgucgacaccguccucgagaagaacgucaccgucacccacuccgucaaccuccucgaggacaagcacaacggcaagcucugcaagcuccgcggcgucgccccccuccaccucggcaagugcaacaucgccggcuggauccucggcaaccccgagugcgagucccucuccaccgccuccuccugguccuacaucgucgagaccuccuccuccaacaacggcaccugcuaccccggcgacuucaucgacuacgaggagcuccgcgagcagcucuccuccgucuccuccuucgagcgcuucgagaucuuccccaagaccuccuccuggcccaaccacgacuccaacaagggcgucaccgccgccugcccccacgccggcgccaaguccuucuacaagaaccucaucuggcucgucaagaagggcaacuccuaccccaagcucuccaaguccuacaucaacgacaagggcaaggagguccucguccucuggggcauccaccaccccuccaccuccgccgaccagcagucccucuaccagaacgccgacgccuacgucuucgucggcuccucccgcuacuccaagaaguucaagcccgagaucgccauccgccccaagguccgcgaccaggagggccgcaugaacuacuacuggacccucgucgagcccggcgacaagaucaccuucgaggccaccggcaaccucgucgucccccgcuacgccuucgccauggagcgcaacgccggcuccggcaucaucaucuccgacacccccguccacgacugcaacaccaccugccagacccccaacggcgccaucaacaccucccuccccuuccacaacauccaccccaucaccaucggcaagugccccaaguacgucaaguccaccaagcuccgccucgccaccggccuccgcaacguccccuccauccagucccgcggccucuucggcgccaucgccggcuucaucgagggcggcuggaccggcauggucgacggcugguacggcuaccaccaccagaacgagcagggcuccggcuacgccgccgaccucaaguccacccagaacgccaucgacgagaucaccaacaaggucaacuccgucaucgagaagaugaacacccaguucaccgccgucggcaaggaguucaaccaccucgagaagcgcaucgagaaccucaacaagaaggucgacgacggcuuccucgacaucuggaccuacaacgccgagcuccucguccuccucgagaacgagcgcacccucgacuaccacgacuccaacgucaagaaccucuacgagaagguccgcucccagcucaagaacaacgccaaggagaucggcaacggcugcuucgaguucuaccacaagugcgacaacaccugcauggaguccgucaagaacggcaccuacgacuaccccaaguacuccgaggaggccaagcucaaccgcgaggagaucgacggcgucaagcucgaguccacccgcaucuaccagauccucgccaucuacuccaccgucgccuccucccucguccucgucgucucccucggcgccaucuccuucuggaugugcuccaacggcucccuccagugccgcaucugcaucuga

SEQ ID NO: 108919 - RNA, 1701 nt, Artificial Sequence; identical to SEQ ID NO: 100821
  derived and/or modified CDS sequence (opt2) from hemagglutinin__InfluenzaA__AJJ99357

SEQ ID NO: 108920 - RNA, 1701 nt, Artificial Sequence; identical to SEQ ID NO: 102860
  derived and/or modified CDS sequence (opt2) from hemagglutinin__InfluenzaA__AJJ99368

SEQ ID NO: 108921 - RNA, 1701 nt, Artificial Sequence; identical to SEQ ID NO: 102471
  derived and/or modified CDS sequence (opt2) from hemagglutinin__InfluenzaA__AJJ99379

SEQ ID NO: 108922 - RNA, 1701 nt, Artificial Sequence
  derived and/or modified CDS sequence (opt2) from hemagglutinin__InfluenzaA__AJJ99390
auggaggccauccucgucguccuccucuacaccuucgccaccgccaacgccgacacccucugcaucggcuaccacgccaacaacuccaccgacaccgucgacaccguccucgagaagaacgucaccgucacccacuccgucaaccuccucgaggacaagcacaacggcaagcucugcaagcuccgcggcgucgccccccuccaccucggcaagugcaacaucgccggcuggauccucggcaaccccgagugcgagucccucuccaccgccuccuccugguccuacaucgucgagaccuccuccuccgacaacggcaccugcuaccccggcgacuucaucgacuacgaggagcuccgcgagcagcucuccuccgucuccuccuucgagcgcuucgagaucuuccccaagaccuccuccuggcccaaccacgacuccaacaagggcgucaccgccgccugcccccacgccggcgccaaguccuucuacaagaaccucaucuggcucgucaagaagggcaacuccuaccccaagcucuccaaguccuacaucaacgacaagggcaaggagguccucguccucuggggcauccaccaccccuccaccuccgccgaccagcagucccucuaccagaacgccgacgccuacgucuucgucggcuccucccgcuacuccaagaaguucaagcccgagaucgccauccgccccaagguccgcgaccaggagggccgcaugaacuacuacuggacccucgucgagcccggcgacaagaucaccuucgaggccaccggcaaccucgucgucccccgcuacgccuucgccauggagcgcaacgccggcuccggcaucaucaucuccgacacccccguccacgacugcaacaccaccugccagacccccaagggcgccaucaacaccucccuccccuuccacaacauccaccccaucaccaucggcaagugccccaaguacgucaaguccaccaagcuccgccucgccaccggccuccgcaacguccccuccauccagucccgcggccucuucggcgccaucgccggcuucaucgagggcggcuggaccggcauggucgacggcugguacggcuaccaccaccagaacgagcagggcuccggcuacgccgccgaccucaaguccacccagaacgccaucgacaagaucaccaacaaggucaacuccgucaucgagaagaugaacacccaguucaccgccgucggcaaggaguucaaccaccucgagaagcgcaucgagaaccucaacaagaaggucgacgacggcuuccucgacaucuggaccuacaacgccgagcuccucguccuccucgagaacgagcgcacccucgacuaccacgacuccaacgucaagaaccucuacgagaagguccgcucccagcucaagaacaacgccaaggagaucggcaacggcugcuucgaguucuaccacaagugcgacaacaccugcauggaguccgucaagaacggcaccuacgacuaccccaaguacuccgaggaggccaagcucaaccgcgaggagaucgacggcgucaagcucgaguccacccgcaucuaccagauccucgccaucuacuccaccgucgccuccucccucguccucgucgucucccucggcgccaucuccuucuggaugugcuccaacggcucccuccagugccgcaucugcaucuga

SEQ ID NO: 108923 - RNA, 1701 nt, Artificial Sequence; identical to SEQ ID NO: 100821
  derived and/or modified CDS sequence (opt2) from hemagglutinin__InfluenzaA__AJJ99401

SEQ ID NO: 108924 - RNA, 1698 nt, Artificial Sequence
  derived and/or modified CDS sequence (opt2) from hemagglutinin__InfluenzaA__AJJ99413
augaaggucaagcuccucguccuccucugcaccuucaccgccaccuacgccgacaccaucugcaucggcuaccacgccaacaacuccaccgacaccgucgacaccguccucgagaagaacgucaccgucacccacuccgucaaccuccucgagaacucccacaacggcaagcucugccuccucaagggcaucgccccccuccagcucggcaacugcuccgucgccggcuggauccucggcaaccccgagugcgagcuccucaucuccaaggaguccugguccuacaucgucgagaagcccaaccccgagaacggcaccugcuaccccggccacuucgccgacuacgaggagcuccgcgagcagcucuccuccgucuccuccuucgagcgcuucgagaucuuccccaaggaguccuccuggcccaaccacaccgucaccggcgucuccgccuccugcucccacaacggcgagaacuccuucuaccgcaaccuccucuggcucaccggcaagaacggccucuaccccaaccucuccaaguccuacgccaacaacaaggagaaggagguccucguccucuggggcguccaccacccccccaacaucgccgaccagaagacccucuaccacaccgagaacgccuacgucuccgucgucuccucccacuacucccgcaaguucacccccgagaucgccaagcgccccaagguccgcgaccaggagggccgcaucaacuacuacuggacccuccucgagcccggcgacaccaucaucuucgaggccaacggcaaccucaucgccccccgcuacgccuucgcccucucccgcggcuucggcuccggcaucaucaacuccaacgccuccauggacaagugcgacgccaagugccagaccccccagggcgccaucaacuccucccuccccuuccagaacguccaccccgucaccaucggcgagugccccaaguacguccgcuccgccaagcuccgcauggucaccggccuccgcaacauccccuccauccagucccgcggccucuucggcgccaucgccggcuucaucgagggcggcuggaccggcauggucgacggcugguacggcuaccaccaccagaacgagcagggcuccggcuacgccgccgaccagaaguccacccagaacgccaucaacggcaucaccaacaaggucaacuccgucaucgagaagaugaacacccaguucaccgccgucggcaaggaguucaacaagcucgagcgccgcauggagaaccucaacaagaaggucgacgacggcuucaucgacaucuggaccuacaacgccgagcuccucguccuccucgagaacgagcgcacccucgacuuccacgacuccaacgucaagaaccucuacgagaaggucaagucccagcucaagaacaacgccaaggagaucggcaacggcugcuucgaguucuaccacaagugcaacgacgagugcauggaguccgucaagaacggcaccuacgacuaccccaaguacuccgaggaguccaagcucaaccgcgagaagaucgacggcgucaagcucgaguccaugggcgucuaccagauccucgccaucuacuccaccgucgccuccucccucguccuccucgucucccucggcgccaucuccuucuggaugugcuccaacggcucccuccagugccgcaucugcaucuga

SEQ ID NO: 108925 - RNA, 1698 nt, Artificial Sequence; identical to SEQ ID NO: 99662
  derived and/or modified CDS sequence (opt2) from hemagglutinin__InfluenzaA__AJJ99425

SEQ ID NO: 108926 - RNA, 1698 nt, Artificial Sequence
  derived and/or modified CDS sequence (opt2) from hemagglutinin__InfluenzaA__AJJ99437
augaaggucaagcuccucguccuccucugcaccuucaccgccaccuacgccgacaccaucugcaucggcuaccacgccaacaacuccaccgacaccgucgacaccguccucgagaagaacgucaccgucacccacuccgucaaccuccucgagaacucccacaacggcaagcucugccuccucaagggcaucgccccccuccagcucggcaacugcuccgucgccggcuggauccucggcaaccccgagugcgagcuccucaucuccaaggaguccugguccuacaucgucgagaagcccaaccccgagaacggcaccugcuaccccggccacuucgccgacuacgaggagcuccgcgagcagcucuccuccgucuccuccuucgagcgcuucgagaucuuccccaaggaguccuccuggcccaaccacaccgucaccggcgucuccgccuccugcucccacaacggcgagaacuccuucuaccgcaaccuccucuggcucaccggcaagaacggccucuaccccucccucuccaaguccuacgccaacaacaaggagaaggagguccucguccucuggggcguccaccacccccccaacaucgccgaccagaagacccucuaccacaccgagaacgccuacgucuccgucgucuccucccacuacucccgcaaguucacccccgagaucgccaagcgccccaagguccgcgaccaggagggccgcaucaacuacuacuggacccuccucgagcccggcgacaccaucaucuucgaggccaacggcaaccucaucgccccccgcuacgccuucgcccucucccgcggcuucggcuccggcaucaucaacuccaacgcccccauggacaagugcgacgccaagugccagaccccccagggcgccaucaacuccucccuccccuuccagaacguccaccccgucaccaucggcgagugccccaaguacguccgcuccgccaagcuccgcauggucaccggccuccgcaacauccccuccauccagucccgcggccucuucggcgccaucgccggcuucaucgagggcggcuggaccggcauggucgacggcugguacggcuaccaccaccagaacgagcagggcuccggcuacgccgccgaccagaaguccacccagaacgccaucaacggcaucaccaacaaggucaacuccgucaucgagaagaugaacacccaguucaccgccgucggcaaggaguucaacaagcucgagcgccgcauggagaaccucaacaagaaggucgacgacggcuucaucgacaucuggaccuacaacgccgagcuccucguccuccucgagaacgagcgcacccucgacuuccacgacuccaacgucaagaaccucuacgagaaggucaagucccagcucaagaacaacgccaaggagaucggcaacggcugcuucgaguucuaccacaagugcaacgacgagugcauggaguccgucaagaacggcaccuacgacuaccccaaguacuccgaggaguccaagcucaaccgcgagaagaucgacggcgucaagcucgaguccaugggcgucuaccagauccucgccaucuacuccaccgucgccuccucccucguccuccucgucucccucggcgccaucuccuucuggaugugcuccaacggcucccuccagugccgcaucugcaucuga

SEQ ID NO: 108927 - RNA, 1698 nt, Artificial Sequence
  derived and/or modified CDS sequence (opt2) from hemagglutinin__InfluenzaA__AJJ99449
augaaggucaagcuccucguccuccucugcaccuucaccgccaccuacgccgacaccaucugcaucggcuaccacgccaacaacuccaccgacaccgucgacaccguccucgagaagaacgucaccgucacccacuccgucaaccuccucgagaacucccacaacggcaagcucugccuccucaagggcaucgccccccuccagcucggcaacugcuccgucgccggcuggauccucggcaaccccgagugcgagcuccucaucuccaaggaguccugguccuacaucgucgagaagcccaaccccgagaacggcaccugcuaccccggccacuucgccgacuacgaggagcuccgcgagcagcucuccuccgucuccuccuucgagcgcuucgagaucuuccccaaggaguccuccuggcccaaccacaccgucaccggcgucuccgccuccugcucccacaacggcgaguccuccuucuaccgcaaccuccucuggcucaccggcaagaacggccucuaccccaaccucuccaaguccuacgccaacaacaaggagaaggagguccucguccucuggggcguccaccacccccccaacaucggcgaccagaaggcccucuaccacaccgagaacgccuacgucuccgucgucuccucccacuacucccgcaaguucacccccgagaucgccaagcgccccaagguccgcgaccaggagggccgcaucaacuacuacuggacccuccucgagcccggcgacaccaucaucuucgaggccaacggcaaccucaucgccccccgcuacgccuucgcccucucccgcggcuucggcuccggcaucaucaacuccaacgcccccaugggcaagugcgacgccaagugccagaccccccagggcgccaucaacuccucccuccccuuccagaacguccaccccgucaccaucggcgagugccccaaguacguccgcuccgccaagcuccgcauggucaccggccuccgcaacauccccuccauccagucccgcggccucuucggcgccaucgccggcuucaucgagggcggcuggaccggcauggucgacggcugguacggcuaccaccaccagaacgagcagggcuccggcuacgccgccgaccagaaguccacccagaacgccaucaacggcaucaccaacaaggucaacuccgucaucgagaagaugaacacccaguucaccgccgucggcaaggaguucaacaagcucgagcgccgcauggagaaccucaacaagaaggucgacgacggcuucaucgacaucuggaccuacaacgccgagcuccucguccuccucgagaacgagcgcacccucgacuuccacgacuccaacgucaagaaccucuacgagaaggucaagucccagcucaagaacaacgccaaggagaucggcaacggcugcuucgaguucuaccacaagugcaacgacgagugcauggaguccgucaagaacggcaccuacgacuaccccaaguacuccaaggaguccaagcucaaccgcgagaagaucgacggcgucaagcucgaguccaugggcgucuaccagauccucgccaucuacuccaccgucgccuccucccucguccuccucgucucccucggcgccaucuccuucuggaugugcuccaacggcucccuccagugccgcaucugcaucuga

SEQ ID NO: 108928 - RNA, 1698 nt, Artificial Sequence; identical to SEQ ID NO: 98524
  derived and/or modified CDS sequence (opt2) from hemagglutinin__InfluenzaA__AJJ99461

SEQ ID NO: 108929 - RNA, 1701 nt, Artificial Sequence
  derived and/or modified CDS sequence (opt2) from hemagglutinin__InfluenzaA__AJJ99483
augaaggccauccuccucguccuccucuacaccuucgccaccgccaacgccgacacccucugcaucggcuaccacgccaacaacuccaccgacaccgucgacaccguccucgagaagaacgucaccgucacccacuccgucaaccuccucgaggacaagcacaacggcaagcucugcaagcuccgcggcgucgccccccuccaccucggcaagugcaacaucgccggcuggauccucggcaaccccgagugcgagucccucuccaccgccuccuccugguccuacaucgucgagaccuccuccuccgacaacggcaccugcuaccccggcgacuucaucaacuacgaggagcuccgcgagcagcucuccuccgucuccuccuucgagcgcuucgagaucuuccccaagaccuccuccuggcccaaccacgacuccaacaagggcgucaccgccgccugcccccgcgccggcgccaaguccuucuacaagaaccucaucuggcucgucaagaagggcaacuccuaccccaagcucuccaaguccuacaucaacgacaagggcaaggagguccucguccucuggggcauccaccaccccuccaccaccgccgaccagcagucccucuaccagaacgccgacgccuacgucuucgucggcaccucccgcuacuccaagaaguucaagcccgagaucgccauccgccccaagguccgcgaccaggagggccgcaugaacuacuacuggacccucgucgagcccggcgacaagaucaccuucgaggccaccggcaaccuccucgucccccgcuacgccuucgccauggagcgcaacgccggcuccggcaucaucaucuccgacacccccguccacgacugcaacaccaccugccagacccccaagggcgccaucaacaccucccuccccuuccagaacauccaccccaucaccaucggcaagugccccaaguacgucaaguccaccaagcuccgccucgccaccggccuccgcaacguccccuccauccagucccgcggccucuucggcgccaucgccggcuucaucgagggcggcuggaccggcauggucgacggcugguacggcuaccaccaccagaacgagcagggcuccggcuacgccgccgaccucaaguccacccagaacgccaucgacaagaucaccaacaaggucaacuccgucaucgagaagaugaacacccaguucaccgccgucggcaaggaguucaaccaccucgagaagcgcaucgagaaccucaacaagaaggucgacgacggcuuccucgacaucuggaccuacaacgccgagcuccucguccuccucgagaacgagcgcacccucgacuaccacgacuccaacgucaagaaccucuacgagaagguccgcaaccagcucaagaacaacgccaaggagaucggcaacggcugcuucgaguucuaccacaagugcgacaacaccugcauggaguccgucaagaacggcaccuacgacuaccccaaguacuccgaggaggccaagcucaaccgcgaggagaucgacggcgucaagcucgaguccacccgcaucuaccagauccucgccaucuacuccaccgucgccuccucccucguccucgucgucucccucggcgccaucuccuucuggaugugcuccaacggcucccuccagugccgcaucugcaucuga

SEQ ID NO: 108930 - RNA, 1701 nt, Artificial Sequence; identical to SEQ ID NO: 103089
  derived and/or modified CDS sequence (opt2) from hemagglutinin__InfluenzaA__AJJ99494

SEQ ID NO: 108931 - RNA, 1701 nt, Artificial Sequence
  derived and/or modified CDS sequence (opt2) from hemagglutinin__InfluenzaA__AJJ99505
augaaggccauccucgucguccuccucuacaccuucgccaccgccaacgccgacacccucugcaucggcuaccacgccaacaacuccaccgacaccgucgacaccguccucgagaagaacgucaccgucacccacuccgucaaccuccucgaggacaagcacaacggcaagcucugcaagcuccgcggcgucgccccccuccaccucggcaagugcaacaucgccggcuggauccucggcaaccccgagugcgagucccucuccaccgccuccuccugguccuacaucgucgagaccuccuccuccgacaacggcaccugcuaccccggcgacuucaucaacuacgaggagcuccgcgagcagcucuccuccgucuccuccuucgagcgcuucgagaucuuccccaagaccuccuccuggcccaaccacgacuccaacaagggcgucaccgccgccugcccccacgccggcgccaaguccuucuacaagaaccucaucuggcucgucaagaagggcaacuccuaccccaagcucuccaaguccuacaucaacgacaagggcaaggagguccucguccucuggggcauccaccaccccuccaccuccgccgaccagcagucccucuaccagaacgccgacgccuacgucuucgucggcaccuccaaguacuccaagaaguucaagcccgagaucgccguccgccccaagguccgcgaccaggagggccgcaugaacuacuacuggacccucgucgagcccggcgacaagaucaccuucgaggccaccggcaaccuccucgucccccgcuacgccuucgccauggagcgcaacgccggcuccggcaucaucaucuccgacacccccguccacgacugcaacaccaccugccagacccccaagggcgccaucaacaccucccuccccuuccagaacauccaccccaucaccaucggcaagugccccaaguacgucaaguccaccaagcuccgccucgccaccggccuccgcaacguccccuccauccagucccgcggccucuucggcgccaucgccggcuucaucgagggcggcuggaccggcauggucgacggcugguacggcuaccaccaccagaacgagcagggcuccggcuacgccgccgaccucaaguccacccagaacgccaucgacaagaucaccaacaaggucaacuccgucaucgagaagaugaacacccaguucaccgccgucggcaagggcuucaaccaccucgagaagcgcaucgagaaccucaacaagaaggucgacgacggcuuccucgacaucuggaccuacaacgccgagcuccucguccuccucgagaacgagcgcacccucgacuaccacgacuccaacgucaagaaccucuacgagaagguccgcucccagcucaagaacaacgccaaggagaucggcaacggcugcuucgaguucuaccacaagugcgacaacaccugcauggaguccgucaagaacggcaccuacgacuaccccaaguacuccgaggaggccaagcucaaccgcgaggagaucgacggcgucaagcucgaguccacccgcaucuaccagauccucgccaucuacuccaccgucgccuccucccucguccucgucgucucccucggcgccaucuccuucuggaugugcuccaacggcucccuccagugccgcaucugcaucuga

SEQ ID NO: 108932 - RNA, 1701 nt, Artificial Sequence; identical to SEQ ID NO: 98947
  derived and/or modified CDS sequence (opt2) from hemagglutinin__InfluenzaA__AJJ99516

SEQ ID NO: 108933 - RNA, 1701 nt, Artificial Sequence
  derived and/or modified CDS sequence (opt2) from hemagglutinin__InfluenzaA__AJJ99527
augaaggccauccuccucguccuccucuacaccuucgccaccgccaacgccgacacccucugcaucggcuaccacgccaacaacuccaccgacaccgucgacaccguccucgagaagaacgucaccgucacccacuccgucaaccuccucgaggacaagcacaacggcaagcucugcaagcuccgcggcgucgccccccuccaccucggcaagugcaacaucgccggcuggauccucggcaaccccgagugcgagucccucuccaccgccuccuccugguccuacaucgucgagaccuccuccuccgacaacggcaccugcuaccccggcgacuucaucaacuacgaggagcuccgcgagcagcucuccuccgucuccuccuucgagcgcuucgagaucuuccccaagaccuccuccuggcccaaccacgacuccaacaagggcgucaccgccgccugcccccgcgccggcgccaaguccuucuacaagaaccucaucuggcucgucaagaagggcaacuccuaccccaagcucuccaaguccuacaucaacgacaagggcaaggagguccucguccucuggggcauccaccaccccuccaccaccgccgaccagcagucccucuaccagaacgccgacgccuacgucuucgucggcaccucccgcuacuccaagaaguucaagcccgagaucgccauccgccccaagguccgcgaccaggagggccgcaugaacuacuacuggacccucgucgagcccggcgacaagaucaccuucgaggccaccggcaaccuccucgucccccgcuacgccuucgccauggagcgcaacgccggcuccggcaucaucaucuccgacacccccguccacgacugcaacaccaccugccagacccccaagggcgccaucaacaccucccuccccuuccagaacauccaccccaucaccaucggcaagugccccaaguacgucaaguccaccaagcuccgccucgccaccggccuccgcaacguccccuccauccagucccgcggccucuucggcgccaucgccggcuucaucgagggcggcuggaccggcauggucgacggcugguacggcuaccaccaccagaacgagcagggcuccggcuacgccgccgaccucaaguccacccagaacgucaucgacaagaucaccaacaaggucaacuccgucaucgagaagaugaacacccaguucaccgccgucggcaaggaguucaaccaccucgagaagcgcaucgagaaccucaacaagaaggucgacgacggcuuccucgacaucuggaccuacaacgccgagcuccucguccuccucgagaacgagcgcacccucgacuaccacgacuccaacgucaagaaccucuacgagaagguccgcaaccagcucaagaacaacgccaaggagaucggcaacggcugcuucgaguucuaccacaagugcgacaacaccugcauggaguccgucaagaacggcaccuacgacuaccccaaguacuccgaggaggccaagcucaaccgcgaggagaucgacggcgucaagcucgaguccacccgcaucuaccagauccucgccaucuacuccaccgucgccuccucccucguccucgucgucucccucggcgccaucuccuucuggaugugcuccaacggcucccuccagugccgcaucugcaucuga

SEQ ID NO: 108934 - RNA, 1701 nt, Artificial Sequence
  derived and/or modified CDS sequence (opt2) from hemagglutinin__InfluenzaA__AJJ99538
augaaggccauccucgucguccuccucuacaccuucgccaccgccaacgccgacacccucugcaucggcuaccacgccaacaacuccaccgacaccgucgacaccguccucgagaagaacgucaccgucacccacuccgucaaccuccucgaggacaagcacaacggcaagcucugcaagcuccgcggcgucgccccccuccaccucggcaagugcaacaucgccggcuggauccucggcaaccccgagugcgagucccucuccaccgccuccuccugguccuacaucgucgagaccuccuccuccgacaacggcaccugcuaccccggcgacuucaucgacuacgaggagcuccgcgagcagcucuccuccgucuccuccuucgagcgcuucgagaucuuccccaagaccuccuccuggcccaaccacgacuccaacaagggcgucaccgccgccugcccccacgccggcgccaaguccuucuacaagaaccucaucuggcucgucaagaagggcaacuccuaccccaagcucuccaaguccuacaucaacgacaagggcaaggagguccucguccucuggggcauccaccaccccuccaccaccgccgaccagcagucccucuaccagaacgccgacaccuacgucuucgucggcaccucccgcuacuccaagaaguucaagcccgagaucgccauccgccccaagguccgcgaccaggagggccgcaugaacuacuacuggacccucgucgagcccggcgacaagaucaccuucgaggccaccggcaaccucgucgucccccgcuacgccuucgccauggagcgcaacgccggcuccggcaucaucaucuccgacacccccguccacgacugcaacaccaccugccagacccccaagggcgccaucaacaccucccuccccuuccagaacauccaccccaucaccaucggcaagugccccaaguacgucaaguccaccaagcuccgccucgccaccggccuccgcaacguccccuccauccagucccgcggccucuucggcgccaucgccggcuucaucgagggcggcuggaccggcauggucgacggcugguacggcuaccaccaccagaacgagcagggcuccggcuacgccgccgaccucaaguccacccagaacgccaucgacaagaucaccaacaaggucaacuccgucaucgagaagaugaacacccaguucaccgccgucggcaaggaguucaaccaccucgagaagcgcaucgagaaccucaacaagaaggucgacgacggcuuccucgacaucuggaccuacaacgccgagcuccucguccuccucgagaacgagcgcacccucgacuaccacgacuccaacgucaagaaccucuacgagaagguccgcaaccagcucaagaacaacgccaaggagaccggcaacggcugcuucgaguucuaccacaagugcgacaacaccugcauggaguccgucaagaacggcaccuacgacuaccccaaguacuccgaggaggccaagcucaaccgcgagaagaucgacggcgucaagcucgaguccacccgcaucuaccagauccucgccaucuacuccaccgucgccuccucccucguccucgucgucucccucggcgccaucuccuucuggaugugcuccaacggcucccuccagugccgcaucugcaucuga

SEQ ID NO: 108935 - RNA, 1701 nt, Artificial Sequence
  derived and/or modified CDS sequence (opt2) from hemagglutinin__InfluenzaA__AJJ99549
augaaggccauccucgucguccuccucuacaccuucgccaccgccaacgccgacacccucugcaucggcuaccacgccaacaacuccaccgacaccgucgacaccguccucgagaagaacgucaccgucacccacuccgucaaccuccucgaggacaagcacaacggcaagcucugcaagcuccgcggcgucgccccccuccaccucggcaagugcaacaucgccggcuggauccucggcaaccccgagugcgagucccucuccaccgccuccuccugguccuacaucgucgagaccuccuccuccgacaacggcaccugcuaccccggcgacuucaucgacuacgaggagcuccgcgagcagcucuccuccgucuccuccuucgagcgcuucgagaucuuccccaagaccuccuccuggcccaaccacgacuccaacaagggcgucaccgccgccugcccccacgccggcgccaagggcuucuacaagaaccucaucuggcucgucaagaagggcaacuccuaccccaagcucuccaaguccuacaucaacgacaagggcaaggagguccucguccucuggggcauccaccaccccuccaccaccgccgaccagcagucccucuaccagaacgccgacaccuacgucuucgucggcaccucccgcuacuccaagaaguucaagcccgagaucgccauccgccccaagguccgcgaccaggagggccgcaugaacuacuacuggacccucgucgagcccggcgacaagaucaccuucgaggccaccggcaaccucgucgucccccgcuacgccuucgccauggagcgcaacgccggcuccggcaucaucaucuccgacacccccguccacgacugcaacaccaccugccagacccccaagggcgccaucaacaccucccuccccuuccagaacauccaccccaucaccaucggcaagugccccaaguacgucaaguccaccaagcuccgccucgccaccggccuccgcaacguccccuccauccagucccgcggccucuucggcgccaucgccggcuucaucgagggcggcuggaccggcauggucgacggcugguacggcuaccaccaccagaacgagcagggcuccggcuacgccgccgaccucaaguccacccagaacgccaucgacaagaucaccaacaaggucaacuccgucaucgagaagaugaacacccaguucaccgccgucggcaaggaguucaaccaccucgagaagcgcaucgagaaccucaacaagaaggucgacgacggcuuccucgacaucuggaccuacaacgccgagcuccucguccuccucgagaacgagcgcacccucgacuaccacgacuccaacgucaagaaccucuacgagaagguccgcaaccagcucaagaacaacgccaaggagaucggcaacggcugcuucgaguucuaccacaagugcgacaacaugugcauggaguccgucaagaacggcaccuacgacuaccccaaguacuccgaggaggccaagcucaaccgcgaggagaucgacggcgucaagcucgaguccacccgcaucuaccagauccucgccaucuacuccaccgccgccuccucccucguccucgucgucucccucggcgccaucuccuucuggaugugcuccaacggcucccuccagugccgcaucugcaucuga

SEQ ID NO: 108936 - RNA, 1701 nt, Artificial Sequence; identical to SEQ ID NO: 103125
  derived and/or modified CDS sequence (opt2) from hemagglutinin__InfluenzaA__AJJ99560

SEQ ID NO: 108937 - RNA, 1701 nt, Artificial Sequence
  derived and/or modified CDS sequence (opt2) from hemagglutinin__InfluenzaA__AJJ99571
augaaggccauccucgucguccuccucuacaccuucgccaccgccaacgccgacacccucugcaucggcuaccacgccaacaacuccaccgacaccgucgacaccguccucgagaagaacgucaccgucacccacuccgucaaccuccucgaggacaagcacaacggcaagcucugcaagcuccgcggcgucgccccccuccaccucggcaagugcaacaucgccggcuggauccucggcaaccccgagugcgagucccucuccaccgccuccuccugguccuacaucgucgagaccuccuccuccgacaacggcaccugcuaccccggcgacuucaucgacuacgaggagcuccgcgagcagcucuccuccgucuccuccuucgagcgcuucgagaucuuccccaagaccuccuccuggcccaaccacgacuccaacaagggcgucaccgccgccugcccccacgccggcgccaaguccuucuacaagaaccucaucuggcucgucaagaagggcaacuccuaccccaagcucuccaaguccuacaucaacgacaagggcaaggagguccucguccucuggggcauccaccaccccuccaccaccgccgaccagcagucccucuaccagaacgccgacaccuacgucuucgucggcaccucccgcuacuccaagaaguucaagcccgagaucgccauccgccccaagguccgcgaccaggagggccgcaugaacuacuacuggacccucgucgagcccggcgacaagaucaccuucgaggccaccggcaaccucgucgucccccgcuacgccuucgccauggagcgcaacgccggcuccggcaucaucaucuccgacacccccguccacgacugcaacaccaccugccagacccccaagggcgccaucaacaccucccuccccuuccagaacauccaccccaucaccaucggcaagugccccaaguacgucaaguccaccaagcuccgccucgccaccggccuccgcaacguccccuccauccagucccgcggccucuucggcgccaucgccggcuucaucgagggcggcuggaccggcauggucgacggcugguacggcuaccaccaccagaacgagcagggcuccggcuacgccgccgaccucaaguccacccagaacgccaucgacaagaucaccaacaaggucaacuccgucaucgagaagaugaacauccaguucaccgccgucggcaaggaguucaaccaccucgagaagcgcaucgagaaccucaacaagaaggucgacgacggcuuccucgacaucuggaccuacaacgccgagcuccucguccuccucgagaacgagcgcacccucgacuaccacgacuccaacgucaagaaccucuacgagaagguccgcaaccagcucaagaacaacgccaaggagaucggcaacggcugcuucgaguucuaccacaagugcgacaacaccugcauggaguccgucaagaacggcaccuacgacuaccccaaguacuccgaggaggccaagcucaaccgcgaggagaucgacggcgucaagcucgaguccacccgcaucuaccagauccucgccaucuacuccaccgucgccuccucccucguccucgucgucucccucggcgccaucuccuucuggaugugcuccaacggcucccuccagugccgcaucugcaucuga

SEQ ID NO: 108938 - RNA, 1701 nt, Artificial Sequence
  derived and/or modified CDS sequence (opt2) from hemagglutinin__InfluenzaA__AJJ99582
augaaggccauccucgucguccuccucuacaccuucgccaccgccaacgccgacacccucugcaucggcuaccacgccaacaacuccaccgacaccgucgacaccguccucgagaagaacgucaccgucacccacuccgucaaccuccucgaggacaagcacaacggcaagcucugcaagcuccgcggcgucgccccccuccaccucggcaagugcaacaucgccggcuggauccucggcaaccccgagugcgagucccucuccaccgccuccuccugguccuacaucgucgagaccuccuccuccgacaacggcaccugcuaccccggcgacuucaucgacuacgaggagcuccgcgagcagcucuccuccgucuccuccuucgagcgcuucgagaucuuccccaagaccuccuccuggcccaaccacgacuccaacaagggcgucaccgccgccugcccccacgccggcgccaaguccuucuacaagaaccucaucuggcucgucaagaagggcaacuccuaccccaagcucuccaaguccuacaucaacgacaagggcaaggagguccucguccucuggggcauccaccaccccuccaccuccgccgaccagcagucccucuaccagaacgccgacgccuacgucuucgucggcaccucccgcuacuccaagaaguucaagcccgagaucgccauccgccccaagguccgcgaccaggagggccgcaugaacuacuacuggacccucgucgagcccggcgacaagaucaccuucgaggccaccggcaaccucgucgucccccgcuacgccuucgccauggagcgcaacgccggcuccggcaucaucaucuccgacacccccguccacgacugcaacaccaccugccagacccccaacggcgccaucaacaccucccuccccuuccagaacauccaccccaucaccaucggcaagugccccaaguacgucaaguccaccaagcuccgccucgccaccggccuccgcaacguccccuccauccagucccgcggccucuucggcgccaucgccggcuucaucgagggcggcuggaccggcauggucgacggcugguacggcuaccaccaccagaacgagcagggcuccggcuacgccgccgaccucaaguccacccagaacgccaucgacaagaucaccaacaaggucaacuccgucaucgagaagaugaacacccaguucaccgccgucggcaaggaguucaaccaccucgagaagcgcaucgagaaccucaacaagaaggucgacgacggcuuccucgacaucuggaccuacaacgccgagcuccucguccuccucgagaacgagcgcacccucgacuaccacgacuccaacgucaagaaccucuacgagaagguccgcucccagcucaagaacaacgccaaggagaucggcaacggcugcuucgaguucuaccacaagugcgacaacaccugcauggaguccgucaagaacggcaccuacgacuaccccaaguacuccgaggaggccaagcucaaccgcgaggagaucgacggcgucaagcucgaguccacccgcaucuaccagauccucgccaucuacuccaccgucgccuccucccucguccucgucgucucccucggcgccaucuccuucuggaugugcuccaacggcucccuccagugccgcaucugcaucuga

SEQ ID NO: 108939 - RNA, 1701 nt, Artificial Sequence; identical to SEQ ID NO: 98947
  derived and/or modified CDS sequence (opt2) from hemagglutinin__InfluenzaA__AJJ99593

SEQ ID NO: 108940 - RNA, 1701 nt, Artificial Sequence
  derived and/or modified CDS sequence (opt2) from hemagglutinin__InfluenzaA__AJJ99604
augaaggccauccucgucguccuccucuacaccuucgccaccgccaacgccgacacccucugcaucggcuaccacgccaacaacuccaccgacaccgucgacaccguccucgagaagaacgucaccgucacccacuccgucaaccuccucgaggacaagcacaacggcaagcucugcaagcuccgcggcgucgccccccuccaccucggcaagugcaacaucgccggcuggauccucggcaaccccgagugcgagucccucuccaccgccuccuccugguccuacaucgucgagaccuccuccuccgacaacggcaccugcuaccccggcgacuucaucgacuacgaggagcuccgcgagcagcucuccuccgucuccuccuucgagcgcuucgagaucuuccccaagaccuccuccuggcccaaccacgacuccaacaagggcgucaccgccgccugcccccacgccggcgccaaguccuucuacaagaaccucaucuggcucgucaagaagggcaacuccuaccccaagcucuccaaguccuacaucaacgacaagggcaaggagguccucguccucuggggcauccaccaccccuccaccuccgccgaccagcagucccucuaccagaacgccgacgccuacgucuucgucggcaccucccgcuacuccaagaaguucaagcccgagaucgccauccgcccccgcguccgcgaccaggagggccgcaugaacuacuacuggacccucgucgagcccggcgacaagaucaccuucgaggccaccggcaaccucgucgucccccgcuacgccuucgccauggagcgcgacgccggcuccggcaucaucaucuccgacacccccguccacgacugcaacaccaccugccagacccccaagggcgccaucaacaccucccuccccuuccagaacauccaccccaucaccaucggcaagugccccaaguacgucaaguccaccaagcuccgccucgccaccggccuccgcaacguccccuccauccagucccgcggccucuucggcgccaucgccggcuucaucgagggcggcuggaccggcauggucgacggcugguacggcuaccaccaccagaacgagcagggcuccggcuacgccgccgaccucaaguccacccagaacgccaucgacgagaucaccaacaaggucaacuccgucaucgagaagaugaacacccaguucaccgccgucggcaaggaguucaaccaccucgagaagcgcaucgagaaccucaacaagaagaucgacgacggcuuccucgacaucuggaccuacaacgccgagcuccucguccuccucgagaacgagcgcacccucgacuaccacgacuccaacgucaagaaccucuacgagaagguccgcucccagcucaagaacaacgccaaggagaucggcaacggcugcuucgaguucuaccacaagugcgacaacaccugcauggaguccgucaagaacggcaccuacgacuaccccaaguacuccgaggaggccaagcucaaccgcgaggagaucgacggcgucaagcucgaguccacccgcaucuaccagauccucgccaucuacuccaccgucgccuccucccucguccucgucgucucccucggcgccaucuccuucuggaugugcuccaacggcucccuccagugccgcaucugcaucuga

SEQ ID NO: 108941 - RNA, 1698 nt, Artificial Sequence
  derived and/or modified CDS sequence (opt2) from hemagglutinin__InfluenzaA__AJJ99616
augaaggucaagcuccucguccuccucugcaccuucaccgccaccuacgccgacaccaucugcaucggcuaccacgccaacaacuccaccgacaccgucgacaccguccucgagaagaacgucaccgucacccacuccgucaaccuccucgagaacucccacaacggcaagcucugccuccucaagggcaucgccccccuccagcucggcaacugcuccgucgccggcuggauccucggcaaccccgagugcgagcuccucaucuccaaggaguccugguccuacaucgucgagaagcccaaccccgagaacggcaccugcuaccccggccacuucgccgacuacgaggagcuccgcgagcagcucuccuccgucuccuccuucgagcgcuucgagaucuuccccaaggaguccuccuggcccaaccacaccgucaccggcgucuccgccuccugcucccacaacggcgagaacuccuucuaccgcaaccuccucuggcucaccggcaagaacggccucuaccccaaccucuccaaguccuacgccaacaacaaggagaaggagguccucguccucuggggcguccaccacccccccaacaucgccaaccagaagacccucuaccacaccgagaacgccuacgucuccgucgucuccucccacuacucccgcaagcucacccccgagaucgccaagcgccccaagguccgcgaccaggagggccgcaucaacuacuacuggacccuccucgagcccggcgacaccaucaucuucgaggccaacggcaaccucaucgccccccgcuacgccuucgcccucucccgcggcuucggcuccggcaucaucaacuccaacgcccccauggacaagugcgacgccaagugccagaccccccagggcgccaucaacuccucccuccccuuccagaacguccaccccgucaccaucggcgagugccccaaguacguccgcuccgccaagcuccgcauggucaccggccuccgcaacauccccuccauccagucccgcggccucuucggcgccaucgccggcuucaucgagggcggcuggaccggcauggucgacggcugguacggcuaccaccaccagaacgagcagggcuccggcuacgccgccgaccagaaguccacccagaacgccaucaacggcaucaccaacaaggucaacuccgucaucgagaagaugaacacccaguucaccgccgucggcaaggaguucaacaagcucgagcgccgcauggagaaccucaacaagaaggucgacgacggcuucaucgacaucuggaccuacaacgccgagcuccucguccuccucgagaacgagcgcacccucgacuuccacgacuccaacgucaagaaccucuacgagaaggucaagucccagcucaagaacaacgccaaggagaucggcaacggcugcuucgaguucuaccacaagugcaacgacgagugcauggaguccgucaagaacggcaccuacgacuaccccaaguacuccgaggaguccaagcucaaccgcgagaagaucgacggcgucaagcucgaguccaugggcgucuaccagauccucgccaucuacuccaccgucgccuccucccucguccuccucgucucccucggcgccaucuccuucuggaugugcuccaacggcucccuccagugccgcaucugcaucuga

SEQ ID NO: 108942 - RNA, 1698 nt, Artificial Sequence; identical to SEQ ID NO: 99662
  derived and/or modified CDS sequence (opt2) from hemagglutinin__InfluenzaA__AJJ99628

SEQ ID NO: 108943 - RNA, 1698 nt, Artificial Sequence
  derived and/or modified CDS sequence (opt2) from hemagglutinin__InfluenzaA__AJJ99640
augaaggucaagcuccucguccuccucugcaccuucaccgccaccuacgccgacaccaucugcaucggcuaccacgccaacaacuccaccgacaccgucgacaccguccucgagaagaacgucaccgucacccacuccgucaaccuccucgagaacucccacaacggcaagcucugccuccucaagggcaucgccccccuccagcucggcaacugcuccgucgccggcuggauccucggcaaccccgagugcgagcuccucaucuccaaggaguccugguccuacaucgucgagaagcccaaccccgagaacggcaccugcuaccccggccacuucgccgacuacgaggagcuccgcgagcagcucuccuccgucuccuccuucgagcgcuucgagaucuuccccaaggaguccuccuggcccaaccacaccgucaccggcgucuccgccuccugcucccacaacggcgagaacuccuucuaccgcaaccuccucuggcucaccggcaagaacggccucuaccccaaccucuccaaguccuacgccaacaacaaggagaaggagguccucguccucuggggcguccaccacccccccaacaucgccaaccagaagacccucuaccacaccgagaacgccuacgucuccgucgucuccucccacuacucccgcaaguucacccccgagaucgccaagcgccccaagguccgcgaccaggagggccgcaucaacuacuacuggacccuccucgagcccggcgacaccaucaucuucgaggccaacggcaaccucaucgccccccgcuacgccuucgcccucucccgcggcuucggcuccggcaucaucaacuccaacgcccccauggacaagugcgacgccaagugccagaccccccagggcgccaucaacuccucccuccccuuccagaacguccaccccgucaccaucggcgagugccccaaguacguccgcuccgccaagcuccgcauggucaccggccuccgcaacauccccuccauccagucccgcggccucuucggcgccgucgccggcuucaucgagggcggcuggaccggcauggucgacggcugguacggcuaccaccaccagaacgagcagggcuccggcuacgccgccgaccagaaguccacccagaacgccaucaacggcaucaccaacaaggucaacuccgucaucgagaagaugaacacccaguucaccgccgucggcaaggaguucaacaagcucgagcgccgcauggagaaccucaacaagaaggucgacgacggcuucaucgacaucuggaccuacaacgccgagcuccucguccuccucgagaacgagcgcacccucgacuuccacgacuccaacgucaagaaccucuacgagaaggucaagucccagcucaagaacaacgccaaggagaucggcaacggcugcuucgaguucuaccacaagugcaacgacgagugcauggaguccgucaagaacggcaccuacgacuaccccaaguacuccgaggaguccaagcucaaccgcgagaagaucgacggcgucaagcucgaguccaugggcgucuaccagauccucgccaucuacuccaccgucgccuccucccucguccuccucgucucccucggcgccaucuccuucuggaugugcuccaacggcucccuccagugccgcaucugcaucuga

SEQ ID NO: 108944 - RNA, 1698 nt, Artificial Sequence; identical to SEQ ID NO: 99662
  derived and/or modified CDS sequence (opt2) from hemagglutinin__InfluenzaA__AJJ99652

SEQ ID NO: 108945 - RNA, 1698 nt, Artificial Sequence
  derived and/or modified CDS sequence (opt2) from hemagglutinin__InfluenzaA__AJJ99664
augaaggccaagcuccucguccuccucugcaccuucaccgccaccuacgccgacaccaucugcaucggcuaccacgccaacaacuccaccgacaccgucgacaccguccucgagaagaacgucaccgucacccacuccgucaaccuccucgagaacucccacaacggcaagcucugccuccucaagggcaucgccccccuccagcucggcaacugcuccaucgccggcuggauccucggcaaccccgagugcgagcuccucaucuccaaggaguccugguccuacaucgucgagaagcccaaccccgagaacggcaccugcuaccccggccacuucgccgacuacgaggagcuccgcgagcagcucuccuccgucuccuccuucgagcgcuucgagaucuuccccaaggaguccuccuggcccaaccacaccgucaccggcgucuccgccuccugcucccacaacggcgaguccuccuucuaccgcaaccuccucuggcucaccggcaagaacggccucuaccccaaccucuccaaguccuacgccaacaacaaggagaaggagguccucguccucuggggcguccaccacccccccaacaucggcgaccagaaggcccucuaccacaccgagaacgccuacgucuccgucgucuccucccacuacucccgcaaguucacccccgagaucgccaagcgccccaagguccgcgaccaggagggccgcaucaacuacuacuggacccuccucgagcccggcgacaccaucaucuucgaggccaacggcaaccucaucgccccccgcuacgccuucgcccucucccgcggcuucggcuccggcaucaucaacuccaacgcccccauggacaagugcgacgccaagugccagaccccccagggcgccaucaacuccucccuccccuuccagaacguccaccccgucaccaucggcgagugccccaaguacguccgcuccgccaagcuccgcauggucaccggccuccgcaacauccccuccauccagucccgcggccucuucggcgccaucgccggcuucaucgagggcggcuggaccggcauggucgacggcugguacggcuaccaccaccagaacgagcagggcuccggcuacgccgccgaccagaaguccacccagaacgccaucaacggcaucaccaacaaggucaacuccgucaucgagaagaugaacacccaguucaccgccgucggcaaggaguucaacaagcucgagcgccgcauggagaaccucaacaagaaggucgacgacggcuucaucgacaucuggaccuacaacgccgagcuccucguccuccucgagaacgagcgcacccucgacuuccacgacuccaacgucaagaaccucuacgagaaggucaagucccagcucaagaacaacgccaaggagaucggcaacggcugcuucgaguucuaccacaagugcaacgacgagugcauggaguccgucaagaacggcaccuacgacuaccccaaguacuccgaggaguccaagcucaaccgcgagaagaucgacggcgucaagcucgaguccaugggcgucuaccagauccucgccaucuacuccaccgucgccuccucccucguccuccucgucucccucggcgccaucuccuucuggaugugcuccaacggcucccuccagugccgcaucugcaucuga

SEQ ID NO: 108946 - RNA, 1701 nt, Artificial Sequence
  derived and/or modified CDS sequence (opt2) from hemagglutinin__InfluenzaA__AJJ99675
augaaggccauccuccucguccuccucuacaccuucgccaccgccaaggccgacacccucugcaucggcuaccacgccaacaacuccaccgacaccgucgacaccguccucgagaagaacgucaccgucacccacuccgucaaccuccucgaggacaagcacaacggcaagcucugcaagcuccgcggcgucgccccccuccaccucggcaagugcaacaucgccggcuggauccucggcaaccccgagugcgagucccucuccaccgccuccuccugguccuacaucgucgagaccuccuccuccgacaacggcaccugcuaccccggcgacuucaucaacuacgaggagcuccgcgagcagcucuccuccgucuccuccuucgagcgcuucgagaucuuccccaagaccuccuccuggcccaaccacgacuccaacaagggcgucaccgccgccugcccccgcgccggcgccaaguccuucuacaagaaccucaucuggcucgucaagaagggcaacuccuaccccaagcucuccaaguccuacaucaacgacaagggcaaggagguccucguccucuggggcauccaccaccccuccaccaccgccgaccagcagucccucuaccagaacgccgacgccuacgucuucgucggcaccucccgcuacuccaagaaguucaagcccgagaucgccauccgccccaagguccgcgaccaggagggccgcaugaacuacuacuggacccucgucgagcccggcgacaagaucaccuucgaggccaccggcaaccuccucgucccccgcuacgccuucgccauggagcgcaacgccggcuccggcaucaucaucuccgacacccccguccacgacugcaacaccaccugccagacccccaagggcgccaucaacaccucccuccccuuccagaacauccaccccaucaccaucggcaagugccccaaguacgucaaguccaccaagcuccgccucgccaccggccuccgcaacguccccuccauccagucccgcggccucuucggcgccaucgccggcuucaucgagggcggcuggaccggcauggucgacggcugguacggcuaccaccaccagaacgagcagggcuccggcuacgccgccgaccucaaguccacccagaacgccaucgacaagaucaccgacaaggucaacuccgucaucgagaagaugaacacccaguucaccgccgucggcaaggaguucaaccaccucgagaagcgcaucgagaaccucaacaagaaggucgacgacggcuuccucgacaucuggaccuacaacgccgagcuccucguccuccucgagaacgagcgcacccucgacuaccacgacuccaacgucaagaaccucuacgagaagguccgcaaccagcucaagaacaacgccaaggagaucggcaacggcugcuucgaguucuaccacaagugcgacaacaccugcauggaguccgucaagaacggcaccuacgacuaccccaaguacuccgaggaggccaagcucaaccgcgaggagaucgacggcgucaagcucgaguccacccgcaucuaccagauccucgccaucuacuccaccgucgccuccucccucguccucgucgucucccucggcgccaucuccuucuggaugugcuccaacggcucccuccagugccgcaucugcaucuga

SEQ ID NO: 108947 - RNA, 1701 nt, Artificial Sequence
  derived and/or modified CDS sequence (opt2) from hemagglutinin__InfluenzaA__AJJ99686
augaccgccauccuccucguccuccucuacaccuucgccaccgccaacgccgacacccucugcaucggcuaccacgccaacaacuccaccgacaccgucgacaccguccucgagaagaacgucaccgucacccacuccgucaaccuccucgaggacaagcacaacggcaagcucugcaagcuccgcggcgucgccccccuccaccucggcaagugcaacaucgccggcuggauccucggcaaccccgagugcgagucccucuccaccgccuccuccugguccuacaucgucgagaccuccuccuccgacaacggcaccugcuaccccggcgacuucaucaacuacgaggagcuccgcgagcagcucuccuccgucuccuccuucgagcgcuucgagaucuuccccaagaccuccuccuggcccaaccacgacuccaacaagggcgucaccgccgccugcccccgcgccggcgccaaguccuucuacaagaaccucaucuggcucgucaagaagggcaacuccuaccccaagcucuccaaguccuacaucaacgacaagggcaaggagguccucguccucuggggcauccaccaccccuccaccaccgccgaccagcagucccucuaccagaacgccgacgccuacgucuucgucggcaccucccgcuacuccaagaaguucaagcccgagaucgccauccgccccaagguccgcgaccaggagggccgcaugaacuacuacuggacccucgucgagcccggcgacaagaucaccuucgaggccaccggcaaccuccucgucccccgcuacgccuucgccauggagcgcaacgccggcuccggcaucaucaucuccgacacccccguccacgacugcaacaccaccugccagacccccaagggcgccaucaacaccucccuccccuuccagaacauccaccccaucaccaucggcaagugccccaaguacgucaaguccaccaagcuccgccucgccaccggccuccgcaacguccccuccauccagucccgcggccucuucggcgccaucgccggcuucaucgagggcggcuggaccggcauggucgacggcugguacggcuaccaccaccagaacgagcagggcuccggcuacgccgccgaccucaaguccacccagaacgccaucgacaagaucaccaacaaggucaacuccgucaucgagaagaugaacacccaguucaccgccgucggcaaggaguucaaccaccucgagaagcgcaucgagaaccucaacaagaaggucgacgacggcuuccucgacaucuggaccuacaacgccgagcuccucguccuccucgagaacgagcgcacccucgacuaccacgacuccaacgucaagaaccucuacgagaagguccgcaaccagcucaagaacaacgccaaggagaucggcaacggcugcuucgaguucuaccacaagugcgacaacaccugcauggaguccgucaagaacggcaccuacgacuaccccaaguacuccgaggaggccaagcucaaccgcgaggagaucgacggcgucaagcucgaguccacccgcaucuaccagauccucgccaucuacuccaccgucgccuccucccucguccucgucgucucccucggcgccaucuccuucuggaugugcuccaacggcucccuccagugccgcaucugcaucuga

SEQ ID NO: 108948 - RNA, 1701 nt, Artificial Sequence
  derived and/or modified CDS sequence (opt2) from hemagglutinin__InfluenzaA__AJJ99697
augaaggccauccucgucguccuccucuacaccuucgccaccgccaacgccgacacccucugcaucggcuaccacgccaacaacuccaccgacaccgucgacaccguccucgagaagaacgucaccgucacccacuccgucaaccuccucgaggacaagcacaacggcaagcucugcaagcuccgcggcgucgccccccuccaccucggcaagugcaacaucgccggcuggauccucggcaaccccgagugcgagucccucuccaccgccuccuccugguccuacaucgucgagaccuccuccuccgacaacggcaccugcuaccccggcgacuucaucgacuacgaggagcuccgcgagcagcucuccuccgucuccuccuucgagcgcuucgagaucuuccccaagaccuccuccuggcccaaccacgacuccaacaagggcgucaccgccgccugcccccacgccggcgccaaguccuucuacaagaaccucaucuggcucgucaagaagggcaacuccuaccccaagcucuccaaguccuacaucaacgacaagggcaaggagguccucguccucuggggcauccaccaccccuccaccaccgccgaccagcagucccucuaccagaacgccgacaccuacgucuucgucggcaccucccgcuacuccaagaaguucaagcccgagaucgccauccgccccaagguccgcgaccaggagggccgcaugaacuacuacuggacccucgucgagcccggcgacaagaucaccuucgaggccaccggcaaccucgucgucccccgcuacgccuucgucauggagcgcaacgccggcuccggcaucaucaucuccgacacccccguccacgacugcaacaccaccugccagacccccaagggcgccaucaacaccucccuccccuuccagaacauccaccccaucaccaucggcaagugccccaaguacgucaaguccaccaagcuccgccucgccaccggccuccgcaacguccccuccauccagucccgcggccucuucggcgccaucgccggcuucaucgagggcggcuggaccggcauggucgacggcugguacggcuaccaccaccagaacgagcagggcuccggcuacgccgccgaccucaaguccacccagaacgccaucgacaagaucaccaacaaggucaacuccgucaucgagaagaugaacacccaguucaccgccgucggcaaggaguucaaccaccucgagaagcgcaucgagaaccucaacaagaaggucgacgacggcuuccucgacaucuggaccuacaacgccgagcuccucguccuccucgagaacgagcgcacccucgacuaccacgacuccaacgucaagaaccucuacgagaagguccgcaaccagcucaagaacaacgccaaggagaccggcaacggcugcuucgaguucuaccacaagugcgacaacaccugcauggaguccgucaagaacggcaccuacgacuaccccaaguacuccgaggaggccaagcucaaccgcgagaagaucgacggcgucaagcucgaguccacccgcaucuaccagauccucgccaucuacuccaccgucgccuccucccucguccucgucgucucccucggcgccaucuccuucuggaugugcuccaacggcucccuccagugccgcaucugcaucuga

SEQ ID NO: 108949 - RNA, 1701 nt, Artificial Sequence
  derived and/or modified CDS sequence (opt2) from hemagglutinin__InfluenzaA__AJJ99708
augaaggccauccucgucguccuccucuacaccuucgccaccgccaacgccgacacccucugcaucggcuaccacgccaacaacuccaccgacaccgucgacaccguccucgagaagaacgucaccgucacccacuccgucaaccuccucgaggacaagcacaacggcaagcucugcaagcuccgcggcgucgccccccuccaccucggcaagugcaacaucgccggcuggauccucggcaaccccgagugcgagucccucuccaccgccuccuccugguccuacaucgucgagaccuccuccuccgacaacggcaccugcuaccccggcgacuucaucgacuacgaggagcuccgcgagcagcucuccuccgucuccuccuucgagcgcuucgagaucuuccccaagaccuccuccuggcccgaccacgacuccaacaagggcgucaccgccgccugcccccacgccggcgccaaguccuucuacaagaaccucaucuggcucgucaagaagggcaacuccuaccccaagcucuccaaguccuacaucaacgacaagggcaaggagguccucguccucuggggcauccaccaccccuccaccaccgccgaccagcagucccucuaccagaacgccgacaccuacgucuucgucggcaccucccgcuacuccaagaaguucaagcccgagaucgccauccgccccaagguccgcgaccaggagggccgcaugaacuacuacuggacccucgucgagcccggcgacaagaucaccuucgaggccaccggcaaccucgucgucccccgcuacgccuucgucauggagcgcaacgccggcuccggcaucaucaucuccgacacccccguccacgacugcaacaccaccugccagacccccaagggcgccaucaacaccucccuccccuuccagaacauccaccccaucaccaucggcaagugccccaaguacgucaaguccaccaagcuccgccucgccaccggccuccgcaacguccccuccauccagucccgcggccucuucggcgccaucgccggcuucaucgagggcggcuggaccggcauggucgacggcugguacggcuaccaccaccagaacgagcagggcuccggcuacgccgccgaccucaaguccacccagaacgccaucgacaagaucaccaacaaggucaacuccgucaucgagaagaugaacacccaguucaccgccgucggcaaggaguucaaccaccucgagaagcgcaucgagaaccucaacaagaaggucgacgacggcuuccucgacaucuggaccuacaacgccgagcuccucguccuccucgagaacgagcgcacccucgacuaccacgacuccaacgucaagaaccucuacgagaagguccgcaaccagcucaagaacaacgccaaggagaccggcaacggcugcuucgaguucuaccacaagugcgacaacaccugcauggaguccgucaagaacggcaccuacgacuaccccaaguacuccgaggaggccaagcucaaccgcgagaagaucgacggcgucaagcucgaguccacccgcaucuaccagauccucgccaucuacuccaccgucgccuccucccucguccucgucgucucccucggcgccaucuccuucuggaugugcuccaacggcucccuccagugccgcaucugcaucuga

SEQ ID NO: 108950 - RNA, 1701 nt, Artificial Sequence
  derived and/or modified CDS sequence (opt2) from hemagglutinin__InfluenzaA__AJJ99719
augaaggccauccucgucgucaugcucuacaccuucgccaccgccaacgccgacacccucugcaucggcuaccacgccaacaacuccaccgacaccgucgacaccguccucgagaagaacgucaccgucacccacuccgucaaccuccucgaggacaagcacaacggcaagcucugcaagcuccgcggcgucgccccccuccaccucggcaagugcaacaucgccggcuggauccucggcaaccccgagugcgagucccucuccaccgccuccuccugguccuacaucgucgagaccuccuccuccgacaacggcaccugcuaccccggcgacuucaucgacuacgaggagcuccgcgagcagcucuccuccgucuccuccuucgagcgcuucgagaucuuccccaagaccuccuccuggcccaaccacgacuccaacaagggcgucaccgccgccugcccccacgccggcgccaagggcuucuacaagaaccucaucuggcucgucaagaagggcaacuccuaccccaagcucuccaaguccuacaucaacgacaagggcaaggagguccucguccucuggggcauccaccaccccuccaccaccgccgaccagcagucccucuaccagaacgccgacaccuacgucuucgucggcaccucccgcuacuccaagaaguucaagcccgagaucgccauccgccccaagguccgcgaccaggagggccgcaugaacuacuacuggacccucgucgagcccggcgacaagaucaccuucgaggccaccggcaaccucgucgucccccgcuacgccuucgccauggagcgcaacgccggcuccggcaucaucaucuccgacacccccguccacgacugcaacaccaccugccagacccccaagggcgccaucaacaccucccuccccuuccagaacauccaccccaucaccaucggcaagugccccaaguacgucaaguccaccaagcuccgccucgccaccggccuccgcaacguccccuccauccagucccgcggccucuucggcgccaucgccggcuucaucgagggcggcuggaccggcauggucgacggcugguacggcuaccaccaccagaacgagcagggcuccggcuacgccgccgaccucaaguccacccagaacgccaucgacaagaucaccaacaaggucaacuccgucaucgagaagaugaacacccaguucaccgccgucggcaaggaguucaaccaccucgagaagcgcaucgagaaccucaacaagaaggucgacgacggcuuccucgacaucuggaccuacaacgccgagcuccucguccuccucgagaacgagcgcacccucgacuaccacgacuccaacgucaagaaccucuacgagaagguccgcaaccagcucaagaacaacgccaaggagaucggcaacggcugcuucgaguucuaccacaagugcgacaacaccugcauggaguccgucaagaacggcaccuacgacuaccccaaguacuccgaggaggccaagcucaaccgcgaggagaucgagggcgucaagcucgaguccacccgcaucuaccagauccucgccaucuacuccaccgucgccuccucccucguccucgucgucucccucggcgccaucuccuucuggaugugcuccaacggcucccuccagugccgcaucugcaucuga

SEQ ID NO: 108951 - RNA, 1701 nt, Artificial Sequence
  derived and/or modified CDS sequence (opt2) from hemagglutinin__InfluenzaA__AJJ99730
augaaggccauccucgucgucaugcucuacaccuucgccaccgccaacgccgacacccucugcaucggcuaccacgccaacaacuccaccgacaccgucgacaccguccucgagaagaacgucaccgucacccacuccgucaaccuccucgaggacaagcacaacggcaagcucugcaagcuccgcggcgucgccccccuccaccucggcaagugcaacaucgccggcuggauccucggcaaccccgagugcgagucccucuccaccgccuccuccugguccuacaucgucgagaccuccuccuccgacaacggcaccugcuaccccggcgacuucaucgacuacgaggagcuccgcgagcagcucuccuccgucuccuccuucgagcgcuucgagaucuuccccaagaccuccuccuggcccaaccacgacuccaacaagggcgucaccgccgccugcccccacgccggcgccaagggcuucuacaagaaccucaucuggcucgucaagaagggcaacuccuaccccaagcucuccaaguccuacaucaacgacaagggcaaggagguccucguccucuggggcauccaccaccccuccaccaccgccgaccagcagucccucuaccagaacgccgacaccuacgucuucgucggcaccucccgcuacuccaagaaguucaagcccgagaucgccauccgccccaagguccgcgaccaggagggccgcaugaacuacuacuggacccucaucgagcccggcgacaagaucaccuucgaggccaccggcaaccucgucgucccccgcuacgccuucgccauggagcgcaacgccggcuccggcaucaucaucuccgacacccccguccacgacugcaacaccaccugccagacccccaagggcgccaucaacaccucccuccccuuccagaacauccaccccaucaccaucggcaagugccccaaguacgucaaguccaccaagcuccgccucgccaccggccuccgcaacguccccuccauccagucccgcggccucuucggcgccaucgccggcuucaucgagggcggcuggaccggcauggucgacggcugguacggcuaccaccaccagaacgagcagggcuccggcuacgccgccgaccucaaguccacccagaacgccaucgacaagaucaccaacaaggucaacuccgucaucgagaagaugaacacccaguucaccgccgucggcaaggaguucaaccaccucgagaagcgcaucgagaaccucaacaagaaggucgacgacggcuuccucgacaucuggaccuacaacgccgagcuccucguccuccucgagaacgagcgcacccucgacuaccacgacuccaacgucaagaaccucuacgagaagguccgcaaccagcucaagaacaacgccaaggagaucggcaacggcugcuucgaguuccaccacaagugcgacaacaccugcauggaguccgucaagaacggcaccuacgacuaccccaaguacuccgaggaggccaagcucaaccgcgaggagaucgacggcgucaagcucgaguccacccgcaucuaccagauccucgccaucuacuccaccgucgccuccucccucguccucgucgucucccucggcgccaucuccuucuggaugugcuccaacggcucccuccagugccgcaucugcaucuga

SEQ ID NO: 108952 - RNA, 1701 nt, Artificial Sequence; identical to SEQ ID NO: 103078
  derived and/or modified CDS sequence (opt2) from hemagglutinin__InfluenzaA__AJJ99741

SEQ ID NO: 108953 - RNA, 1701 nt, Artificial Sequence; identical to SEQ ID NO: 99869
  derived and/or modified CDS sequence (opt2) from hemagglutinin__InfluenzaA__AJJ99752

SEQ ID NO: 108954 - RNA, 1701 nt, Artificial Sequence; identical to SEQ ID NO: 98705
  derived and/or modified CDS sequence (opt2) from hemagglutinin__InfluenzaA__AJJ99763

SEQ ID NO: 108955 - RNA, 1698 nt, Artificial Sequence
  derived and/or modified CDS sequence (opt2) from hemagglutinin__InfluenzaA__AJJ99775
augaaggucaagcuccucguccuccucugcaccuucaccgccaccuacgccgacaccaucugcaucggcuaccacgccaacaacuccaccgacaccgucgacaccguccucgagaagaacgucaccgucacccacuccgucaaccuccucgagaacucccacaacggcaagcucugccuccucaagggcaucgccccccuccagcucggcaacugcuccgucgccggcuggauccucggcaaccccgagugcgagcuccucaucuccaaggaguccugguccuacaucgucgagaagcccaaccccgagaacggcaccugcuaccccggccacuucgccgacuacgaggagcuccgcgagcagcucuccuccgucuccuccuucgagcgcuucgagaucuuccccaaggaguccuccuggcccaaccacaccgucaccggcgucuccgccuccugcucccacaacggcgagaacuccuucuaccgcaaccuccucuggcucaccggcaagaacggccucuaccccaaccucuccaaguccuacgccaacaacaaggagaaggagguccucguccucuggggcguccaccacccccccaacaucgccgaccagaagacccucuaccacaccgagaacgccuacgucuccgucgucuccucccacuacucccgcaaguucacccccgagaucgccaagcgccccaagguccgcgaccaggagggccgcaucaacuacuacuggacccuccucgagcccggcgacaccaucaucuucgaggccaacggcaaccucaucgccccccgcuacgccuucgcccucucccgcggcuucggcuccggcaucaucaacuccaacgcccccaccgacaagugcgacgccaagugccagaccccccagggcgccaucaacuccucccuccccuuccagaacguccaccccgucaccaucggcgagugccccaaguacguccgcuccgccaagcuccgcauggucaccggccuccgcaacauccccuccauccagucccgcggccucuucggcgccaucgccggcuucaucgagggcggcuggaccggcauggucgacggcugguacggcuaccaccaccagaacgagcagggcuccggcuacgccgccgaccagaaguccacccagaacgccaucaacggcaucaccaacaaggucaacuccgucaucgagaagaugaacacccaguucaccgccgucggcaaggaguucaacaagcucgagcgccgcauggagaaccucaacaagaaggucgacgacggcuucaucgacaucuggaccuacaacgccgagcuccucguccuccucgagaacgagcgcacccucgacuuccacgacuccaacgucaagaaccucuacgagaaggucaagucccagcucaagaacaacgccaaggagaucggcaacggcugcuucgaguucuaccacaagugcaacgacgagugcauggaguccgucaagaacggcaccuacgacuaccccaaguacuccgaggaguccaagcucaaccgcgagaagaucgacggcgucaagcucgaguccaugggcgucuaccagauccucgccaucuacuccaccgucgccuccucccucguccuccucgucucccucggcgccaucuccuucuggaugugcuccaacggcucccuccagugccgcaucugcaucuga

SEQ ID NO: 108956 - RNA, 1701 nt, Artificial Sequence
  derived and/or modified CDS sequence (opt2) from hemagglutinin__InfluenzaA__AJJ99786
augaaggccauccucgucguccuccucuacaccuucgccaccgccaacgccgacacccucugcaucggcuaccacgccaacaacuccaccgacaccgucgacaccguccucgagaagaacgucaccgucacccacuccgucaaccuccucgaggacaagcacaacggcaagcucugcaagcuccgcggcgucgccccccuccaccucggcaagugcaacaucgccggcuggauccucggcaaccccgagugcgagucccucuccaccgccuccuccugguccuacaucgucgagaccuccuccuccgacaacggcaccugcuaccccggcgacuucaucgacuacgaggagcuccgcgagcagcucuccuccgucuccuccuucgagcgcuucgagaucuuccccaagaccuccuccuggcccaaccacgacuccaacaagggcgucaccgccgccugcccccacgccggcgccaaguccuucuacaagaaccucaucuggcucgucaagaagggcaacuccuaccccaagcucuccaaguccuacaucaacgacaagggcaaggagguccucguccucuggggcauccaccaccccuccaccuccgccgaccagcagucccucuaccagaacgccgacgccuacgucuucgucggcaccucccgcuacuccaagaaguucaagcccgagaucgccauccgccccaagguccgcgaccaggagggccgcaugaacuacuacuggacccucgucgagcccggcgacaagaucaccuucgaggccaccggcaaccucgucgucccccgcuacgccuucgccauggagcgcgacgccggcuccggcaucaucaucuccgacacccccguccacgacugcaacaccaccugccagacccccaagggcgccaucaacaccucccuccccuuccagaacauccaccccaucaccaucggcaagugccccaaguacgucaaguccaccaagcuccgccucgccaccggccuccgcaacauccccuccauccagucccgcggccucuucggcgccaucgccggcuucaucgagggcggcuggaccggcauggucgacggcugguacggcuaccaccaccagaacgagcagggcuccggcuacgccgccgaccucaaguccacccagaacgccaucgacgagaucaccaacaaggucaacuccgucaucgagaagaugaacacccaguucaccgccgucggcaaggaguucaaccaccucgagaagcgcaucgagaaccucaacaagaagaucgacgacggcuuccucgacaucuggaccuacaacgccgagcuccucguccuccucgagaacgagcgcacccucgacuaccacgacuccaacgucaagaaccucuacgagaagguccgcucccagcucaagaacaacgccaaggagaucggcaacggcugcuucgaguucuaccacaagugcgacaacaccugcauggaguccgucaagaacggcaccuacgacuaccccaaguacuccgaggaggccaagcucaaccgcgaggagaucgacggcgucaagcucgaguccacccgcaucuaccagauccucgccaucuacuccgccgucgccuccucccucguccucgucgucucccucggcgccaucuccuucuggaugugcuccaacggcucccuccagugccgcaucugcaucuga

SEQ ID NO: 108957 - RNA, 1698 nt, Artificial Sequence
  derived and/or modified CDS sequence (opt2) from hemagglutinin__InfluenzaA__AJJ99798
augaaggucaagcuccucguccuccucugcaccuucaccgccaccuacgccgacaccaucugcaucggcuaccacgccaacaacuccaccgacaccgucgacaccguccucgagaagaacgucaccgucacccacuccgucaaccuccucgagaacucccacaacggcaagcucugccuccucaagggcaucgccccccuccagcucggcaacugcuccgucgccggcuggauccucggcaaccccgagugcgagcuccucaucuccaaggaguccugguccuacaucgucgagcgccccaaccccgagaacggcaccugcuaccccggccacuucgccgacuacgaggagcuccgcgagcagcucuccuccgucuccuccuucgagcgcuucgagaucuuccccaaggaguccuccuggcccaaccacaccgucaccggcgucuccgccuccugcucccacaacggcgagaacuccuucuaccgcaaccuccucuggcucaccggcaagaacggccucuaccccaaccucuccaaguccuacgccaacaacaaggagaaggagguccucguccucuggggcguccaccacccccccaacaucgccaaccagaagacccucuaccacaccgagaacgccuacgucuccgucgucuccucccacuacucccgcaaguucacccccgagaucgccaagcgccccaagguccgcgaccaggagggccgcaucaacuacuacuggacccuccucgagcccggcgacaccaucauguucgaggccaacggcaaccucaucgccccccgcuacgccuucgcccucucccgcggcuucggcuccggcaucaucaacuccaacgcccccauggacaagugcgacgccaagugccagaccccccagggcgccaucaacuccucccuccccuuccagaacguccaccccgucaccaucggcgagugccccaaguacguccgcuccgccaagcuccgcauggucaccggccuccgcaacauccccuccauccagucccgcggccucuucggcgccaucgccggcuucaucgagggcggcuggaccggcauggucgacggcugguacggcuaccaccaccagaacgagcagggcuccggcuacgccgccgaccagaaguccacccagaacgccaucaacggcaucaccaacaaggucaacuccgucaucgagaagaugaacacccaguucaccgccgucggcaaggaguucaacaagcucgagcgccgcauggagaaccucaacaagaaggucgacgacggcuucaucgacaucuggaccuacaacgccgagcuccucguccuccucgagaacgagcgcacccucgacuuccacgacuccaacgucaagaaccucuacgagaaggucaagucccagcucaagaacaacgccaaggagaucggcaacggcugcuucgaguucuaccacaagugcaacgacgagugcauggaguccgucaagaacggcaccuacgacuaccccaaguacuccgaggaguccaagcucaaccgcgagaagaucgacggcgucaagcucgaguccaugggcgucuaccagauccucgccaucuacuccaccgucgccuccucccucguccuccucgucucccucggcgccaucuccuucuggaugugcuccaacggcucccuccagugccgcaucugcaucuga

SEQ ID NO: 108958 - RNA, 1698 nt, Artificial Sequence; identical to SEQ ID NO: 98524
  derived and/or modified CDS sequence (opt2) from hemagglutinin__InfluenzaA__AJJ99810

SEQ ID NO: 108959 - RNA, 1698 nt, Artificial Sequence
  derived and/or modified CDS sequence (opt2) from hemagglutinin__InfluenzaA__AJJ99822
augaaggucaagcuccucguccuccucugcaccuucaccgccaccuacgccgacaccaucugcaucggcuaccacgccaacaacuccaccgacaccgucgacaccguccucgagaagaacgucaccgucacccacuccgucaaccuccucgagaacucccacaacggcaagcucugccuccucaagggcaucgccccccuccagcucggcaacugcuccgucgccggcuggauccucggcaaccccgagugcgagcuccucaucuccaaggaguccugguccuacaucgucgagaagcccaaccccgagaacggcaccugcuaccccggccacuucgccgacuacgaggagcuccgcgagcagcucuccuccgucuccuccuucgagcgcuucgagaucuuccccaaggaguccuccuggcccaaccacaccgucaccggcgucuccgccuccugcucccacaacggcgaguccuccuucuaccgcaaccuccucuggcucaccggcaagaacggccucuaccccaaccucuccaaguccuacgccaacaacaaggagaaggagguccucguccucuggggcguccaccacccccccaacaucggcgaccagaaggcccucuaccacaccgagaacgccuacgucuccgucgucuccucccacuacucccgcaaguucacccccgagaucgccaagcgccccaagguccgcgaccaggagggccgcaucaacuacuacuggacccuccucgagcccggcgacaccaucaucuucgaggccaacggcaaccucaucgccccccgcuacgccuucgcccucucccgcggcuucggcuccggcaucaucaacuccaacgcccccauggacaagugcgacgccaagugccagaccccccagggcgccaucaacuccucccuccccuuccagaacguccaccccgucaccaucggcgagugccccaaguacguccgcuccgccaagcuccgcauggucaccggccuccgcaacauccccuucauccagucccgcggccucuucggcgccaucgccggcuucaucgagggcggcuggaccggcauggucgacggcugguacggcuaccaccaccagaacgagcagggcuccggcuacgccgccgaccagaaguccacccagaacgccaucaacggcaucaccaacaaggucaacuccgucaucgagaagaugaacacccaguucaccgccgucggcaaggaguucaacaagcucgagcgccgcauggagaaccucaacaagaaggucgacgacggcuucaucgacaucuggaccuacaacgccgagcuccucguccuccucgagaacgagcgcacccucgacuuccacgacuccaacgucaagaaccucuacgagaaggucaagucccagcucaagaacaacgccaaggagaucggcaacggcugcuucgaguucuaccacaagugcaacgacgagugcauggaguccgucaagaacggcaccuacgacuaccccaaguacuccgaggaguccaagcucaaccgcgagaagaucgacggcgucaagcucgaguccaugggcgucuaccagauccucgccaucuacuccaccgucgccuccucccucguccuccucgucucccucggcgccaucuccuucuggaugugcuccaacggcucccuccagugccgcaucugcaucuga

SEQ ID NO: 108960 - RNA, 1701 nt, Artificial Sequence
  derived and/or modified CDS sequence (opt2) from hemagglutinin__InfluenzaA__AJJ99833
augaaggccauccuccucguccuccucuacaccuucgccaccgccaacgccgacacccucugcaucggcuaccacgccaacaacuccaccgacaccgucgacaccguccucgagaagaacgucaccgucacccacuccgucaaccuccucgaggacaagcacaacggcaagcucugcaagcuccgcggcgucgccccccuccaccucggcaagugcaacaucgccggcuggauccucggcaaccccgagugcgagucccucuccaccgccuccuccugguccuacaucgucgagaccuccuccuccgacaacggcaccugcuaccccggcgacuucaucaacuacgaggagcuccgcgagcagcucuccuccgucuccuccuucgagcgcuucgagaucuuccccaagaccuccuccuggcccaaccacgacuccaacaagggcgucaccgccgccugcccccgcgccggcgccaaguccuucuacaagaaccucaucuggcucgucaagaagggcaacuccuaccucaagcucuccaaguccuacaucaacgacaagggcaaggagguccucguccucuggggcauccaccaccccuccaccaccgccgaccagcagucccucuaccagaacgccgacgccuacgucuucgucggcaccucccgcuacuccaagaaguucaagcccgagaucgccauccgccccaagguccgcgaccaggagggccgcaugaacuacuacuggacccucgucgagcccggcgacaagaucaccuucgaggccaccggcaaccuccucgucccccgcuacgccuucgccauggagcgcaacgccggcuccggcaucaucaucuccgacacccccguccacgacugcaacaccaccugccagacccccaagggcgccaucaacaccucccuccccuuccagaacauccaccccaucaccaucggcaagugccccaaguacgucaaguccaccaagcuccgccucgccaccggccuccgcaacguccccuccauccagucccgcggccucuucggcgccaucgccggcuucaucgagggcggcuggaccggcauggucgacggcugguacggcuaccaccaccagaacgagcagggcuccggcuacgccgccgaccucaaguccacccagaacgccaucgacaagaucaccaacaaggucaacuccgucaucgagaagaugaacacccaguucaccgccgucggcaaggaguucaaccaccucgagaagcgcaucgagaaccucaacaagaaggucgacgacggcuuccucgacaucuggaccuacaacgccgagcuccucguccuccucgagaacgagcgcacccucgacuaccacgacuccaacgucaagaaccucuacgagaagguccgcaaccagcucaagaacaacgccaaggagaucggcaacggcugcuucgaguucuaccacaagugcgacaacaccugcauggaguccgucaagaacggcaccuacgacuaccccaaguacuccgaggaggccaagcucaaccgcgaggagaucgacggcgucaagcucgaguccacccgcaucuaccagauccucgccaucuacuccaccgucgccuccucccucguccucgucgucucccucggcgccaucuccuucuggaugugcuccaacggcucccuccagugccgcaucugcaucuga

SEQ ID NO: 108961 - RNA, 1701 nt, Artificial Sequence; identical to SEQ ID NO: 102860
  derived and/or modified CDS sequence (opt2) from hemagglutinin__InfluenzaA__AJJ99844

SEQ ID NO: 108962 - RNA, 1701 nt, Artificial Sequence
  derived and/or modified CDS sequence (opt2) from hemagglutinin__InfluenzaA__AJJ99855
augaaggccauccucgucguccuccucuacaccuucgccaccgccaacgccgacacccucugcaucggcuaccacgccaacaacuccaccgacaccgucgacaccguccucgagaagaacgucaccgucacccacuccgucaaccuccucgaggacaagcacaacggcaagcucugcaagcuccgcggcgucgccccccuccaccucggcaagugcaacaucgccggcuggauccucggcaaccccgagugcgagucccucuccaccgccuccuccugguccuacaucgucgagaccuccuccuccgacaacggcaccugcuaccccggcgacuucaucgacuacgaggagcuccgcgagcagcucuccuccgucuccuccuucgagcgcuucgagaucuuccccaagaccuccuccuggcccaaccacgacuccaacaagggcgucaccgccgccugcccccacgccggcgccaaguccuucuacaagaaccucaucuggcucgucaagaagggcaacuccuaccccaagcucuccaaguccuacaucaacgacaagggcaaggagguccucguccucuggggcauccaccaccccuccaccaccgccgaccagcagucccucuaccagaacgccgacaccuacgucuucgucggcaccucccgcuacuccaagaaguucaagcccgagaucgccauccgccccaagguccgcgaccaggagggccgcaugaacuacuacuggacccucgucgagcccggcgacaagaucaccuucgaggccaccggcaaccucgucgucccccgcuacgccuucgccauggagcgcaacgccggcuccggcaucaucaucuccgacacccccguccacgacugcaacaccaccugccagacccccaagggcgccaucaacaccucccuccccuuccagaacauccaccccaucaccaucggcaagugccccaaguacgucaaguccaccaagcuccgccucgccaccggccuccgcaacguccccuccauccagucccgcggccucuucggcgccaucgccggcuucaucgagggcggcuggaccggcauggucgacggcugguacggcuaccaccaccagaacgagcagggcuccggcuacgccgccgaccucaaguccacccagaacgccaucgacaagaucaccaacaaggucaacuccgucaucgagaagaugaacacccaguucaccgccgucggcaaggaguucaaccaccucgagaagcgcaucgagaaccucaacaagaaggucgacgacggcuuccucgacaucuggaccuacaacgccgagcuccucguccuccucgagaacgagcgcacccucgacuaccacgacuccaacgucaagaaccucuacgagaagguccgcaaccagcucaagaacaacgccaaggagaucggcaacggcugcuucgaguucuaccacaagugcgacuccaccugcauggaguccgucaagaacggcaccuacgacuaccccaaguacuccgaggaggccaagcucaaccgcgaggagaucgacggcgucaagcucgaguccacccgcaucuaccagauccucgccaucuacuccaccgucgccuccucccucguccucgucgucucccucggcgccaucuccuucuggaugugcuccaacggcucccuccagugccgcaucugcaucuga

SEQ ID NO: 108963 - RNA, 1701 nt, Artificial Sequence
  derived and/or modified CDS sequence (opt2) from hemagglutinin__InfluenzaA__AJJ99866
augaaggccauccucgucguccuccucuacaccuucgccaccgccaacgccgacacccucugcaucggcuaccacgccaacaacuccaccgacaccgucgacaccguccucgagaagaacgucaccgucacccacuccgucaaccuccucgaggacaagcacaacggcaagcucugcaagcucaagggcgucgccccccuccaccucggcaagugcaacaucgccggcuggauccucggcaaccccgagugcgagucccucuccaccgccuccuccugguccuacaucgucgagaccuccuccuccgacaacggcaccugcuaccccggcgacuucaucgacuacgaggagcuccgcgagcagcucuccuccgucuccuccuucgagcgcuucgagaucuuccccaagaccuccuccuggcccaaccacgacuccaacaagggcgucaccgccgccugcccccacgccggcgccaaguccuucuacaagaaccucaucuggcucgucaagaagggcaacuccuaccccaagcucuccaaguccuacaucaacgacaagggcaaggagguccucguccucuggggcauccaccaccccuccaccuccgccgaccagcagucccucuaccagaacgccgacgccuacgucuucgucggcaccucccgcuacuccaagaaguucaagcccgagaucgccauccgccccaagguccgcgaccaggagggccgcaugaacuacuacuggacccucgucgagcccggcgacaagaucaccuucgaggccaccggcaaccucgucgucccccgcuacgccuucgccauggagcgcaacgccggcuccggcaucaucaucuccgacacccccguccacgacugcaacaccaccugccagacccccaagggcgccaucaacaccucccuccccuuccagaacauccaccccaucaccaucggcaagugccccaaguacgucaaguccaccaagcuccgccucgccaccggccuccgcaacguccccuccauccagucccgcggccucuucggcgccaucgccggcuucaucgagggcggcuggaccggcauggucgacggcugguacggcuaccaccaccagaacgagcagggcuccggcuacgccgccgaccucaaguccacccagaacgccaucgacgagaucaccaacaaggucaacuccgucaucgagaagaugaacacccaguucaccgccgucggcaaggaguucaaccaccucgagaagcgcaucgagaaccucaacaagaaggucgacgacggcuuccucgacaucuggaccuacaacgccgagcuccucguccuccucgagaacgagcgcacccucgacuaccacgacuccaacgucaagaaccucuacgagaagguccgcucccagcucaagaacaacgccaaggagaucggcaacggcugcuucgaguucuaccacaagugcgacaacaccugcauggaguccgucaagaacggcaccuacgacuaccccaaguacuccgaggaggccaagcucaaccgcgaggagaucgacggcgucaagcucgaguccacccgcaucuaccagauccucgccaucuacuccaccgucgccuccucccucguccucgucgucucccucggcgccaucuccuucuggaugugcuccaacggcucccuccagugccgcaucugcaucuga

SEQ ID NO: 108964 - RNA, 1701 nt, Artificial Sequence
  derived and/or modified CDS sequence (opt2) from hemagglutinin__InfluenzaA__AJJ99877
auggaggccauccucgucguccuccucuacaccuucgccaccgccaacgccgacacccucugcaucggcuaccacgccaacaacuccaccgacaccgucgacaccguccucgagaagaacgucaccgucacccacuccgucaaccuccucgaggacaagcacaacggcaagcucugcaagcuccgcggcgucgccccccuccaccucggcaagugcaacaucgccggcuggauccucggcaaccccgagugcgagucccucuccaccgccuccuccugguccuacaucgucgagaccuccuccuccgacaacggcaccugcuaccccggcgacuucaucgacuacgaggagcuccgcgagcagcucuccuccgucuccuccuucgagcgcuucgagaucuuccccaagaccuccuccuggcccaaccacgacuccaacaagggcgucaccgccgccugcccccacgccggcgccaaguccuucuacaagaaccucaucuggcucgucaagaagggcaacuccuaccccaagcucuccaaguccuacaucaacgacaagggcaaggagguccucguccucuggggcauccaccaccccuccaccuccgccgaccagcagucccucuaccagaacgccgacgccuacgucuucgucggcuccucccgcuacuccaagaaguucaagcccgagaucgccauccgccccaagguccgcgaccaggagggccgcaugaacuacuacuggacccucgucgagcccggcgacaagaucaccuucgaggccaccggcaaccucgucgucccccgcuacgccuucgccauggagcgcaacgccggcuccggcaucaucaucuccgacacccccguccacgacugcaacaccaccugccagacccccaagggcgccaucaacaccucccuccccuuccacaacauccaccccaucaccaucggcaagugccccaaguacgucaaguccaccaagcuccgccucgccaccggccuccgcaacguccccuccauccagucccgcggccucuucggcgccaucgccggcuucaucgagggcggcuggaccggcauggucgacggcugguacggcuaccaccaccagaacgagcagggcuccggcuacgccgccgaccucaaguccacccagaacgccaucgacgagaucaccaacaaggucaacuccgucaucgagaagaugaacacccaguucaccgccgucggcaaggaguucaaccaccucgagaagcgcaucgagaaccucaacaagaaggucgacgacggcuuccucgacaucuggaccuacaacgccgagcuccucguccuccucgagaacgagcgcacccucgacuaccacgacuccaacguccgcaaccucuacgagaagguccgcucccagcucaagaacaacgccaaggagaucggcaacggcugcuucgaguucuaccacaagugcgacaacaccugcauggaguccgucaagaacggcaccuacgacuaccccaaguacuccgaggaggccaagcucaaccgcgaggagaucgacggcgucaagcucgaguccacccgcaucuaccagauccucgccaucuacuccaccgucgccuccucccucguccucgucgucucccucggcgccaucuccuucuggaugugcuccaacggcucccuccagugccgcaucugcaucuga

SEQ ID NO: 108965 - RNA, 1701 nt, Artificial Sequence
  derived and/or modified CDS sequence (opt2) from hemagglutinin__InfluenzaA__AJJ99888
augaaggccauccucgucguccuccucuacaccuucgccaccgccaacgccgacacccucugcaucggcuaccacgccaacaacuccaccgacaccgucgacaccguccucgagaagaacgucaccgucacccacuccgucaaccuccucgaggacaagcacaacggcaagcucugcaagcuccgcggcgucgccccccuccaccucggcaagugcaacaucgccggcuggauccucggcaaccccgagugcgagucccucuccaccgccuccuccugguccuacaucgucgagaccuccuccuccgacaacggcaccugcuaccccggcgacuucaucgacuacgaggagcuccgcgagcagcucuccuccgucuccuccuucgagcgcuucgagaucuuccccaagaccuccuccuggcccaaccacgacuccaacaagggcgucaccgccgccugcccccacgccggcgccaagggcuucuacaagaaccucaucuggcucgucaagaagggcaacuccuaccccaagcucuccaaguccuacaucaacgacaagggcaaggagguccucguccucuggggcauccaccaccccuccaccuccgccgaccagcagucccucuaccagaacgccgacgccuacgucuucgucggcaccucccgcuacuccaagaaguucaagcccgagaucgccauccgccccaagguccgcgaccaggagggccgcaugaacuacuacuggacccucgucgagcccggcgacaagaucaccuucgaggccaccggcaaccucgucgucccccgcuacgccuucgccauggagcgcgacgccggcuccggcaucaucaucuccgacacccccguccacgacugcaacaccaccugccagacccccaagggcgccaucaacaccucccuccccuuccagaacauccaccccaucaccaucggcaagugccccaaguacgucaaguccaccaagcuccgccucgccaccggccuccgcaacguccccuccauccagucccgcggccucuucggcgccaucgccggcuucaucgagggcggcuggaccggcauggucgacggcugguacggcuaccaccaccagaacgagcagggcuccggcuacgccgccgaccucaaguccacccagaacgccaucgacgagaucaccaacaaggucaacuccgucaucgagaagaugaacacccaguucaccgccgucggcaaggaguucaaccaccucgagaagcgcaucgagaaccucaacaagaagaucgacgacggcuuccucgacaucuggaccuacaacgccgagcuccucguccuccucgagaacgagcgcacccucgacuaccacgacuccaacgucaagaaccucuacgagaagguccgcucccagcucaagaacaacgccaaggagaucggcaacggcugcuucgaguucuaccacaagugcgacaacaccugcauggaguccgucaagaacggcaccuacgacuaccccaaguacuccgaggaggccaagcucaaccgcgaggagaucgacggcgucaagcucgaguccacccgcaucuaccagauccucgccaucuacuccaccgucgccuccucccucguccucgucgucucccucggcgccaucuccuucuggaugugcuccaacggcucccuccagugccgcaucugcaucuga

SEQ ID NO: 108966 - RNA, 1701 nt, Artificial Sequence
  derived and/or modified CDS sequence (opt2) from hemagglutinin__InfluenzaA__AJJ99899
augaaggccauccucgucguccuccucuacaccuucgccaccgccaacgccgacacccucugcaucggcuaccacgccaacaacuccaccgacaccgucgacaccguccucgagaagaacgucaccgucacccacuccgucaaccuccucgaggacaagcacaacggcaagcucugcaagcuccgcggcgucgccccccuccaccucggcaagugcaacaucgccggcuggauccucggcaaccccgagugcgagucccucuccaccgccuccuccugguccuacaucgucgagaccuccuccuccgacaacggcaccugcuaccccggcgacuucaucaacuacgaggagcuccgcgagcagcucuccuccgucuccuccuucgagcgcuucgagaucuuccccaagaccuccuccuggcccaaccacgacuccaacaagggcgucaccgccgccugcccccgcgccggcgccaaguccuucuacaagaaccucaucuggcucgucaagaagggcaacuccuaccccaaccucuccaaguccuacaucaacgacaagggcaaggagguccucguccucuggggcauccaccaccccuccaccaccgccgaccagcagucccucuaccagaacgccgacgccuacgucuucgucggcaccucccgcuacuccaagaaguucaagcccgagaucgccauccgccccaagguccgcgaccaggagggccgcaugaacuacuacuggacccuccucgagcccggcgacaagaucaccuucgaggccaccggcaaccuccucgucccccgcuacgccuucgccauggagcgcaacgccggcuccggcaucaucaucuccgacacccccguccacgacugcaacaccaccugccagacccccaagggcgccaucaacaccucccuccccuuccagaacauccaccccaucaccaucggcaagugccccaaguacgucaaguccaccaagcuccgccucgccaccggccuccgcaacguccccuccauccagucccgcggccucuucggcgccaucgccggcuucaucgagggcggcuggaccggcauggucgacggcugguacggcuaccaccaccagaacggccagggcuccggcuacgccgccgaccucaaguccacccagaacgccgucgacaagaucaccaacaaggucaacuccgucaucgagaagaugaacacccaguucaccgccgucggcaaggaguucaaccaccucgagaagcgcaucgagaaccucaacaagaaggucgacgacggcuuccucgacaucuggaccuacaacgccgagcuccucguccuccucgagaacgagcgcacccucgacuaccacgacuccaacgucaagaaccucuacgagaagguccgcaaccagcucaagaacaacgccaaggagaucggcaacggcugcuucgaguucuaccacaagugcgacaacaccugcauggaguccgucaagaacggcaccuacgacuaccccaaguacuccgaggaggccaagcucaaccgcgaggagaucgacggcgucaagcucgaguccacccgcaucuaccagauccucgccaucuacuccaccgucgccuccucccucguccucgucgucucccucggcgccaucuccuucuggaugugcuccaacggcucccuccagugccgcaucugcaucuga

SEQ ID NO: 108967 - RNA, 1701 nt, Artificial Sequence
  derived and/or modified CDS sequence (opt2) from hemagglutinin__InfluenzaA__AJJ99910
augaaggccauccucgucguccuccucuacaccuucgccaccgccaacgccgacacccucugcaucggcuaccacgccaacaacuccaccgacaccgucgacaccguccucgagaagaacgucaccgucacccacuccgucaaccuccucgaggacaagcacaacggcaagcucugcaagcuccgcggcgucgccccccuccaccucggcaagugcaacaucgccggcuggauccucggcaaccccgagugcgagucccucuccaccgccuccuccugguccuacaucgucgagaccuccuccuccgacaacggcaccugcuaccccggcgacuucaucgacuacgaggagcuccgcgagcagcucuccuccgucuccuccuucgagcgcuucgagaucuuccccaagaccuccuccuggcccaaccacgacuccgacaagggcgucaccgccgccugcccccacgccggcgccaaguccuucuacaagaaccucaucuggcucgucaagaagggcaacuccuaccccaagcucuccaaguccuacaucaacgacaagggcaaggagguccucguccucuggggcauccaccaccccuccaccaccgccgaccagcagucccucuaccagaacgccgacaccuacgucuucgucggcaccucccgcuacuccaagaaguucaagcccgagaucgccauccgccccaagguccgcgaccaggagggccgcaugaacuacuacuggacccucgucgagcccggcgacaagaucaccuucgaggccaccggcaaccucgucgucccccgcuacgccuucgccauggagcgcaacgccggcuccggcaucaucaucuccgacacccccguccacgacugcaacaccaccugccagacccccaagggcgccaucaacaccucccuccccuuccagaacauccaccccaucaccaucggcaagugccccaaguacgucaaguccaccaagcuccgccucgccaccggccuccgcaacguccccuccauccagucccgcggccucuucggcgccaucgccggcuucaucgagggcggcuggaccggcauggucgacggcugguacggcuaccaccaccagaacgagcagggcuccggcuacgccgccgaccucaaguccacccagaacgccaucgacaagaucaccaacaaggucaacuccgucaucgagaagaugaacacccaguucaccgccgucggcaaggaguucaaccaccucgagaagcgcaucgagaaccucaacaagaaggucgacgacggcuuccucgacaucuggaccuacaacgccgagcuccucguccuccucgagaacgagcgcacccucgacuaccacgacuccaacgucaagaaccucuacgagaagguccgcaaccagcucaagaacaacgccaaggagaccggcaacggcugcuucgaguucuaccacaagugcgacaacaccugcauggaguccgucaagaacggcaccuacgacuaccccaaguacuccgaggaggccaagcucaaccgcgagaagaucgacggcgucaagcucgaguccacccgcaucuaccagauccucgccaucuacuccaccgucgccuccucccucguccucgucgucucccucggcgccaucuccuucuggaugugcuccaacggcucccuccagugccgcaucugcaucuga

SEQ ID NO: 108968 - RNA, 1701 nt, Artificial Sequence; identical to SEQ ID NO: 102860
  derived and/or modified CDS sequence (opt2) from hemagglutinin__InfluenzaA__AJJ99921

SEQ ID NO: 108969 - RNA, 1701 nt, Artificial Sequence
  derived and/or modified CDS sequence (opt2) from hemagglutinin__InfluenzaA__AJJ99932
augaaggccauccucgucguccuccucuacaccuucgccaccgccaacgccgacacccucugcaucggcuaccacgccaacaacuccaccgacaccgucgacaccguccucgagaagaacgucaccgucacccacuccgucaaccuccucgaggacaagcacaacggcaagcucugcaagcuccgcggcgucgccccccuccaccucggcaagugcgacaucgccggcuggauccucggcaaccccgagugcgagucccucuccaccgccuccuccugguccuacaucgucgagaccuccuccuccgacaacggcaccugcuaccccggcgacuucaucgacuacgaggagcuccgcgagcagcucuccuccgucuccuccuucgagcgcuucgagaucuuccccaagaccuccuccuggcccaaccacgacuccaacaagggcgucaccgccgccugcccccacgccggcgccaaguccuucuacaagaaccucaucuggcucgucaagaagggcaacuccuaccccaagcucuccaaguccuacaucaacgacaagggcaaggagguccucguccucuggggcauccaccaccccuccaccaccgccgaccagcagucccucuaccagaacgccgacgccuacgucuucgucggcaccucccgcuacuccaagaaguucaagcccgagaucgccauccgccccaagguccgcgaccaggagggccgcaugaacuacuacuggacccucgucgagcccggcgacaagaucaccuucgaggccaccggcaaccucgucgucccccgcuacgccuucgccauggagcgcaacgccggcuccggcaucaucaucuccgacacccccguccacgacugcaacaccaccugccagacccccaagggcgccaucaacaccucccuccccuuccagaacauccaccccaucaccaucggcaagugccccaaguacgucaaguccaccaagcuccgccucgccaccggccuccgcaacguccccuccauccagucccgcggccucuucggcgccaucgccggcuucaucgagggcggcuggaccggcauggucgacggcugguacggcuaccaccaccagaacgagcagggcuccggcuacgccgccgaccucaaguccacccagaacgccaucgacaagaucaccaacaaggucaacuccgucaucgagaagaugaacacccaguucaccgccgucggcaaggaguucaaccaccucgagaagcgcaucgagaaccucaacaagaaggucgacgacggcuuccucgacaucuggaccuacaacgccgagcuccucguccuccucgagaacgagcgcacccucgacuaccacgacuccaacgucaagaaccucuacgagaagguccgcaaccagcucaagaacaacgccaaggagaucggcaacggcugcuucgaguucuaccacaagugcgacaacaccugcauggaguccgucaagaacggcaccuacgacuaccccaaguacuccgaggaggccaagcucaaccgcgaggagaucgacggcgucaagcucgaguccacccgcaucuaccagauccucgccaucuacuccaccgucgccuccucccucguccucgucgucucccucggcgccaucuccuucuggaugugcuccaacggcucccuccagugccgcaucugcaucuga

SEQ ID NO: 108970 - RNA, 1701 nt, Artificial Sequence; identical to SEQ ID NO: 102490
  derived and/or modified CDS sequence (opt2) from hemagglutinin__InfluenzaA__AJJ99943

SEQ ID NO: 108971 - RNA, 1701 nt, Artificial Sequence
  derived and/or modified CDS sequence (opt2) from hemagglutinin__InfluenzaA__AJJ99954
augaaggccauccucgucguccuccucuacaccuucgccaccgccaacgccgacacccucugcaucggcuaccacgccaacaacuccaccgacaccgucgacaccguccucgagaagaacgucaccgucacccacuccgucaaccuccucgaggacaagcacaacggcaagcucugcaagcuccgcggcgucgccccccuccaccucggcaagugcaacaucgccggcuggauccucggcaaccccgagugcgagucccucuccaccgccuccuccugguccuacaucgucgagaccuccuccuccgacaacggcaccugcuaccccggcgacuucaucgacuacgaggagcuccgcgagcagcucuccuccgucuccuccuucgagaaguucgagaucuuccccaagaccuccuccuggcccaaccacgacuccaacaagggcgucaccgccgccugcccccacgccggcgccaaguccuucuacaagaaccucaucuggcucgucaagaagggcaacuccuaccccaagcucuccaaguccuacaucaacgacaagggcaaggagguccucguccucuggggcauccaccaccccuccaccuccgccgaccagcagucccucuaccagaacgccgacgccuacgucuucgucggcaccucccgcuacuccaagaaguucaagcccgagaucgccauccgccccaagguccgcgaccaggagggccgcaugaacuacuacuggacccucgucgagcccggcgacaagaucaccuucgaggccaccggcaaccucgucgucccccgcuacgccuucgccauggagcgcaacgccggcuccggcaucaucaccuccgacacccccguccacgacugcaacaccaccugccagacccccaagggcgccaucaacaccucccuccccuuccagaacauccaccccaucaccaucggcaacugccccaaguacgucaaguccaccaagcuccgccucgccaccggccuccgcaacguccccuccauccagucccgcggccucuucggcgccaucgccggcuucaucgagggcggcuggaccggcauggucgacggcugguacggcuaccaccaccagaacgagcagggcuccggcuacgccgccgaccucaaguccacccagaacgccaucgacaagaucaccaacaaggucaacuccgucaucgagaagaugaacacccaguucaccgccgucggcaaggaguucaaccaccucgagaagcgcaucgagaaccucaacaagaaggucgacgacggcuuccucgacaucuggaccuacaacgccgagcuccucguccuccucgagaacgagcgcacccucgacuaccacgacuccaacgucaagaaccucuacgagaagguccgcucccagcucaagaacaacgccaaggagaucggcaacggcugcuucgaguucuaccacaagugcgacaacaccugcauggaguccgucaagaacggcaccuacgacuaccccaaguacuccgaggaggccaagcucaaccgcgaggagaucgacggcgucaagcucgaguccacccgcaucuaccagauccucgccaucuacuccaccgucgccuccucccucguccucgucgucucccucggcgccaucuccuucuggaugugcuccaacggcucccuccagugccgcaucugcaucuga

SEQ ID NO: 108972 - RNA, 1701 nt, Artificial Sequence; identical to SEQ ID NO: 98947
  derived and/or modified CDS sequence (opt2) from hemagglutinin__InfluenzaA__AJJ99965

SEQ ID NO: 108973 - RNA, 1698 nt, Artificial Sequence
  derived and/or modified CDS sequence (opt2) from hemagglutinin__InfluenzaA__AJJ99989
augaaggucaagcuccucguccuccucugcaccuucaccgccaccuacgccgacaccaucugcaucggcuaccacgccaacaacuccaccgacaccgucgacaccguccucgagcgcaacgucaccgucacccacuccgucaaccuccucgagaacucccacaacggcaagcucugccuccucaagggcaucgccccccuccagcucggcaacugcuccgucgccggcuggauccucggcaaccccgagugcgagcuccucaucuccaaggaguccugguccuacaucgucgagaagcccaaccccgagaacggcaccugcuaccccggccacuucgccgacuacgaggagcuccgcgagcagcucuccuccgucuccuccuucgagcgcuucgagaucuuccccaaggaguccuccuggcccaaccacaccgucaccggcgucuccgccuccugcucccacaacggcgaguccuccuucuaccgcaaccuccucuggcucaccggcaagaacggccucuaccccaaccucuccaaguccuacgccaacaacaaggagaaggagguccucguccucuggggcguccaccacccccccaacaucggcgaccagaaggcccucuaccacaccgagaacgccuacgucuccgucgucuccucccacuacuccaagaaguucacccccgagaucgccaagcgccccaagguccgcgaccaggagggccgcaucaacuacuacuggacccuccucgagcccggcgacaccaucaucuucgaggccaacggcaaccucaucgccccccgcuacgccuucgcccucucccgcggcuucggcuccggcaucaucaacuccaacgcccccauggacaagugcgacgccaagugccagaccccccagggcgccaucaacuccucccuccccuuccagaacguccaccccgucaccaucggcgagugccccaaguacguccgcuccgccaagcuccgcauggucaccggccuccgcaacauccccuccauccagucccgcggccucuucggcgccaucgccggcuucaucgagggcggcuggaccggcauggucgacggcugguacggcuaccaccaccagaacgagcagggcuccggcuacgccgccgaccagcgcuccacccagaacgccaucaacggcaucaccaacaaggucaacuccgucaucgagaagaugaacacccaguucaccgccgucggcaaggaguucaacaagcucgagcgccgcauggagaaccucaacaagaaggucgacgacggcuucaucgacaucuggaccuacaacgccgagcuccucguccuccucgagaacgagcgcacccucgacuuccacgacuccaacgucaagaaccucuacgagaaggucaagucccagcucaagaacaacgccaaggagaucggcaacggcugcuucgaguucuaccacaagugcaacgacgagugcauggaguccgucaagaacggcaccuacgacuaccccaaguacuccgaggaguccaagcucaaccgcgagaagaucgacggcgucaagcucgaguccaugggcgucuaccagauccucgccaucuacuccaccgucgccuccucccucguccuccucgucucccucggcgccaucuccuucuggaugugcuccaacggcucccuccagugccgcaucugcaucuga

SEQ ID NO: 108974 - RNA, 1701 nt, Artificial Sequence
  derived and/or modified CDS sequence (opt2) from hemagglutinin__InfluenzaA__AJK00001
augaaggccauccucgucguccuccucuacaccuucgccaccgccaacgccgacacccucugcaucggcuaccacgccaacaacuccaccgacaccgucgacaccguccucgagaagaacgucaccgucacccacuccgucaaccuccucgaggacaagcacaacggcaagcucugcaagcuccgcggcgucgccccccuccaccucggcaagugcaacaucgccggcuggauccucggcaaccccgagugcgagucccucuccaccgccuccuccugguccuacaucgucgagaccuccuccuccgacaacggcaccugcuaccccggcgacuucaucaacuacgaggagcuccgcgagcagcucuccuccgucuccuccuucgagcgcuucgagaucuuccccaagaccuccuccuggcccaaccacgacuccaacaagggcgucaccgccgccugcccccgcgccggcgagaaguccuucuacaagaaccucaucuggcucgucaagaagggcaacuccuaccccaagcucuccaaguccuacaucaacgacaagggcaaggagguccucguccucuggggcauccaccaccccuccaccaccgccgaccagcagucccucuaccagaacgccgacgccuacgucuucgucggcaccucccgcuacuccaagaaguucaagcccgagaucgccauccgccccaagguccgcgaccaggagggccgcaugaacuacuacuggacccucgucgagcccggcgacaagaucaccuucgaggccaccggcaaccuccucgucccccgcuacgccuucgccauggagcgcaacgccggcuccggcaucaucaucuccgacacccccguccacgacugcaacaccaccugccagacccccaagggcgccaucaacaccucccuccccuuccagaacauccaccccaucaccaucggcaagugccccaaguacgucaaguccaccaagcuccgccucgccaccggccuccgcaacguccccuccauccagucccgcggccucuucggcgccaucgccggcuucaucgagggcggcuggaccggcauggucgacggcugguacggcuaccaccaccagaacgagcagggcuccggcuacgccgccgaccucaaguccacccagaacgccaucgacaagaucaccaacaaggucaacuccgucaucgagaagaugaacacccaguucaccgccgucggcaaggaguucaaccaccucgagaagcgcaucgagaaccucaacaagaaggucgacgacggcuuccucgacaucuggaccuacaacgccgagcuccucguccuccucgagaacgagcgcacccucgacuaccacgacuccaacgucaagaaccucuacgagaagguccgcaaccagcucaagaacaacgccaaggagaucggcaacggcugcuucgaguucuaccacaagugcgacaacaccugcauggaguccgucaagaacggcaccuacgacuaccccaaguacuccgaggaggccaagcucaaccgcgagaagaucgacggcgucaagcucgaguccacccgcaucuaccagauccucgccaucuacuccaccgucgccuccucccucguccucgucgucucccucggcgccaucuccuucuggaugugcuccaacggcucccuccagugccgcaucugcaucuga

SEQ ID NO: 108975 - RNA, 1701 nt, Artificial Sequence
  derived and/or modified CDS sequence (opt2) from hemagglutinin__InfluenzaA__AJK00012
augaaggccauccucgucguccuccucugcaccuucgccaccgccaacgccgacacccucugcaucggcuaccacgccaacaacuccaccgacaccgucgacaccguccucgagaagaacgucaccgucacccacuccgucaaccuccucgaggacaagcacaacggcaagcucugcaagcuccgcggcgucgccccccuccaccucggcaagugcaacaucgccggcuggauccucggcaaccccgagugcgagucccucuccaccgccuccuccugguccuacaucgucgagaccuccuccuccgacaacggcaccugcuaccccggcgacuucaucgacuacgaggagcuccgcgagcagcucuccuccgucuccuccuucgagcgcuucgagaucuuccccaagaccuccuccuggcccaaccacgacuccaacaagggcgucaccgccgccugcccccacgccggcgccaagggcuucuacaagaaccucaucuggcucgucaagaagggcaacuccuaccccaagcucuccaaguccuacaucaacgacaagggcaaggagguccucguccucuggggcauccaccaccccuccaccaccgccgaccagcagucccucuaccagaacgccgacaccuacgucuucgucggcaccucccgcuacuccaagaaguucaagcccgagaucgccauccgccccaagguccgcgaccaggagggccgcaugaacuacuacuggacccucgucgagcccggcgacaagaucaccuucgaggccaccggcaaccucgucgucccccgcuacgccuucgccauggagcgcaacgccggcuccggcaucaucaucuccgacaccaccguccacgacugcaacaccaccugccagacccccaagggcgccaucaacaccucccuccccuuccagaacauccaccccaucaccaucggcaagugccccaaguacgucaaguccaccaagcuccgccucgccaccggccuccgcaacguccccuccauccagucccgcggccucuucggcgccaucgccggcuucaucgagggcggcuggaccggcauggucgacggcugguacggcuaccaccaccagaacgagcagggcuccggcuacgccgccgaccucaaguccacccagaacgccaucgacaagaucaccaacaaggucaacuccgucaucgagaagaugaacacccaguucaccgccgucggcaaggaguucaaccaccucgagaagcgcaucgagaaccucaacaagaaggucgacgacggcuuccucgacaucuggaccuacaacgccgagcuccucguccuccucgagaacgagcgcacccucgacuaccacgacuccaacgucaagaaccucuacgagaagguccgcaaccagcucaagaacaacgccaaggagaucggcgacggcugcuucgaguucuaccacaagugcgacaacaccugcauggaguccgucaagaacggcaccuacgacuaccccaaguacuccgaggaggccaagcucaaccgcgagaagaucgacggcgucaagcucgaguccacccgcaucuaccagauccucgccaucuacuccaccgucgccuccucccucguccucgucgucucccucggcgccaucuccuucuggaugugcuccaacggcucccuccagugccgcaucugcaucuga

SEQ ID NO: 108976 - RNA, 1701 nt, Artificial Sequence
  derived and/or modified CDS sequence (opt2) from hemagglutinin__InfluenzaA__AJK00023
augaaggccauccucgucguccuccucuacaccuucgccaccgccaacgccgacacccucugcaucggcuaccacgccaacaacuccaccgacaccgucgacaccguccucgagaagaacgucaccgucacccacuccgucaaccuccucgaggacaagcacaacggcaagcucugcaagcuccgcggcgucgccccccuccaccucggcaagugcaacaucgccggcuggauccucggcaaccccgagugcgagucccucuccaccgccuccuccugguccuacaucgucgagaccuccuccuccgacaacggcaccugcuaccccggcgacuucaucaacuacgaggagcuccgcgagcagcucuccuccgucuccuccuucgagcgcuucgagaucuuccccaagaccuccuccuggcccaaccacgacuccaacaagggcgucaccgccgccugcccccgcgccggcgccaaguccuucuacaagaaccucaucuggcucgucaagaagggcaacuccuaccccaagcucuccaaguccuacaucaacgacaagggcaaggagguccucguccucuggggcauccaccaccccuccaccaccgccgaccagcagucccucuaccagaacgccgacgccuacgucuucgucggcaccucccgcuacuccaagaaguucaagcccgagaucgccauccgccccaagguccgcgaccaggagggccgcaugaacuacuacuggacccucgucgagcccggcgacaagaucaccuucgaggccaccggcaaccuccucgucccccgcuacgccuucgccauggagcgcaacgccggcuccggcaucaucaucuccgacacccccguccacgacugcaacaccaccugccagacccccaagggcgccaucaacaccucccuccccuuccagaacauccaccccaucaccaucggcaagugccccaaguacgucaaguccaccaagcuccgccucgccaccggccuccgcaacguccccuccauccagucccgcggccucuucggcgccaucgccggcuucaucgagggcggcuggaccggcauggucgacggcugguacggcuaccaccaccagaacgagcagggcuccggcuacgccgccgaccucaaguccacccagaacgccaucgacaagaucaccaacaaggucaacuccgucaucgagaagaugaacacccaguucaccgccgucggcaaggaguucaaccaccucgagaagcgcaucgagaaccucaacaagaaggucgacgacggcuuccucgacaucuggaccuacaacgccgagcuccucguccuccucgagaacgagcgcacccucgacuaccacgacuccaacgucaagaaccucuacgagaagguccgcaaccagcucaagaacaacgccaaggagaucggcaacggcugcuucgaguucuaccacaagugcgacaacaccugcauggaguccgucaagaacggcaccuacgacuaccccaaguacuccgaggaggccaagcucaaccgcgaggagaucgacggcgucaagcucgaguccacccgcaucuaccagauccucgccaucuacuccaccgucgccuccucccucguccucgucgucucccucggcgccaucuccuucuggaugugcuccaacggcucccuccagugccgcaucugcaucuga

SEQ ID NO: 108977 - RNA, 1701 nt, Artificial Sequence; identical to SEQ ID NO: 102860
  derived and/or modified CDS sequence (opt2) from hemagglutinin__InfluenzaA__AJK00034

SEQ ID NO: 108978 - RNA, 1701 nt, Artificial Sequence; identical to SEQ ID NO: 103078
  derived and/or modified CDS sequence (opt2) from hemagglutinin__InfluenzaA__AJK00045

SEQ ID NO: 108979 - RNA, 1701 nt, Artificial Sequence; identical to SEQ ID NO: 103078
  derived and/or modified CDS sequence (opt2) from hemagglutinin__InfluenzaA__AJK00056

SEQ ID NO: 108980 - RNA, 1701 nt, Artificial Sequence; identical to SEQ ID NO: 98947
  derived and/or modified CDS sequence (opt2) from hemagglutinin__InfluenzaA__AJK00067

SEQ ID NO: 108981 - RNA, 1698 nt, Artificial Sequence
  derived and/or modified CDS sequence (opt2) from hemagglutinin__InfluenzaA__AJK00079
augaaggucaagcuccucguccuccucugcaccuucaccgccaccuacgccgacaccaucugcaucggcuaccacgccaacaacuccaccgacaccgucgacaccguccucgagaagaacgucaccgucacccacuccgucaaccuccucgagaacucccacaacggcaagcucugccuccucaagggcaucgccccccuccagcucggcaacugcuccgucgccggcuggauccucggcaaccccgagugcgagcuccucaucuccaaggaguccugguccuacaucgucgagaagcccaaccccgagaacggcaccugcuaccccggccacuucgccgacuacgaggagcuccgcgagcagcucuccuccgucuccuccuucgagcgcuucgagaucuuccccaaggaguccuccuggcccaaccacaccgucaccggcgucuccgccuccugcucccacaacggcgagaacuccuucuaccgcaaccuccucuggcucacccgcaagaacggccucuaccccaaccucuccaaguccuacgccaacaacaaggagaaggagguccucguccucuggggcguccaccacccccccaacaucgccgaccagaagacccucuaccacaccgagaacgccuacgucuccgucgucuccucccacuacucccgcaaguucacccccgagaucgccaagcgccccaagguccgcgaccaggagggccgcaucaacuacuacuggacccuccucgagcccggcgacaccaucaucuucgaggccaacggcaaccucaucgccccccgcuacgccuucgcccucucccgcggcuucggcuccggcaucaucaacuccaacgcccccauggacaagugcgacgccaagugccagaccccccagggcgccaucaacuccucccuccccuuccagaacguccaccccgucaccaucggcgagugccccaaguacguccgcuccgccaagcuccgcauggucaccggccuccgcaacauccccuccauccagucccgcggccucuucggcgccaucgccggcuucaucgagggcggcuggaccggcauggucgacggcugguacggcuaccaccaccagaacgagcagggcuccggcuacgccgccgaccagaaguccacccagaacgccaucaacggcaucaccaacaaggucaacuccgucaucgagaagaugaacacccaguucaccgccgucggcaaggaguucaacaagcucgagcgccgcauggagaaccucaacaagaaggucgacgacggcuucaucgacaucuggaccuacaacgccgagcuccucguccuccucgagaacgagcgcacccucgacuuccacgacuccaacgucaagaaccucuacgagaaggucaagucccagcucaagaacaacgccaaggagaucggcaacggcugcuucgaguucuaccacaagugcaacgacgagugcauggaguccgucaagaacggcaccuacgacuaccccaaguacuccgaggaguccaagcucaaccgcgagaagaucgacggcgucaagcucgaguccaugggcgucuaccagauccucgccaucuacuccaccgucgccuccucccucguccuccucgucucccucggcgccaucuccuucuggaugugcuccaacggcucccuccagugccgcaucugcaucuga

SEQ ID NO: 108982 - RNA, 1698 nt, Artificial Sequence
  derived and/or modified CDS sequence (opt2) from hemagglutinin__InfluenzaA__AJK00091
augaaggucaagcuccucguccuccucugcaccuucaccgccaccuacgccgacaccaucugcaucggcuaccacgccaacaacuccaccgacaccgucgacaccguccucgagaagaacgucaccgucacccacuccgucaaccuccucgagaacucccacaacggcaagcucugccuccucaagggcaucgccccccuccagcucggcaacugcuccgucgccggcuggauccucggcaaccccgagugcgagcuccucaucuccaaggaguccugguccuacaucgucgagaagcccaaccccgagaacggcaccugcuaccccggccacuucgccgacuacgaggagcuccgcgagcagcucuccuccgucuccuccuucgagcgcuucgagaucuuccccaaggaguccuccuggcccaaccacaccaucaccggcgucuccgccuccugcucccacaacggcgaguccuccuucuaccgcaaccuccucuggcucaccggcaagaacggccucuaccccaaccucuccaaguccuacgccaacaacaaggagaaggagguccucguccucuggggcguccaccacccccccaacaucggcguccagaaggcccucuaccacaccgagaacgccuacgucuccgucgucuccucccacuacucccgcaaguucacccccgagaucgccaagcgccccaagguccgcgaccaggagggccgcaucaacuacuacuggacccuccucgagcccggcgacaccaucaucuucgaggccaacggcaaccucaucgccccccgcuacgccuucgcccucucccgcggcuucggcuccggcaucaucaacuccaacgcccccauggacaagugcgacgccaagugccagaccccccagggcgccaucaacuccucccuccccuuccagaacguccaccccgucaccaucggcgagugccccaaguacguccgcuccgccaagcuccgcauggucaccggccuccgcaacauccccuccauccagucccgcggccucuucggcgccaucgccggcuucaucgagggcggcuggaccggcauggucgacggcugguacggcuaccaccaccagaacgagcagggcuccggcuacgccgccgaccagaaguccacccagaacgccaucaacggcaucaccaacaaggucaacuccgucaucgagaagaugaacacccaguucaccgccgucggcaaggaguucaacaagcucgagcgccgcauggagaaccucaacaagaaggucgacgacggcuucaucgacaucuggaccuacaacgccgagcuccucguccuccucgagaacgagcgcacccucgacuuccacgacuccaacgucaagaaccucuacgagaaggucaagucccagcucaagaacaacgccaaggagaucggcaacggcugcuucgaguucuaccacaagugcaacgacgagugcauggaguccgucaagaacggcaccuacgacuaccccaaguacuccgaggaguccaagcucaaccgcgagaagaucgacggcgucaagcucgaguccaugggcgucuaccagauccucgccaucuacuccaccgucgccuccucccucguccuccucgucucccucggcgccgucuccuucuggaugugcuccaacggcucccuccagugccgcgucugcaucuga

SEQ ID NO: 108983 - RNA, 1698 nt, Artificial Sequence; identical to SEQ ID NO: 98524
  derived and/or modified CDS sequence (opt2) from hemagglutinin__InfluenzaA__AJK00103

SEQ ID NO: 108984 - RNA, 1701 nt, Artificial Sequence; identical to SEQ ID NO: 102956
  derived and/or modified CDS sequence (opt2) from hemagglutinin__InfluenzaA__AJK00114

SEQ ID NO: 108985 - RNA, 1701 nt, Artificial Sequence
  derived and/or modified CDS sequence (opt2) from hemagglutinin__InfluenzaA__AJK00125
augaaggccauccucgucguccuccucuacaccuucgccaccgccaacgccgacacccucugcaucggcuaccacgccaacaacuccaccgacaccgucgacaccguccucgagaagaacgucaccgucacccacuccgucaaccuccucgaggacaagcacaacggcaagcucugcaagcuccgcgaggucgccccccuccaccucggcaagugcaacaucgccggcuggauccucggcaaccccgagugcgagucccucuccaccgccuccuccugguccuacaucgucgagaccuccuccuccgacaacggcaccugcuaccccggcgacuucaucgacuacgaggagcuccgcgagcagcucuccuccgucuccuccuucgagcgcuucgagaucuuccccaagaccaacuccuggcccaaccacgacuccaacaagggcgucaccgccgccugcccccacgccggcgccaaguccuucuacaagaaccucaucuggcucgucaagaagggcaacuccuaccccaagcucuccaaguccuacaucaacgacaagggcaaggagguccucguccucuggggcauccaccaccccuccaccuccgccgaccagcagucccucuaccagaacgccgacgccuacgucuucgucggcaccucccgcuacuccaagaaguucaagcccgagaucgccauccgccccaagguccgcgaccaggagggccgcaugaacuacuacuggacccucgucgagcccggcgacaagaucaccuucgaggccaccggcaaccucgucgucccccgcuacgccuucgccauggagcgcaacgccggcuccggcaucaucaucuccgacacccccgucuacgacugcaacaccaccugccagacccccaagggcgccaucaacaccucccuccccuuccagaacauccaccccaucaccaucggcaagugccccaaguacgucaaguccaccaagcuccgccucgccaccggccuccgcaacguccccuccauccagucccgcggccucuucggcgccaucgccggcuucaucgagggcggcuggaccggcauggucgacggcugguacggcuaccaccaccagaacgagcagggcuccggcuacgccgccgaccucaaguccacccagaacgccaucgacgagaucaccaacaaggucaacuccgucaucgagaagaugaacacccaguucaccgccgucggcaaggaguucaaccaccucgagaagcgcaucgagaaccucaacaagaaggucgacgacggcuuccucgacaucuggaccuacaacgccgagcuccucguccuccucgagaacgagcgcacccucgacuaccacgacuccaacgucaagaaccucuacgagaagguccgcucccagcucaagaacaacgccaaggagaucggcaacggcugcuucgaguucuaccacaagugcgacaacaccugcauggaguccgucaagaacggcaccuacgacuaccccaaguacuccgaggaggccaagcucaaccgcgagaagaucgacggcgucaagcucgaguccacccgcaucuaccagauccucgccaucuacuccaccgucgccuccucccucguccucgucgucucccucggcgccaucuccuucuggaugugcuccaacggcucccuccagugccgcaucugcaucuga

SEQ ID NO: 108986 - RNA, 1701 nt, Artificial Sequence; identical to SEQ ID NO: 98705
  derived and/or modified CDS sequence (opt2) from hemagglutinin__InfluenzaA__AJK00136

SEQ ID NO: 108987 - RNA, 1704 nt, Artificial Sequence
  derived and/or modified CDS sequence (opt2) from hemagglutinin__InfluenzaA__AJK00166
auggagaagaucguccuccuccucgccaucgucucccucgucaaguccgaccagaucugcaucggcuaccacgccaacaacuccaccgagcaggucgacaccaucauggagaagaacgucaccgucacccacgcccaggacauccucgagaagacccacaacggcaagcucugcgaccucgacggcgucaagccccucauccuccgcgacugcuccgucgccggcuggcuccucggcaaccccaugugcgacgaguucaucaacguccccgagugguccuacaucgucgagaaggccaaccccgccaacgaccucugcuaccccggcaacuucaacgacuacgaggagcucaagcaccuccucucccgcaucaaccacuucgagaagauccagaucauccccaaguccuccugguccgaccacgaggccuccuccggcgucuccuccgccugccccuaccagggcaagcccuccuucuuccgcaacgucgucuggcucaucaagaagaacaacaccuaccccaccaucaagcgcuccuacaacaacaccaaccaggaggaccuccucauccucuggggcauccaccacuccaacgacgccgccgagcagaccaagcucuaccagaaccccaccaccuacaucuccgucggcaccuccacccucaaccagcgccucguccccaagaucgccacccgcuccaaggucaacggccaguccggccgcauggacuucuucuggaccauccucaagcccaacgacgccaucaacuucgaguccaacggcaacuucaucgcccccgaguacgccuacaagaucgucaagaagggcgacuccgccaucaugaaguccgaggucgaguacggcaacugcaacaccaagugccagacccccaucggcgccaucaacuccuccaugcccuuccacaacauccacccccucaccaucggcgagugccccaaguacgucaaguccaacaagcucguccucgccaccggccuccgcaacuccccccuccgcgagcgccgccgcaagcgcggccucuucggcgccaucgccggcuucaucgagggcggcuggcagggcauggucgacggcugguacggcuaccaccacuccaacgagcagggcuccggcuacgccgccgacaaggaguccacccagaaggccaucgacggcgucaccaacaaggucaacuccaucaucgacaagaugaacacccaguucgaggccgucggccgcgaguucaacaaccucgagcgccgcaucgagaaccucaacaagaagauggaggacggcuuccucgacgucuggaccuacaacgccgagcuccucguccucauggagaacgagcgcacccucgacuuccacgacuccaacgucaagaaccucuacgacaagguccgccuccagcuccgcgacaacgccaaggagcucggcaacggcugcuucgaguucuaccacaagugcgacaacgagugcauggaguccguccgcaacggcaccuacgacuacccccaguacuccgaggaggcccgccucaagcgcgaggagaucuccggcgucaagcucgaguccaucggcaccuaccagauccucuccaucuacuccaccgucgccuccucccucgcccucgccaucauggucgccggccucucccucuggaugugcuccaacggcucccuccagugccgcaucugcaucuga

SEQ ID NO: 108988 - RNA, 1707 nt, Artificial Sequence
  derived and/or modified CDS sequence (opt2) from hemagglutinin__InfluenzaA__AJK00177
auggagaagaucguccuccuccucgccgucgucucccucguccgcuccgaccagaucugcaucggcuaccacgccaacaacuccaccgagcaggucgacaccaucauggagaagaacgucaccgucacccacgcccaggacauccucgagaagacccacaacggcaagcucugcgaccucgacggcgucaagccccucauccuccgcgacugcuccgucgccggcuggcuccucggcaaccccaugugcgacgaguucaucaacguccccgagugguccuacaucgucgagaaggccaaccccgccaacgaccucugcuaccccggcaaccucaacgacuacgaggagcucaagcaccuccucucccgcaucaaccacuucgagaagauccagaucauccccaaguccuccugguccgaccacgaggccucccucggcgucuccuccgccugccccuaccagggcacccccuccuucuuccgcaacgucgucuggcucaucaagaagaacaacaccuaccccaccaucaagcgcuccuacaacaacaccaaccaggaggaccuccucauccucuggggcauccaccacuccaacgacgaggccgagcagaucaagcucuaccagaaccccaccaccuacgucuccgucggcaccuccacccucaaccagcgccucguccccaagaucgccacccgcuccaaggucaacggccaguccggccgcauggacuucuucuggaccauccucaagcccgacgacgccaucaacuucgaguccaacggcaacuucaucgcccccgaguacgccuacaagaucgucaagaagggcgacuccgccaucaugaaguccgaggucgaguacggcaacugcaacaccaagugccagacccccaucggcgccaucaacuccuccaugcccuuccacaacauccacccccucaccaucggcgagugccccaaguacgucaaguccaacaagcucguccucgccaccggccuccgcaacuccccccuccgcgagaagcgccgccgcaagcgcggccucuucggcgccaucgccggcuucaucgagggcggcuggcagggcauggucgacggcugguacggcuaccaccacuccaacgagcagggcuccggcuacgccgccgacaaggaguccacccagaaggccaucgacggcgucaccaacaaggucaacuccaucaucgacaagaugaacacccaguucgaggccgucggccgcgaguucaacaaccucgagcgccgcaucgagaaccucaacaagaagauggaggacggcuuccucgacgucuggaccuacaacgccgagcuccucguccucauggagaacgagcgcacccucgacuuccacgacuccaacgucaagaaccucuacgacaagguccgccuccagcuccgcgacaacgccaaggagcucggcaacggcugcuucgaguucuaccacaagugcgacaacgagugcauggaguccguccgcaacggcaccuacgacuacccccaguacuccgaggaggcccgccucaagcgcgaggagaucuccggcgucaagcucgaguccaucggcaucuaccagauccucuccaucuacuccaccgucgccuccucccucgcccucgccaucauggucgccggccucucccucuggaugugcuccaacggcucccuccagugccgcaucugcaucuga

SEQ ID NO: 108989 - RNA, 1704 nt, Artificial Sequence
  derived and/or modified CDS sequence (opt2) from hemagglutinin__InfluenzaA__AJK00188
auggagaagaucguccuccuccucgccgucgucucccucguccgcuccgaccagaucugcaucggcuaccacgccaacaacuccaccgagcaggucgacaccaucauggagaagaacgucaccgucacccacgcccaggacauccucgagaagacccacaacggcaagcucugcgaccucgacggcgucaagccccucauccuccgcgacugcuccgucgccggcuggcuccucggcaaccccaugugcgacgaguucaucaacguccccgagugguccuacaucgucgagaaggccaaccccgccaacgaccucugcuaccccggcaaccucaacgacuacgaggagcucaagcaccuccucucccgcaucaaccacuucgagaagauccagaucauccccaaguccuccugguccgaccacgaggccucccucggcgucuccuccgccugccccuaccagggcacccccuccuucuuccgcaacgucgucuggcucaucaagaagaacaacaccuaccccaccaucaagcgcuccuacaacaacaccaaccaggaggaccuccucauccucuggggcauccaccacuccaacgacgaggccgagcagaucaagcucuaccagaaccccaccaccuacaucuccgucggcaccuccacccucaaccagcgccucguccccaagaucgccacccgcuccaaggucaacggccaguccggccgcauggacuucuucuggaccauccucaagcccgacgacgccaucaacuucgaguccaacggcaacuucaucgcccccgaguacgccuacaagaucgucaagaagggcgacuccgccaucaugaaguccgaggucgaguacggcaacugcaacaccaagugccagacccccaucggcgccaucaacuccuccaugcccuuccacaacauccacccccucaccaucggcgagugccccaaguacgucaaguccaacaagcucguccucgccaccggccuccgcaacuccccccuccgcgagaagcgccgcaagcgcggccucuucggcgccaucgccggcuucaucgagggcggcuggcagggcauggucgacggcugguacggcuaccaccacuccaacgagcagggcuccggcuacgccgccgacaaggaguccacccagaaggccaucgacggcgucaccaacaaggucaacuccaucaucgacaagaugaacacccaguucgaggccgucggccgcgaguucaacaaccucgagcgccgcaucgagaaccucaacaagaagauggaggacggcuuccucgacgucuggaccuacaacgccgagcuccucguccucauggagaacgagcgcacccucgacuuccacgacuccaacgucaagaaccucuacgacaagguccgccuccagcuccgcgacaacgccaaggagcucggcaacggcugcuucgaguucuaccacaagugcgacaacgagugcauggaguccguccgcaacggcaccuacgacuacccccaguacuccgaggaggcccgccucaagcgcgaggagaucuccggcgucaagcucgaguccaucggcaccuaccagauccucuccaucuacuccaccgucgccuccucccucgcccucgccaucauggucgccggccucucccucuggaugugcuccaacggcucccuccagugccgcaucugcaucuga

SEQ ID NO: 108990 - RNA, 1704 nt, Artificial Sequence
  derived and/or modified CDS sequence (opt2) from hemagglutinin__InfluenzaA__AJK00207
auggagaagaucguccuccuccucgccaucgucucccucguccgcuccgaccagaucugcaucggcuaccacgccaacaacuccaccgagcaggucgacaccaucauggagaagaacgucaccgucacccacgcccaggacauccucgagaagacccacaacggcaagcucugcgaccucgacggcgucaagccccucauccuccgcgacugcuccgucgccggcuggcuccucggcaaccccaugugcgacgaguucaucaacguccccgagugguccuacaucgucgagaaggccaaccccgccaacgaccucugcuaccccggcaacuucaacgacuacgaggagcucaagcaccuccucucccgcaucaaccacuucgagaagauccagaucauccccaaguccuccugguccgaccacgaggccuccuccggcgucuccuccgccugccccuaccagggcacccccuccuucuuccgcaacgucgucuggcucaucaagaagaacaacaccuaccccaccaucaagcgcuccuacaacaacaccucccaggaggaccuccucguccucuggggcauccaccacuccaacgacgccaccgagcagaugaagcucuaccagaaccccaccaccuacgucuccgucggcaccuccacccucaaccagcgccucguccccaagaucgccacccgcuccaaggucaacggccaguccggccgcauggacuucuucuggaccauccucaaguccaacgacgccaucaacuucgaguccaacggcaacuucaucgcccccgaguacgccuacaagaucgucaagaagggcgacuccgccaucaugaaguccgaggucgaguacggcaacugcuccaccaagugccagacccccaucggcgccaucaacuccuccaugcccuuccacaacauccacccccucaccaucggcgagugccccaaguacgucaaguccaacaagcucguccucgccaccggccuccgcaacuccccccuccgcgagcgccgccgcaagcgcggccucuucggcgccaucgccggcuucaucgagggcggcuggcagggcauggucgacggcugguacggcuaccaccacuccaacgagcagggcuccggcuacgccgccgacaaggaguccacccagaaggccaucgacggcgucaccaacaaggucaacuccaucaucgacaagaugaacacccaguucgaggccgucggccgcgaguucaacaaccucgagcgccgcaucgagaaccucaacaagaagauggaggacggcuuccucgacgucuggaccuacaacgccgagcuccucguccucauggagaacgagcgcacccucgacuuccacgacuccaacgucaagaaccucuacgacaagguccgccuccagcuccgcgacaacaccaaggagcucggcaacggcugcuucgaguucuaccacaagugcgacaacgagugcauggaguccguccgcaacggcaccuacgacuacccccaguacuccgaggaggcccgccucaagcgcgaggagaucuccggcgucaagcucgaguccaucggcaccuaccagauccucuccaucuacuccaccgucgccuccucccucgcccucgccaucauggucgccggccucucccucuggaugugcuccaacggcucccuccagugccgcaucugcaucuga

SEQ ID NO: 108991 - RNA, 1704 nt, Artificial Sequence
  derived and/or modified CDS sequence (opt2) from hemagglutinin__InfluenzaA__AJK00218
auggagaagaucguccucuuccucgccaucgucucccucguccgcuccgaccagaucugcaucggcuaccacgccaacaacuccaccgagcaggucgacaccaucauggagaagaacgucaccgucacccacgcccaggacauccucgagaagacccacaacggcaagcucugcgaccucgacggcgucaagccccucauccuccgcgacugcuccgucgccggcuggcuccucggcaaccccaugugcgacgaguucaucaacguccccgagugguccuacaucgucgagaaggccaaccccgccaacgaccucugcuaccccggcaacuucaacgacuacgaggagcucaagcaccuccucucccgcaucaaccacuucgagaagauccgcaucauccccaaguccuccuggcccgaccacgaggccuccuccggcgucuccuccgccugccccuaccagggcacccccuccuucuuccgcaacaucgucuggcucaucaagaagaacaacaccuaccccaccaucaagcgcuccuacaacaacaccucccaggaggaccuccucguccucuggggcauccaccacuccuccgacgccaccgagcagaucaagcucuaccagaaccccaccaccuacgucuccgucggcaccuccacccucaaccagcgccucguccccaagaucgccacccgcuccaaggucaacggccaguccggccgcauggacuucuucuggaccauccucaaguccaacgacgccaucaacuucgaguccaacggcaacuucaucgcccccgaguacgccuacaagaucgucaagaagggcgacuccgccaucaugaaguccgaggucgaguacggcaacugcuccaccaagugccagacccccaucggcgccaucaacuccuccaugcccuuccacaacauccacccccucaccaucggcgagugccccaaguacgucaaguccaacaagcucguccucgccaccggccuccgcaacuccccccuccgcgagcgccgccgcaagcgcggccucuucggcgccaucgccggcuucaucgagggcggcuggcagggcauggucgacggcugguacggcuaccaccacuccaacgagcagggcuccggcuacgccgccgacaaggaguccacccagaaggccaucgacggcgucaccaacaaggucaacuccaucaucgacaagaugaacacccaguucgaggccgucggccgcgaguucaacaaccucgagcgccgcaucgagaaccucaacaagaagauggaggacggcuuccucgacgucuggaccuacaacgccgagcuccucguccucauggagaacgagcgcacccucgacuuccacgacuccaacgucaagaaccucuacgacaagguccgccuccagcuccgcgacaacgccaaggagcucggcaacggcugcuucgaguucuaccacaagugcgacaacgagugcauggaguccguccgcaacggcaccuacgacuacccccaguacuccgaggaggcccgccucaagcgcgaggagaucuccggcgucaagcucgaguccaucggcaccuaccagauccucuccaucuacuccaccgccgccuccucccucgcccucgccaucauggucgccggccucucccucuggaugugcuccaacggcucccuccagugccgcaucugcaucuga

SEQ ID NO: 108992 - RNA, 1704 nt, Artificial Sequence
  derived and/or modified CDS sequence (opt2) from hemagglutinin__InfluenzaA__AJK00239
auggagaagaucguccuccuccucgccaucgucucccucguccgcuccgaccagaucugcaucggcuaccacgccaacaacuccaccgagcaggucgacaccaucauggagaagaacgucaccgucacccacgcccaggacauccucgagaagacccacaacggcaagcucugcgaccucgacggcgucaagccccucauccuccgcgacugcuccgucgccggcuggcuccucggcaaccccaugugcgacgaguucaucaacguccccgagugguccuacaucgucgagaaggccaaccccgccaacgaccucugcuaccccggcaacuucaacgacuacgaggagcucaagcaccuccucucccgcaucaaccacuucgagaagauccagaucauccccaaguccuccugguccgaccacgaggccuccuccggcgucuccuccgccugccccuaccagggcacccccuccuucuuccgcaacgucgucuggcucaucaagaagaacaacaccuaccccaccaucaagcgcuccuacaacaacaccucccaggaggaccuccucguccucuggggcauccaccacuccaacgacgccaccgagcagaugaagcucuaccagaaccccaccaccuacgucuccgucggcaccuccacccucaaccagcgccucguccccaagaucgccacccgcuccaaggucaacggccaguccggccgcauggacuucuucuggaccauccucaaguccaacgacgccaucaacuucgaguccaacggcaacuucaucgcccccgaguacgccuacaagaucgucaagaagggcgacuccgccaucaugaaguccgaggucgaguacggcaacugcuccaccaagugccagacccccaucggcgccaucaacuccuccaugcccuuccacaacauccacccccucaccaucggcgagugccccaaguacgucaaguccaacaagcucguccucgccaccggccuccgcaacuccccccuccgcgagcgccgccgcaagcgcggccucuucggcgccaucgccggcuucaucgagggcggcuggcagggcauggucgacggcugguacggcuaccaccacuccaacgagcagggcuccggcuacgccgccgacaaggaguccacccagaaggccaucgacggcgucaccaacaaggucaacuccaucaucgacaagaugaacacccaguucgaggccgucggccgcgaguucaacaaccucgagcgccgcaucgagaaccucaacaagaagauggaggacggcuuccucgacgucuggaccuacaacgccgagcuccucguccucauggagaacgagcgcacccucgacuuccacgacuccaacgucaagaaccucuacgacaagguccgccuccagcuccgcgacaacgccaaggagcucggcaacggcugcuucgaguucuaccacaagugcgacaacgagugcauggaguccguccgcaacggcaccuacgacuacccccaguacuccgaggaggcccgccucaagcgcgaggagaucuccggcgucaagcucgaguccaucggcaccuaccagauccucuccaucuacuccaccgucgccuccucccucgcccucgccaucauggucgccggccucucccucuggaugugcuccaacggcucccuccagugccgcaucugcaucuga

SEQ ID NO: 108993 - RNA, 1704 nt, Artificial Sequence
  derived and/or modified CDS sequence (opt2) from hemagglutinin__InfluenzaA__AJS18468
auggagaagaucguccuccuccucgccgucgucucccucgucaaguccgaccagaucugcaucggcuaccacgccaacaacuccaccgagcaggucgacaccaucauggagaagaacgucaccgucacccacgcccaggacauccucgagaagacccacaacggccgccucugcgaccucaacggcgucaagccccucauccucaaggacugcuccgucgccggcuggcuccucggcaaccccaugugcgacgaguucauccgcguccccgagugguccuacaucgucgagcgcgccaaccccgccaacgaccucugcuaccccggcaaccucaacgacuacgaggagcucaagcaccuccucucccgcaucaaccacuucgagaagacccucaucauccccaaguccuccuggcccaaccacgagaccucccucggcgucuccgccgccugccccuaccagggcguccccuccuucuuccgcaacgucgucuggcucaccaagaagaacgacgccuaccccaccaucaagauguccuacaacaacaccaaccgcgaggaccuccucauccucuggggcauccaccacuccaacaacgccgccgagcagaccaaccucuacaagaaccccaccaccuacgucuccgucggcaccuccacccucaaccagcgccucguccccaagaucgccacccgcucccaggucaacggccagcgcggccgcauggacuucuucuggaccauccucaagcccaacgacgccauccacuucgaguccaacggcaacuucaucgcccccgaguacgccuacaagaucgucaagaagggcgacuccaccaucaugaaguccgagauggaguacggccacugcaacaccaagugccagacccccaucggcgccaucaacuccuccaugcccuuccacaacauccacccccucaccaucggcgagugccccaaguacgucaaguccaacaagcucguccucgccaccggccuccgcaacuccccccuccgcgagcgccgccgcaagcgcggccucuucggcgccaucgccggcuucaucgagggcggcuggcagggcauggucgacggcugguacggcuaccaccacuccaacgagcagggcuccggcuacgccgccgaccgcgaguccacccagaaggccaucgacggcgucaccaacaaggucaacuccaucaucgacaagaugaacacccaguucgaggccgucggccgcgaguucaacaaccucgagcgccgcaucgagaaccucaacaagaagauggaggacggcuuccucgacgucuggaccuacaacgccgagcuccucguccucauggagaacgagcgcacccucgacuuccacgacuccaacgucaagaaccucuacgacaagguccgccuccagcuccgcgacaacgccaaggagcucggcaacggcugcuucgaguucuaccacaagugcgacaacgagugcauggaguccguccgcaacggcaccuacgacuacccccaguacuccgaggaggcccgccucaagcgcgaggagaucuccggcgucaagcucgaguccaucggcaccuaccagauccucuccaucuacuccaccgucgccuccucccucacccucgccaucaucgucgccggccucucccucuggaugugcuccaacggcucccuccagugccgcaucugcaucuga

SEQ ID NO: 108994 - RNA, 1704 nt, Artificial Sequence
  derived and/or modified CDS sequence (opt2) from hemagglutinin__InfluenzaA__AJS18479
auggagaagaucguccuccuccucgccgucgucucccucgucaaguccgaccagaucugcaucggcuaccacgccaacaacuccaccgagcaggucgacaccaucauggagaagaacgucaccgucacccacgcccaggacauccucgagaagacccacaacggccgccucugcgaccucaacggcgucaagccccucauccucaaggacugcuccgucgccggcuggcuccucggcaaccccaugugcgacgaguucauccgcguccccgagugguccuacaucgucgagcgcgccaaccccgccaacgaccucugcuaccccggcaaccucaacgacuacgaggagcucaagcaccuccucucccgcaucaaccacuucgagaagacccucaucauccccaaguccuccuggcccaaccacgagaccucccucggcgucuccgccgccugccccuaccagggcaugcccuccuucuuccgcaacgucgucuggcucaccaagaagaacgacaccuaccccaccaucaagauguccuacaacaacaccaaccgcgaggaccuccucauccucuggggcauccaccacuccaacaacgccgccgagcagaccaaccucuacaagaaccccaccaccuacgucuccgucggcaccgccacccucaaccagcgccucguccccaagaucgccacccgcucccaggucaacggccagcgcggccgcauggacuucuucuggaccauccucaagcccaacgacgccauccacuucgaguccaacggcaacuucaucgcccccgaguacgccuacaagaucgucaagaagggcgacuccaccaucaugaaguccgagauggaguacggccacugcaacaccaagugccagacccccaucggcgccaucaacuccuccaugcccuuccacaacauccacccccucaccaucggcgagugccccaaguacgucaaguccaacaagcucguccucgccaccggccuccgcaacuccccccuccgcgagcgccgccgcaagcgcggccucuucggcgccaucgccggcuucaucgagggcggcuggcagggcauggucgacggcugguacggcuaccaccacuccaacgagcagggcuccggcuacgccgccgaccgcgaguccacccagaaggccaucgacggcgucaccaacaaggucaacuccaucaucgacaagaugaacacccaguucgaggccgucggccgcgaguucaacaaccucgagcgccgcaucgagaaccucaacaagaagauggaggacggcuuccucgacgucuggaccuacaacgccgagcuccucguccucauggagaacgagcgcacccucgacuuccacgacuccaacgucaagaaccucuacgacaagguccgccuccagcuccgcgacaacgccaaggagcucggcaacggcugcuucgaguucuaccacaagugcgacaacgagugcauggaguccguccgcaacggcaccuacgacuacccccaguacuccgaggaggcccgccucaagcgcgaggagaucuccggcgucaagcucgaguccaucggcaccuaccagauccucuccaucuacuccaccgucgccuccucccucgcccucgccaucaucgucgccggccucucccucuggaugugcuccaacggcucccuccagugccgcaucugcaucuga

SEQ ID NO: 108995 - RNA, 1704 nt, Artificial Sequence
  derived and/or modified CDS sequence (opt2) from hemagglutinin__InfluenzaA__AJY79339
auggagaagaucguccuccuccucgccaucgucuccaucgucaaguccgaccagaucugcaucggcuaccacgccaacaacuccaccgagcaggucgacaccaucauggagaagaacgucaccgucacccacgcccaggacauccucgagaagacccacaacggcaagcucugcaaccucgacggcgucaagccccucauccuccgcgacugcuccgucgccggcuggcuccucggcaaccccaugugcgacgaguuccucaacguccccgagugguccuacaucgucgagaagaucaaccccgccaacgaccucugcuaccccggcaaccucaacgacuacgaggagcucaagcaccuccucucccgcaucaaccacuucgagaagauccagaucauccccaaggacuccugguccgaccacgaggccuccggcgucuccuccgccugccccuaccagggccgcuccuccuucuuccgcaacgucgucuggcucaccaagaagaacgacgccuaccccaccaucaagaaguccuacaacaacaccaaccaggaggaccuccucguccucuggggcauccaccaccccaacgacgccgccgagcagacccgccucuaccagaaccccaccaccuacaucuccgucggcaccuccacccucaaccagcgccucguccccaagaucgccacccgcuccaaggucaacggccaguccggccgcauggaguucuucuggaccauccucaaguccaacgacgccaucaacuucgaguccaacggcaacuucaucgcccccgagaacgccuacaagaucgucaagaagggcgacuccaccaucaugaaguccgagcucgaguacuccaacugcaacaccaagugccagacccccaucggcgccaucaacuccuccaugcccuuccacaacauccacccccucaccaucggcgagugccccaaguacgucaaguccaaccgccucguccucgccaccggccuccgcaacuccccccagggcgagaagcgccgcaagaagcgcggccucuucggcgccaucgccggcuucaucgagggcggcuggcagggcauggucgacggcugguacggcuaccaccacuccaacgagcagggcuccggcuacgccgccgacaaggaguccacccagcgcgccaucgacggcgucaccaacaaggucaacuccaucaucgacaagaugaacacccaguucgaggccgucggccgcgaguucaacaaccucgagcgccgcaucgagaaccucaacaagaagauggaggacggcuuccucgacgucuggaccuacaacgccgagcuccucguccucauggagaacgagcgcacccucgacuuccacgacuccaacgucaagaaccucuacgacaagguccgccuccagcuccgcgacaacgccaaggagcucggcaacggcugcuucgaguucuaccaccgcugcgacaacgagugcauggaguccguccgcaacggcaccuacgacuacccccaguacuccgaggaggcccgccucaagcgcgaggagaucuccggcgucaagcucgaguccaucggcaccuaccagauccucuccaucuacuccaccgucgccuccucccucgcccucgccaucauggucgccggccucucccucuggaugugcuccaacggcucccuccagugccgcaucugcaucuga

SEQ ID NO: 108996 - RNA, 1704 nt, Artificial Sequence
  derived and/or modified CDS sequence (opt2) from hemagglutinin__InfluenzaA__AJY79341
auggagaagaucguccuccuccucgccaucgucuccaucgucaaguccgaccagaucugcaucggcuaccacgccaacaacuccaccgagcaggucgacaccaucauggagaagaacgucaccgucacccacgcccaggacauccucgagaagacccacaacggcaagcucugcaaccucgacggcgucaagccccucauccuccgcgacugcuccgucgccggcuggcuccucggcaaccccaugugcgacgaguuccucaacguccccgagugguccuacaucgucgagaagaucaaccccgccaacgaccucugcuaccccggcaacuucaacgacuacgaggagcucaagcaccuccucucccgcaucaaccacuucgagaagauccagaucauccccaaggacuccugguccgaccacgagaccuccggcgucuccuccgccugccccuaccagggccgcuccuccuucuuccgcaacgucgucuggcucaccaagaagaacgacgccuaccccaccaucaagaaguccuacaacaacaccaaccaggaggaccuccucguccucuggggcauccaccaccccaacgacgccgccgagcagacccgccucuaccagaaccccaccaccuacaucuccgucggcaccuccacccucaaccagcgccucguccccaagaucgccacccgcuccaaggucaacggccagaacggccgcauggaguucuucuggaccauccucaaguccaacgacgccaucaacuucgaguccaacggcaacuucaucgcccccgagaacgccuacaagaucgucaagaagggcgacuccaccaucaugcgcuccgagcucgaguacuccaacugcaacaccaagugccagacccccaucggcgccaucaacuccuccaugcccuuccacaacauccacccccucaccaucggcgagugccccaaguacgucaaguccaaccgccucguccucgccaccggccuccgcaacuccccccagggcgagaagcgccgcaagaagcgcggccucuucggcgccaucgccggcuucaucgagggcggcuggcagggcauggucgacggcugguacggcuaccaccacuccaacgagcagggcuccggcuacgccgccgacaaggaguccacccagcgcgccaucgacggcgucaccaacaaggucaacuccaucaucgacaagaugaacacccaguucgaggccgucggccgcgaguucaacaaccucgagcgccgcaucgagaaccucaacaagaagauggaggacggcuuccucgacgucuggaccuacaacgccgagcuccucguccucauggagaacgagcgcacccucgacuuccacgacuccaacgucaagaaccucuacgacaagguccgccuccagcuccgcgacaacgccaaggagcucggcaacggcugcuucgaguucuaccaccgcugcgacaacgagugcauggaguccguccgcaacggcaccuacgacuacccccaguacuccgaggaggcccgccucaagcgcgaggagaucuccggcgucaagcucgaguccaucggcaccuaccagauccucuccaucuacuccaccgucgccuccucccucgcccucgccaucauggucgccggccucucccucuggaugugcuccaacggcucccuccagugccgcaucugcaucuga

SEQ ID NO: 108997 - RNA, 1704 nt, Artificial Sequence
  derived and/or modified CDS sequence (opt2) from hemagglutinin__InfluenzaA__AJY79342
auggagaagaucguccuccuccucgccaucgucuccaucgucaaguccgaccagaucugcaucggcuaccacgccaacaacuccaccgagcaggucgacaccaucauggagaagaacgucaccgucacccacgcccaggacauccucgagaagacccacaacggcaagcucugcaaccucgacggcgucaagccccucauccuccgcgacugcuccgucgccggcuggcuccucggcaaccccaugugcgacgaguuccucaacguccccgagugguccuacaucgucgagaagaucaaccccgccaacgaccucugcuaccccggcaacuucaacgacuacgaggagcucaagcaccuccucucccgcaucaaccacuucgagaagauccagaucauccccaaggacuccugguccgaccacgaggccuccggcgucuccuccgccugccccuaccagggccgcuccuccuucuuccgcaacgucgucuggcucaccaagaagaacgacgccuaccccaccaucaagaaguccuacaacaacaccaaccaggaggaccuccucguccucuggggcauccaccaccccaacgacgccgccgagcagacccgccucuaccagaaccccaccaccuacaucuccgucggcaccuccacccucaaccagcgccucguccccaagaucgccacccgcuccaaggucaacggccaguccggccgcauggaguucuucuggaccauccucaaguccaacgacgccaucaacuucgaguccaacggcaacuucaucgcccccgagaacgccuacaagaucgucaagaagggcgacuccaccaucaugaaguccgagcucgaguacuccaacugcaacaccaagugccagacccccaucggcgccaucaacuccuccaugcccuuccacaacauccacccccucaccaucggcgagugccccaaguacgucaaguccaaccgccucguccucgccaccggccuccgcaacuccccccagggcgagaagcgccgcaagaagcgcggccucuucggcgccaucgccggcuucaucgagggcggcuggcagggcauggucgacggcugguacggcuaccaccacuccaacgagcagggcuccggcuacgccgccgacaaggaguccacccagcgcgccaucgacggcgucaccaacaaggucaacuccaucaucgacaagaugaacacccaguucgaggccgucggccgcgaguucaacaaccucgagcgccgcaucgagaaccucaacaagaagauggaggacggcuuccucgacgucuggaccuacaacgccgagcuccucguccucauggagaacgagcgcacccucgacuuccacgacuccaacgucaagaaccucuacgacaagguccgccuccagcuccgcgacaacgccaaggagcucggcaacggcugcuucgaguucuaccaccgcugcgacaacgagugcauggaguccguccgcaacggcaccuacgacuacccccaguacuccgaggaggcccgccucaagcgcgaggagaucuccggcgucaagcucgaguccaucggcaccuaccagauccucuccaucuacuccaccgucgccuccucccucgcccucgccaucauggucgccggccucucccucuggaugugcuccaacggcucccuccagugccgcaucugcaucuga

SEQ ID NO: 108998 - RNA, 1704 nt, Artificial Sequence
  derived and/or modified CDS sequence (opt2) from hemagglutinin__InfluenzaA__AJY79343
auggagaagaucguccuccuccucgccaucgucuccaucgucaaguccgaccagaucugcaucggcuaccacgccaacaacuccaccgagcaggucgacaccaucauggagaagaacgucaccgucacccacgcccaggacauccucgagaagacccacaacggcaagcucugcaaccucgacggcgucaagccccucauccuccgcgacugcuccgucgccggcuggcuccucggcaaccccaugugcgacgaguuccucaacguccccgagugguccuacaucgucgagaagaucaaccccgccaacgaccucugcuaccccggcaacuucaacgacuacgaggagcucaagcaccuccucucccgcaucaaccacuucgagaagauccagaucauccccaaggacuccugguccgaccacgaggccuccggcgucuccuccgccugccccuaccagggccgcuccuccuucuuccgcaacgucgucuggcucaccaagaagaacgacgccuaccccaccaucaagaaguccuacaacaacaccaaccaggaggaccuccucguccucuggggcauccaccaccccaacgacgccgccgagcagacccgccucuaccagaaccccaccaccuacaucuccgucggcaccuccacccucaaccagcgccucguccccaagaucgccacccgcuccaaggucaacggccaguccggccgcauggaguucuucuggaccauccucaaguccaacgacgccaucaacuucgaguccaacggcaacuucaucgcccccgagaacgccuacaagaucgucaagaagggcgacuccaccaucaugaaguccgagcucgaguacuccaacugcaacaccaagugccagacccccaucggcgccaucaacuccuccaugcccuuccacaacauccacccccucaccaucggcgagugccccaaguacgucaaguccaaccgccucguccucgccaccggccuccgcaacuccccccagggcgagaagcgccgcaagaagcgcggccucuucggcgccaucgccggcuucaucgagggcggcuggcagggcauggucgacggcugguacggcuaccaccacuccaacgagcagggcuccggcuacgccgccgacaaggaguccacccagcgcgccaucgacggcgucaccaacaaggucaacuccaucaucgacaagaugaacacccaguucgaggccgucggccgcgaguucaacaaccucgagcgccgcaucgagaaccucaacaagaagauggaggacggcuuccucgacgucuggaccuacaacgccgagcuccucguccucauggagaacgagcgcacccucgacuuccacgacuccaacgucaagaaccucuacgacaagguccgccuccagcuccgcgacaacgccaaggagcucggcaacggcugcuucgaguucuaccaccgcugcgacgacgagugcauggaguccguccgcaacggcaccuacgacuacccccaguacuccgaggaggcccgccucaagcgcgaggagaucuccggcgucaagcucgaguccaucggcaccuaccagauccucuccaucuacuccaccgucgccuccucccucgcccucgccaucauggucgccggccucucccucuggaugugcuccaacggcucccuccagugccgcaucugcaucuga

SEQ ID NO: 108999 - RNA, 1704 nt, Artificial Sequence
  derived and/or modified CDS sequence (opt2) from hemagglutinin__InfluenzaA__AJY79345
auggagaagaucguccuccuccucgccaucgucuccaucgucaaguccgaccagaucugcaucggcuaccacgccaacaacuccaccgagcaggucgacaccaucauggagaagaacgucaccgucacccgcgcccaggacauccucgagaagacccacaacggcaagcucugcaaccucgacggcgucaagccccucauccuccgcgacugcuccgucgccggcuggcuccucggcaaccccaugugcgacgaguuccucaacguccccgagugguccuacaucgucgagaagaucaaccccgccaacgaccucugcuaccccggcaacuucaacgacuacgaggagcucaagcaccuccucucccgcaucaaccacuucgagaagauccagaucauccccaaggacuccugguccgaccacgaggccuccggcgucuccuccgccugccccuaccagggccgcuccuccuucuuccgcaacgucgucuggcucaccaagaagaacgacgccuaccccaccaucaagaaguccuacaacaacaccaaccaggaggaccuccucguccucuggggcauccaccaccccaacgacgccgccgagcagacccgccucuaccagaaccccaccaccuacaucuccgucggcaccuccacccucaaccagcgccucguccccaagaucgccacccgcuccaaggucaacggccaguccggccgcauggaguucuucuggaccauccucaaguccaacgacgccaucaacuucgaguccaacggcaacuucaucgcccccgagaacgccuacaagaucgucaagaagggcgacuccaccaucaugaaguccgagcucgaguacuccaacugcaacaccaagugccagacccccaucggcgccaucaacuccuccaugcccuuccacaacauccacccccucaccaucggcgagugccccaaguacgucaaguccaaccgccucguccucgccaccggccuccgcaacuccccccagggcgagaagcgccgcaagaagcgcggccucuucggcgccaucgccggcuucaucgagggcggcuggcagggcauggucgacggcugguacggcuaccaccacuccaacgagcagggcuccggcuacgccgccgacaaggaguccacccagcgcgccaucgacggcgucaccaacaaggucaacuccaucaucgacaagaugaacacccaguucgaggccgucggccgcgaguucaacaaccucgagcgccgcaucgagaaccucaacaagaagauggaggacggcuuccucgacgucuggaccuacaacgccgagcuccucguccucauggagaacgagcgcacccucgacuuccacgacuccaacgucaagaaccucuacgacaagguccgccuccagcuccgcgacaacgccaaggagcucggcaacggcugcuucgaguucuaccaccgcugcgacaacgagugcauggaguccguccgcaacggcaccuacgacuacccccaguacuccgaggaggcccgccucaagcgcgaggagaucuccggcgucaagcucgaguccaucggcaccuaccagauccucuccaucuacuccaccgucgccuccucccucgcccucgccaucauggucgccggccucucccucuggaugugcuccaacggcucccuccagugccgcaucugcaucuga

SEQ ID NO: 109000 - RNA, 1701 nt, Artificial Sequence; identical to SEQ ID NO: 108477
  derived and/or modified CDS sequence (opt2) from hemagglutinin__InfluenzaA__AKA54643

SEQ ID NO: 109001 - RNA, 1701 nt, Artificial Sequence
  derived and/or modified CDS sequence (opt2) from hemagglutinin__InfluenzaA__AKA54650
augaagaccaucaucgcccucuccuacauccucugccucgucuucacccagaagauccccggcaacgacaacuccaccgccacccucugccucggccaccacgccguccccaacggcaccaucgucaagaccaucaccaacgaccgcaucgaggucaccaacgccaccgagcucguccagaacuccuccaucggcgagaucugcgacuccccccaccagauccucgacggcgagaacugcacccucaucgacgcccuccucggcgacccccagugcgacggcuuccagaacaagaagugggaccucuucgucgagcgcuccaaggccuacuccaacugcuaccccuacgacguccccgacuacgccucccuccgcucccucgucgccuccuccggcacccucgaguucaacaacgaguccuucaacuggaccggcgucacccagaacggcaccuccuccgccugcauccgccgcuccuccuccuccuucuucucccgccucaacuggcucacccaccucaacuacaaguaccccgcccucaacgucaccaugcccaacaacgagcaguucgacaagcucuacaucuggggcguccaccaccccggcaccgacaaggaccagaucuuccucuacgcccaguccuccggccgcaucaccgucuccaccaagcgcucccagcaggccgucauccccaacaucggcucccgcccccgcauccgcgacauccccucccgcaucuccaucuacuggaccaucgucaagcccggcgacauccuccucaucaacuccaccggcaaccucaucgccccccgcggcuacuucaagauccgcuccggcaaguccuccaucaugcgcuccgacgcccccaucggcaagugcaaguccgagugcaucacccccaacggcuccauccccaacgacaagcccuuccagaacgucaaccgcaucaccuacggcgccugcccccgcuacgucaagcacuccacccucaagcucgccaccggcaugcgcaacguccccgagaagcagacccgcggcaucuucggcgccaucgccggcuucaucgagaacggcugggagggcauggucgacggcugguacggcuuccgccaccagaacuccgagggccgcggccaggccgccgaccucaaguccacccaggccgccaucgaccagaucaacggcaagcucaaccgccucaucggcaagaccaacgagaaguuccaccagaucgagaaggaguucuccgaggucgagggccgcauccaggaccucgagaaguacgucgaggacaccaagaucgaccucugguccuacaacgccgagcuccucgucgcccucgagaaccagcacaccaucgaccucaccgacuccgagaugaacaagcucuucgagaagaccaagaagcagcuccgcgagaacgccgaggacaugggcaacggcugcuucaagaucuaccacaagugcgacaacgccugcaucggcuccauccgcaacggcaccuacgaccacaacgucuaccgcgacgaggcccucaacaaccgcuuccagaucaagggcgucgagcucaaguccggcuacaaggacuggauccucuggaucuccuucgccaucuccugcuuccuccucugcgucgcccuccucggcuucaucaugugggccugccagaagggcaacauccgcugcaacaucugcaucuga

SEQ ID NO: 109002 - RNA, 1701 nt, Artificial Sequence
  derived and/or modified CDS sequence (opt2) from hemagglutinin__InfluenzaA__AKA54651
augaagaccaucaucgccuucuccugcauccucugccagaucuccgcccagaagcuccccggcuccgacaacuccauggccacccucugccucggccaccacgccguccccaacggcacccucgucaagaccaucaccgacgaccagaucgaggucaccaacgccaccgagcucguccaguccaccuccaagggcgagaucugcuccuccccccaccagauccucgacggcaagaacugcacccucaucgacgcccuccucggcgacccccacugcgacgacuuccagaacaagaagugggaccucuucgucgagcgcuccaccgccuacuccaacugcuaccccuacuacguccccgacuacgccucccuccgcucccucgucgccuccuccggcacccucgaguucacccaggaguccuucaacuggaccggcgucgcccaggacggcgccuccuacuccugccgccgcgaguccgagaacuccuucuucucccgccucaacuggcucuacucccucaacuacaaguaccccgcccucaacgucaccaugcccaacaacgacaaguucgacaagcucuacaucuggggcguccaccaccccggcaccgacaaggaccagaccucccucuacauccaggccuccggccgcgucaccgucuccaccaaguggucccagcagaccgucauccccaacaucggcucccgccccuggauccgcggcgucuccuccaucaucuccaucuacuggaccaucgucaagcccggcgacauccuccucaucaacuccaccggcaaccucaucgccccccgcggcuacuucaagauccaguccggcaaguccuccaucaugcgcuccgacgcccacaucggcaacugcaacuccgagugcaucacccccaacggcuccauccccaacgacaagcccuuccagaacgucaaccgcaucaccuacggcgccugcccccgcuacgucaagcagaacacccucaagcucgccaccggcaugcgcaacguccccgagaagcagacccgcggcaucuucggcgccaucgccggcuucaucgagaacggcugggagggcauggucgacggcugguacggcuuccgccaccagaacuccgagggcaccggccaggccgccgaccucaaguccacccaggccgccaucaaccagaucaccggcaagcucaaccgcgucaucaagaagaccaacgagaaguuccaccagaucgagaaggaguucuccgaggucgagggccgcauccaggaccucgagcgcuacgucgaggacaccaagaucgaccucugguccuacaacgccgagcuccucgucgcccucgagaaccagcacaccaucgaccucaccgacuccgagaugaacaagcucuucgagcgcacccgcaagcagcuccgcgagaacgccgaggacaugggcaacggcugcuucaagaucuaccacaagugcgacaacgccugcaucggcuccauccgcaacggcaccuacgaccacgacgucuaccgcgacgaggccgucaacaaccgcuuccagaucaagggcguccagcucaagcucggcuacaaggacuggauccucuggaucuccuucgccaucuccugcuuccuccucugcgccguccuccucggcuucaucaugugggccugccagaagggcaacauccgcugcaacaucugcaucuga

SEQ ID NO: 109003 - RNA, 1701 nt, Artificial Sequence
  derived and/or modified CDS sequence (opt2) from hemagglutinin__InfluenzaA__AKA59351
augaaggccauccucgucauccuccucuacaccuucgccgccgccaacgccgacaccaucugcaucggcuaccacgccaacaacuccaccgacaccgucgacaccguccucgagaagaacgucaccgucacccacuccgucgaccuccucgaggacaagcacaacggccgccucugcaagcuccgcggcgucgccccccuccaccucggcaagugcaacaucgccggcuggauccucggcaaccccgagugcgagucccucuccaccgccuccuccugguccuacaucgucgagaccuccuccuccgacaacggcaccugcuaccccggcgacuucaucgacuacgaggagcuccgcgagcagcucuccuccgucuccuccuucgagcgcuucgagaucuuccccaagaccuccuccuggcccaaccacgaguccaacaagggcgucaccgccgccugcccccaggccggcgccaaguccuucuacaagaaccucaucuggcucgucaagaaggagaacuccuaccccaagcucuccaaguccuacaucaacgacaagggcaaggagguccucguccucuggggcauccaccaccccuccaccuccgccgaccagcagucccucuaccagaacgccgacgccuacgucuucgucggcaccucccgcuacuccaagaaguucaagcccgagaucgccauccgccccaagguccgcgaccaggagggccgcaugaacuacuacuggacccucgucgagcccggcgacaagaucaccuucgaggccaccggcaaccucgucgucccccgcuacgccuucgccauggagcgcaacgccggcuccggcaucaucaucuccgacacccccguccacgacugcaacaccaccugccagacccccaagggcgccaucaacaccucccuccccuuccagaacauccaccccaucaccaucggcaagugccccaaguacgucaaguccaccaagcuccgccucgccaccggccuccgcaacguccccuccauccagucccgcggccucuucggcgccaucgccggcuucaucgagggcggcuggaccggcauggucgacggcugguacggcuaccaccaccagaacgagcagggcuccggcuacgccgccgaccucaaguccacccagaacgccaucgacgagaucaccaacaaggucaacuccgucaucgagaagaugaacacccaguucaccgccgucggcaaggaguucaaccaccucgagaagcgcaucgagaaccucaacaagaaggucgacgacggcuuccucgacaucuggaccuacaacgccgagcuccucguccuccucgagaacgagcgcacccucgacuaccacgacuccaacgucaagaaccucuacgagaagguccgcucccagcucaagaacaacgccaaggagaucggcaacggcugcuucgaguucuaccacaagugcgacaacaccugcauggaguccgucaagaacggcaccuacgacuaccccaaguacuccgaggaggccaagcucaaccgcgaggagaucgacggcgucaagcucgaguccacccgcaucuaccagauccucgccaucuacuccaccgucgccuccucccucguccucgucgucucccucggcgccaucuccuucuggaugugcuccaacggcucccuccagugccgcaucugcaucuga

SEQ ID NO: 109004 - RNA, 1701 nt, Artificial Sequence
  derived and/or modified CDS sequence (opt2) from hemagglutinin__InfluenzaA__AKA59353
augaaggccauccucgucguccuccucuacaccuucgccaccgccaacgccgacacccucugcaucggcuaccacgccaacaacuccaccgacaccgucgacaccguccucgagaagaacgucaccgucacccacuccgucaaccuccucgaggacaagcacaacggcaagcucugcaagcuccgcggcgucgccccccuccaccucggcgagugcaacaucgccggcuggauccucggcaaccccgagugcgagucccucuccaccgccuccuccugguccuacaucgucgagacccccuccuccaacaacggcaccugcuaccccggcgacuucaucgacuacgaggagcuccgcgagcagcucuccuccgucuccuccuucgagcgcuucgagaucuuccccaacaccuccuccuggcccaaccacgacuccuccaagggcgucaccgccgccugcccccacgccggcgccaaguccuucuacaagaaccucaucuggcucgucaagaagggcaacuccuaccccaagcucuccaaguccuacaucaacgacaagggcaaggagguccucguccucuggggcauccaccaccccuccaccuccgccgaccagcagaagcucuaccagaacgaggacgccuacgucuucgucggcaccucccgcuacuccaagaaguucaagcccgagaucgccauccgccccaagguccgcgaccaggagggccgcaugaacuacuacuggacccucgucgagcccggcgacaagaucaccuucgaggccaccggcaacaucgucgucccccgcuacgccuucgccauggagcgcaacgccggcuccggcaucaucaucuccgacacccccguccacaacugcaacaccaccugccagacccccaagggcgccaucaacaccucccuccccuuccagaacguccaccccaucaccaucggcaagugccccaaguacgucaaguccaccaagcuccgccucgccaccggccuccgcaacguccccuccauccagucccgcggccucuucggcgccaucgccggcuucaucgagggcggcuggaccggcauggucgacggcugguacggcuaccaccaccagaacgagcagggcuccggcuucgccgccgaccucaaguccacccagaacgccaucgacggcaucaccaacaaggucaacuccgucaucgagaagaugaacacccaguucaccgccgucggcaaggaguucaaccaccucgagaagcgcaucgagaaccucaaccgcaagaucgacgacggcuuccucgacaucuggaccuacaacgccgagcuccucauccuccucgagaacgagcgcacccucgacuaccacgacuccaacguccgcaaccucuacgagaagguccgcucccagcucaagaacaacgccaaggagaucggcaacggcugcuucgaguucuaccacaagugcgacaacaccugcauggaguccgucaagaacggcaccuacgacuaccccaaguacuccgaggaggccaagcucaaccgcgaggagaucgacggcgucaagcucgaguccacccgcaucuaccagauccucgccaucuacuccaccgucgccuccucccucguccucaucgucucccucggcgccaucuccuucuggaugugcuccaacggcucccuccagugccgcaucugcaucuga

SEQ ID NO: 109005 - RNA, 1701 nt, Artificial Sequence
  derived and/or modified CDS sequence (opt2) from hemagglutinin__InfluenzaA__AKA59355
augaaggccauccucgucguccuccucuacaccuucgccaccgccaacgccgacacccucugcaucggcuaccacgccaacaacuccaccgacaccgucgacaccguccucgagaagaacgucaccgucacccacuccgucaaccuccucgaggacaagcacaacggcaagcucugcaagcuccgcggcgucgccccccuccaccucggcaagugcaacaucgccggcuggauccucggcaaccccgagugcgagucccucuccaccgccuccuccugguccuacaucgucgagaccuccuccuccgacaacggcaccugcuaccccggcgacuucaucgacuacgaggagcuccgcgagcagcucuccuccgucuccuccuucgagcgcuucgagaucuuccccaagaccuccuccuggcccaaccacgacuccaacaagggcgucaccgccgccugcccccacgccggcgcccgcuccuucuacaagaaccucaucuggcucgucaagaagggcaacuccuaccccaagcucaaccaguccuacaucaacgacaagggcaaggagguccucguccucuggggcauccaccacccccccaccuccgccgaccagcagucccucuaccagaacgccgacgccuacgucuucgucggcaccucccgcuacuccaagaaguucaagcccgagaucgccauccgccccaagguccgcgaccaggagggccgcaugaacuacuacuggacccucgucgagcccggcgacaagaucaccuucgaggccaccggcaaccucgucgucccccgcuacgccuucgccauggagcgcaacgccggcuccggcaucaucaucuccgacacccccguccacgacugcaacaccaccugccagacccccaagggcgccaucaacaccucccuccccuuccagaacauccaccccaucaccaucggcaagugccccaaguacgucaaguccaccaagcuccgccucgccaccggccuccgcaacguccccuccauccagucccgcggccucuucggcgccaucgccggcuucaucgagggcggcuggaccggcauggucgacggcugguacggcuaccaccaccagaacgagcagggcuccggcuacgccgccgaccucaaguccacccagaacgccaucgacgagaucaccaacaaggucaaccucgucaucgagaagaugaacacccaguucaccgccgucggcaaggaguucucccaccucgagaagcgcaucgagaaccucaacaagaaggucgacgacggcuuccucgacaucuggaccuacaacgccgagcuccucguccuccucgagaacgagcgcacccucgacuaccacgacuccaacgucaagaaccucuacgagaagauccgcucccagcucaagaacaacgccaaggagaucggcaacggcugcuucgaguucuaccacaagugcgacaacaccugcauggaguccgucaagaacggcaccuacgacuaccccaaguacuccgaggaggccaagcucaaccgcgaggagaucgacggcgucaagcucgaguccacccgcgucuaccagauccucgccaucuacuccaccgucgccuccucccucguccucgucgucucccucggcgccaucuccuucuggaugugcuccaacggcucccuccagugccgcaucugcaucuga

SEQ ID NO: 109006 - RNA, 1701 nt, Artificial Sequence
  derived and/or modified CDS sequence (opt2) from hemagglutinin__InfluenzaA__AKE37137
augaaggcccgccucgucguccuccucuacaccuucgccaccgccaacgccgacacccucugcaucggcuaccacgccaacaacuccaccgacaccgucgacaccguccucgagaagaacgucaccgucacccacuccgucaaccuccucgaggacaagcacaacggcaagcucugcaagcuccgcggcgucgccccccuccaccucggcaagugcaacaucgccggcuggauccucggcaaccccgagugcgagucccucuccaccgccuccuccugguccuacaucgucgagaccuccuccuccgacaacggcaccugcuaccccggcgacuucaucgacuacgaggagcuccgcgagcagcucuccuccgucuccuccuucgagcgcuucgagaucuuccccaagaccuccuccuggcccaaccacgaccccaacaagggcgucaccgccgccugcccccacgccggcgccaaguccuucuacaagaaccucaucuggcucgucaagaagggcaacuccuaccccaagcucuccaccuccuacaucaacgacaagggcaaggagguccucguccucuggggcauccaccaccccuccaccuccgccgaccagcagucccucuaccagaacgccgacgccuacgccuucgucggcaccucccgcuacuccaagaaguucaagcccgagaucgccauccgccccaagguccgcgaccgcgagggccgcaugaacuacuacuggacccucgucgagcccggcgacaagaucaccuucgaggccaccggcaaccucgucgucccccgcuacgccuucgccauggagcgcaacgccggcuccggcaucaucaucuccgacaccuccguccacgacugcaacaccaccugccagacccccaagggcgccaucaacaccucccuccccuuccagaacguccaccccaucaccaucggcaagugccccaaguacgucaaguccaccaagcuccgccucgccaccggccuccgcaacguccccuccauccagucccgcggccucuucggcgccaucgccggcuucaucgagggcggcuggaccggcauggucgacggcugguacggcuaccaccaccagaacgagcagggcuccggcuacgccgccgaccucaaguccacccagaacgccuucgacgagaucaccaacaaggucaacuccgucaucgagaagaugaacacccaguucaccgccgucggcaaggaguucaaccaccucgagaagcgcaucgagaaccucaacaagaaggucgacgacggcuuccucgacaucuggaccuacaacgccgagcuccucguccuccucgagaacgagcgcacccucgacuaccacgacuccaacgucaagaaccucuacgagaagguccgcucccagcucaagaacaacgccaaggagaucggcaacggcugcuucgaguucuaccacaagugcgacaacaccugcauggaguccgucaagaacggcaccuacgacuaccccaaguacuccgaggaggccaagcucaaccgcgaggagaucgacggcgucaagcucgaguccacccgcaucuaccagauccucgccaucuacuccaccgucgccuccucccucguccucgucgucucccucggcgccaucuccuucuggaugugcuccaacggcucccuccagugccgcaucugcaucuga

SEQ ID NO: 109007 - RNA, 1701 nt, Artificial Sequence
  derived and/or modified CDS sequence (opt2) from hemagglutinin__InfluenzaA__AKS48035
auggagaagaugguccuccuccucgccgucgucucccucgucaaguccgaccagaucugcaucggcuaccacgccaacaacuccaccgagcaggucgacaccaucauggagaagaacgucaccgucacccacgcccaggacauccucgagaagacccacaacggccgccucugcgaccucaacggcgucaagccccucauccucaaggacugcuccgucgccggcuggcuccucggcaaccccaugugcgacgaguucauccgcguccccgagugguccuacaucgucgagcgcgccaaccccgccaacgaccucugcuaccccggcaaccucaacgacuacgaggagcucaagcaccuccucucccgcaucaaccacuucgagaagacccucaucauccccaaguccuccuggcccaaccacaccuccuccggcgucuccgccgccugccccuaccagggcaugcccuccuucuuccgcaacgucgucuggcucaccaagaagaacgacgccuaccccaccaucaagauguccuacaacaacaccuaccgcgaggaccuccucauccucuggggcauccaccacuccaacaacgccgccgagcagaccaaccucuacaagaaccccaccaccuacgucuccgucggcaccuccacccucaaccagcgccucgagcccaagaucgccacccgcucccaggucaacggccagcgcggccgcauggacuucuucuggaccauccucaagcccaacgacgccauccacuucgaguccaacggcaacuucaucgcccccgaguacgccuacaagaucgucaagaagggcgacuccaccaucaugaaguccgagauggaguacggccacugcaacaccaagugccagacccccaucggcgccaucaacuccuccaugcccuuccacaacauccacccccucaccaucggcgagugccccaaguacgucaaguccaacaagcucguccucgccaccggccuccgcaacuccccccuccgcgagcgccgccgcaagcgcggccucuucggcgccaucgccggcuucaucgagggcggcuggcagggcauggucgacggcugguacggcuaccaccacuccaacgagcagggcuccggcuacgccgccgaccgcgaguccacccagaaggccaucgacggcgucaccaacaaggucaacuccaucaucgacaagaugaacacccaguucgaggccgucggccgcgaguucaacaaccucgagcgccgcaucgagaaccucaacaagaagauggaggacggcuuccucgacgucuggaccuacaacgccgagcuccucguccucauggagaacgagcgcacccucgacuuccacgacuccaacgucaagaaccucuacgacaagguccgccuccagcuccgcgacaacgccaaggagcucggcaacggcugcuucgaguucuaccacaagugcgacaacgagugcauggaguccguccgcaacggcaccuacgacuacccccaguacuccgaggaggcccgccucaagcgcgaggagaucuccggcgucaagcucgaguccaucggcaccuaccagauccucuccaucuacuccaccgucgccuccucccucgcccucgccaucaucgucgccggccucucccucuggaugugcuccaacggcucccuccagugccgcaucugcaucuga

SEQ ID NO: 109008 - RNA, 1701 nt, Artificial Sequence
  derived and/or modified CDS sequence (opt2) from hemagglutinin__InfluenzaA__ALA08472
augaagaccaucaucgcccucuccuacauccucugccucgucuucgcccagaagauccccggcaacgacaacuccaccgccacccucugccucggccaccacgccguccccaacggcaccaucgucaagaccaucaccaacgaccgcaucgaggucaccaacgccaccgagcucguccagaacuccuccaucggcgagaucugcgacuccccccaccagauccucgacggcgagaacugcacccucaucgacgcccuccucggcgacccccagugcgacggcuuccagaacaagaagugggaccucuucgucgagcgcuccaaggccuacuccaacugcuaccccuacgacguccccgacuacgccucccuccgcucccucgucgccuccuccggcacccucgaguucaacaacgaguccuucaacuggaccggcgucacccagaacggcaccuccuccgccugcauccgccgcuccuccuccuccuucuucucccgccucaacuggcucacccaccucaacuacaccuaccccgcccucaacgucaccaugcccaacaacgagcaguucgacaagcucuacgucuggggcguccaccaccccggcaccgacaaggaccagaucuuccucuacgcccaguccuccggccgcaucaccgucuccaccaagcgcucccagcaggccgucauccccaacaucggcucccgcccccgcauccgcgacauccccucccgcaucuccaucuacuggaccaucgucaagcccggcgacauccuccucaucaacuccaccggcaaccucaucgccccccgcggcuacuucaagauccgcuccggcaaguccuccaucaugcgcuccgacgcccccaucggcaagugcaaguccgagugcaucacccccaacggcuccauccccaacgacaagcccuuccagaacgucaaccgcaucaccuacggcgccugcccccgcuacgucaagcacuccacccucaagcucgccaccggcaugcgcaacguccccgagaagcagacccgcggcaucuucggcgccaucgccggcuucaucgagaacggcugggagggcauggucgacggcugguacggcuuccgccaccagaacuccgagggccgcggccaggccgccgaccucaaguccacccaggccgccaucgaccagaucaacggcaagcucaaccgccucaucggcaagaccaacgagaaguuccaccagaucgagaaggaguucuccgaggucgagggccgcauccaggaccucgagaaguacgucgaggacaccaagaucgaccucugguccuacaacgccgagcuccucgucgcccucgagaaccagcacaccaucgaccucaccgacuccgagaugaacaagcucuucgagaagaccaagaagcagcuccgcgagaacgccgaggacaugggcaacggcugcuucaagaucuaccacaagugcgacaacgccugcaucggcuccauccgcaacggcaccuacgaccacaacgucuaccgcgacgaggcccucaacaaccgcuuccagaucaagggcgucgagcucaaguccggcuacaaggacuggauccucuggaucuccuucgccaucuccugcuuccuccucugcgucgcccuccucggcuucaucaugugggccugccagaagggcaacauccgcugcaacaucugcaucuga

SEQ ID NO: 109009 - RNA, 1701 nt, Artificial Sequence; identical to SEQ ID NO: 108477
  derived and/or modified CDS sequence (opt2) from hemagglutinin__InfluenzaA__ALA08475

SEQ ID NO: 109010 - RNA, 1701 nt, Artificial Sequence
  derived and/or modified CDS sequence (opt2) from hemagglutinin__InfluenzaA__ALA08478
augaagaccaucaucgcccucuccuacauccucugccucgucuucgcccagaagcuccccggcaacgacaacuccaccgccacccucugccucggccaccacgccguccccaacggcaccaucgucaagaccaucaccaacgaccgcaucgaggucaccaacgccaccgagcucguccagaacuccuccaucggcgagaucugcgacuccccccaccagauccucgacggcaagaacugcacccucaucgacgcccuccucggcgacccccagugcgacggcuuccagaacaagcgcugggaccucuucgucgagcgcuccaaggccuacuccaacugcuaccccuacgacguccccgacuacgccucccuccgcucccucgucgccuccuccggcacccucgaguucaacgacgaguccuucaacugggccggcgucacccagaacggcaccuccuccgccugcauccgcggcuccaacuccuccuucuucucccgccucaacuggcucacccacuccaacuucaaguaccccgcccucaacgucaccaugcccaacaacgagcaguucgacaagcucuacaucuggggcguccaccaccccggcaccgacaaggaccagaucuuccucuacgcccaguccuccggccgcaucaccgucuccaccaagcgcucccagcaggccgucauccccaacaucggcucccgcccccgcauccgcaacauccccucccgcaucuccaucuacuggaccaucgucaagcccggcgacauccuccucaucaacuccaccggcaaccucaucgccccccgcggcuacuucaagauccaguccggcaaguccuccaucaugcgcuccgacgcccccaucggcaagugcaaguccgagugcaucacccccaacggcuccauccccaacgacaagcccuuccagaacgucaaccgcaucaccuacggcgccugcccccgcuacgucaagcaguccacccucaagcucgccaccggcaugcgcaacguccccgagaagcagacccgcggcaucuucggcgccaucgccggcuucaucgagaacggcugggagggcaugaaggacggcugguacggcuuccgccaccagaacuccgagggccgcggccaggccgccgaccucaaguccacccaggccgccaucgaccagaucaacggcaagcucaaccgccucaucggcaagaccaacgagaaguuccaccagaucgagaaggaguucuccgaggucgagggccgcauccaggaccucgagaaguacgucgaggacaccaagaucgaccucugguccuacaacgccgagcuccucgucgcccucgagaaccagcacaccaucgaccucaccgacuccgagaugaacaagcucuucgagaagaccaagaagcagcuccgcgagaacgccgaggacaugggcaacggcugcuucaagaucuaccacaagugcgacaacgccugcaucggcuccauccgcaacggcaccuacgaccacgacgucuaccgcgacgaggcccucaacaaccgcuuccagaucaagggcgucgagcucaaguccggcuacaaggacuggauccucuggaucuccuucgccaucuccugcuuccuccucugcgucgcccuccucggcuucaucaugugggccugccagaagggcaacauccgcugcaacaucugcaucuga

SEQ ID NO: 109011 - RNA, 1701 nt, Artificial Sequence; identical to SEQ ID NO: 106030
  derived and/or modified CDS sequence (opt2) from hemagglutinin__InfluenzaA__ALA08479

SEQ ID NO: 109012 - RNA, 1701 nt, Artificial Sequence
  derived and/or modified CDS sequence (opt2) from hemagglutinin__InfluenzaA__ALA08481
augaagaccaucaucgcccucuccuacauccucugccucgucuucgcccagaagcuccccggcaacgacaacuccaccgccacccucugccucggccaccacgccguccccaacggcaccaucgucaagaccaucaccaacgaccgcaucgaggucaccaacgccaccgagcucguccagaacuccuccaucggcgagaucugcgacuccccccaccagauccucgacggcgagaacugcacccucaucgacgcccuccucggcgacccccagugcgacggcuuccagaacaagaagugggaccucuucgucgagcgcuccaaggcccacuccaacugcuaccccuacgacguccccgacuacgccucccuccgcucccucgucgccuccuccggcacccucgaguucaacaacgaguccuucaacugggccggcgucacccagaacggcaccuccuccuccugcauccgcggcuccaacuccuccuucuucucccgccucaacuggcucacccaccucaacuccaaguaccccgcccucaacgucaccaugcccaacaacgagcaguucgacaagcucuacaucuggggcguccaccaccccggcaccgacaaggaccagaucuuccucuacgcccaguccuccggccgcaucaccgucuccaccaagcgcucccagcaggccgucauccccaacaucggcucccgcccccgcauccgcgacauccccucccgcaucuccaucuacuggaccaucgucaagcccggcgacauccuccucaucaacuccaccggcaaccucaucgccccccgcggcuacuucaagauccgcuccggcaaguccuccaucaugcgcuccgacgcccccaucggcaagugcaaguccgagugcaucacccccaacggcuccauccccaacgacaagcccuuccagaacgucaaccgcaucaccuacggcgccugcccccgcuacgucaagcaguccacccucaagcucgccaccggcaugcgcaacguccccgagcgccagacccgcggcaucuucggcgccaucgccggcuucaucgagaacggcugggagggcauggucgacggcugguacggcuuccgccaccagaacuccgagggccgcggccaggccgccgaccucaaguccacccaggccgccaucgaccagaucaacggcaagcucaaccgccucaucggcaagaccaacgagaaguuccaccagaucgagaaggaguucuccgaggucgagggccgcauccaggaccucgagaaguacgucgaggacaccaagaucgaccucugguccuacaacgccgagcuccucgucgcccucgagaaccagcacaccaucgaccucaccgacuccgagaugaacaagcucuucgagaagaccaagaagcagcuccgcgagaacgccgaggacaugggcaacggcugcuucaagaucuaccacaagugcgacaacgccugcaucggcuccauccgcaacggcaccuacgaccacgacgucuaccgcgacgaggcccucaacaaccgcuuccagaucaagggcgucgagcucaaguccggcuacaaggacuggauccucuggaucuccuucgccaucuccugcuuccuccucugcgucgcccuccucggcuucaucaugugggccugccagaagggcaacauccgcugcaacaucugcaucuga

SEQ ID NO: 109013 - RNA, 1701 nt, Artificial Sequence; identical to SEQ ID NO: 109012
  derived and/or modified CDS sequence (opt2) from hemagglutinin__InfluenzaA__ALA08482

SEQ ID NO: 109014 - RNA, 1701 nt, Artificial Sequence
  derived and/or modified CDS sequence (opt2) from hemagglutinin__InfluenzaA__ALA08483
augaagaccaucaucggccucuccuacauccucugccucgucuucgcccagaagcuccccggcaacgacaacuccaccgccacccucugccucggccaccacgccguccccaacggcaccaucgucaagaccaucaccaacgaccgcaucgaggucaccaacgccaccgagcucguccagaacuccuccaucggcgagaucugcgacuccccccaccagauccucgacggcgagaacugcacccucaucgacgcccuccucggcgacccccagugcgacggcuuccagaacaagaagugggaccucuucgucgagcgcuccaaggccuacuccaacugcuaccccuacgacguccccgacuacgccucccuccgcucccucgucgccuccuccggcacccucgaguucaacaacgaguccuucaacugggccggcgucacccagaacggcaccuccuccuccugcauccgcggcuccaacuccuccuucuucucccgccucaacuggcucacccaccucaacuccaaguaccccgcccucaacgucaccaugcccaacaacgagcaguucgacaagcucuacaucuggggcguccaccaccccggcaccgacaaggaccagaucuuccucuacgcccaguccuccggccgcaucaccgucuccaccaagcgcucccagcaggccgucauccccaacaucggcucccgcccccgcauccgcgacauccccucccgcaucuccaucuacuggaccaucgucaagcccggcgacauccuccucaucaacuccaccggcaaccucaucgccccccgcggcuacuucaagauccgcuccggcaaguccuccaucaugcgcuccgacgcccccaucggcaagugcaaguccgagugcaucacccccaacggcuccauccccaacgacaagcccuuccagaacgucaaccgcaucaccuacggcgccugcccccgcuacgucaagcaguccacccucaagcucgccaccggcaugcgcaacguccccgagcgccagacccgcggcaucuucggcgccaucgccggcuucaucgagaacggcugggagggcauggucgacggcugguacggcuuccgccaccagaacuccgagggccgcggccaggccgccgaccucaaguccacccaggccgccaucgaccagaucaacggcaagcucaaccgccucaucggcaagaccaacgagaaguuccaccagaucgagaaggaguucuccgaggucgagggccgcauccaggaccucgagaaguacgucgaggacaccaagaucgaccucugguccuacaacgccgagcuccucgucgcccucgagaaccagcacaccaucgaccucaccgacuccgagaugaacaagcucuucgagaagaccaagaagcagcuccgcgagaacgccgaggacaugggcaacggcugcuucaagaucuaccacaagugcgacaacgccugcaucggcuccauccgcaacggcaccuacgaccacgacgucuaccgcgacgaggcccucaacaaccgcuuccagaucaagggcgucgagcucaaguccggcuacaaggacuggauccucuggaucuccuucgccaucuccugcuuccuccucugcgucgcccuccucggcuucaucaugugggccugccagaagggcaacauccgcugcaacaucugcaucuga

SEQ ID NO: 109015 - RNA, 1701 nt, Artificial Sequence
  derived and/or modified CDS sequence (opt2) from hemagglutinin__InfluenzaA__ALA08484
augaagaccaucaucgcccucuccuacauccucugccucgucuucgcccagaagauccccggcaacgacaacuccaccgccacccucugccucggccaccacgccguccccaacggcaccaucgucaagaccaucaccaacgaccgcaucgaggucaccaacgccaccgagcucguccagaacuccuccaucggcgagaucugcgacuccccccaccagauccucgacggcgagaacugcacccucaucgacgcccuccucggcgacccccagugcgacggcuuccagaacaagaagugggaccucuucgucgagcgcuccaaggccuacuccaacugcuaccccuacgacguccccgacuacgccucccuccgcucccucgucgccuccuccggcacccucgaguucaacaacgaguccuucaacuggaccggcgucacccagaacggcaccuccuccgccugcauccgccgcuccuccuccuccuucuucucccgccucaacuggcucacccaccucaacuacaccuaccccgcccucaacgucaccaugcccaacaacgagcaguucgacaagcucuacaucuggggcguccaccaccccggcaccgacaaggaccagaucuuccucuacgcccaguccuccggccgcaucaccaucuccaccaagcgcucccagcaggccgucauccccaacaucggcucccgcccccgcauccgcgacauccccucccgcaucuccaucuacuggaccaucgucaagcccggcgacauccuccucaucaacuccaccggcaaccucaucgccccccgcggcuacuucaagauccgcuccggcaaguccuccaucaugcgcuccgacgcccccaucggcaagugcaaguccgagugcaucacccccaacggcuccauccccaacgacaagcccuuccagaacgucaaccgcaucaccuacggcgccugcccccgcuacgucaagcacuccacccucaagcucgccaccggcaugcgcaacguccccgagaagcagacccgcggcaucuucggcgccaucgccggcuucaucgagaacggcugggagggcauggucgacggcugguacggcuuccgccaccagaacuccgagggccgcggccaggccgccgaccucaaguccacccaggccgccaucgaccagaucaacggcaagcucaaccgccucaucggcaagaccaacgagaaguuccaccagaucgagaaggaguucuccgaggucgagggccgcauccaggaccucgagaaguacgucgaggacaccaagaucgaccucugguccuacaacgccgagcuccucgucgcccucgagaaccagcacaccaucgaccucaccgacuccgagaugaacaagcucuucgagaagaccaagaagcagcuccgcgagaacgccgaggacaugggcaacggcugcuucaagaucuaccacaagugcgacaacgccugcaucggcuccauccgcaacggcaccuacgaccacaacgucuaccgcgacgaggcccucaacaaccgcuuccagaucaagggcgucgagcucaaguccggcuacaaggacuggauccucuggaucuccuucgccaucuccugcuuccuccucugcgucgcccuccucggcuucaucaugugggccugccagaagggcaacauccgcugcaacaucugcaucuga

SEQ ID NO: 109016 - RNA, 1701 nt, Artificial Sequence
  derived and/or modified CDS sequence (opt2) from hemagglutinin__InfluenzaA__ALA08488
augaagaccaucaucgcccucuccuacauccucugccucgucuucgcccagaagauccccggcaacggcaacuccaccgccacccucugccucggccaccacgccguccccaacggcaccaucgucaagaccaucaccaacgaccgcaucgaggucaccaacgccaccgagcucguccagaacuccuccaucggcgagaucugcgacuccccccaccagauccucgacggcgagaacugcacccucaucgacgcccuccucggcgacccccagugcgacggcuuccagaacaagaagugggaccucuucgucgagcgcuccaaggccuacuccaacugcuaccccuacgacguccccgacuacgccucccuccgcucccucgucgccuccuccggcacccucgaguucaacaacgaguccuucaacuggaccggcgucacccagaacggcaccuccuccgccugcauccgccgcuccuccuccuccuucuucucccgccucaacuggcucacccaccucaacuacaccuaccccgcccucaacgucaccaugcccaacaacgagcaguucgacaagcucuacaucuggggcguccaccaccccggcaccgacaaggaccagaucuuccucuacgcccaguccuccggccgcaucaccgucuccaccaagcgcucccagcaggccgucauccccaacaucggcucccgcccccgcauccgcgacauccccucccgcaucuccaucuacuggaccaucgucaagcccggcgacauccuccucaucaacuccaccggcaaccucaucgccccccgcggcuacuucaagauccgcuccggcaaguccuccaucaugcgcuccgacgcccccaucggcaagugcaaguccgagugcaucacccccaacggcuccauccccaacgacaagcccuuccagaacgucaaccgcaucaccuacggcgccugcccccgcuacgucaagcacuccacccucaagcucgccaccggcaugcgcaacguccccgagaagcagacccgcggcaucuucggcgccaucgccggcuucaucgagaacggcugggagggcauggucgacggcugguacggcuuccgccaccagaacuccgagggccgcggccaggccgccgaccucaaguccacccaggccgccaucgaccagaucaacggcaagcucaaccgccucaucggcaagaccaacgagaaguuccaccagaucgagaaggaguucuccgaggucgagggccgcauccaggaccucgagaaguacgucgaggacaccaagaucgaccucugguccuacaacgccgagcuccucgucgcccucgagaaccagcacaccaucgaccucaccgacuccgagaugaacaagcucuucgagaagaccaagaagcagcuccgcgagaacgccgaggacaugggcaacggcugcuucaagaucuaccacaagugcgacaacgccugcaucggcuccauccgcaacggcaccuacgaccacaacgucuaccgcgacgaggcccucaacaaccgcuuccagaucaagggcgucgagcucaaguccggcuacaaggacuggauccucuggaucuccuucgccaucuccugcuuccuccucugcgucgcccuccucggcuucaucaugugggccugccagaagggcaacauccgcugcaacaucugcaucuga

SEQ ID NO: 109017 - RNA, 1701 nt, Artificial Sequence
  derived and/or modified CDS sequence (opt2) from hemagglutinin__InfluenzaA__ALA08490
augaagaccaucaucgcccucuccuacauccucugccucgucuucgcccagaagauccccggcaacgacaacuccaccgccacccucugccucggccaccacgccguccccaacggcaccaucgucaagaccaucaccaacgaccgcaucgaggucaccaacgccaccgagcucguccagaacuccuccaucggcgagaucugcgacuccccccaccagauccucgacggcgagaacugcacccucaucgacgcccuccucggcgacccccagugcgacggcuuccagaacaagaagugggaccucuucgucgagcgcuccaaggccuacuccaacugcuaccccuacgacguccccgacuacgccucccuccgcucccucgucgccuccuccggcacccucgaguucaacaacgaguccuucaacuggaccggcgucacccagaacggcaccuccuccgccugcauccgccgcuccuccuccuccuucuucucccgccucaacuggcucacccaccucaacuacaccuaccccgcccucaacgucaccaugcccaacaacgagcaguucgacaagcucuacaucuggggcguccaccaccccggcaccgacaaggaccagaucuuccucuacgcccaguccuccggccgcaucaccgucuccaccaagcgcucccagcaggccgucauccccaacaucggcucccgcccccgcauccgcgacauccccucccgcaucuccaucuacuggaccaucgucaagcccggcgacauccuccucaucaacuccaccggcaaccucaucgccccccgcggcuacuucaagauccgcuccggcaaguccuccaucaugcgcuccgacgcccccaucggcaagugcaaguccgagugcaucacccccaacggcuccauccccaacgacaagcccuuccagaacgucaaccgcaucaccuacggcgccugcccccgcuacgucaagcacuccacccucaagcucgccaccggcaugcgcaacguccccgagaagcagacccgcggcaucuucggcgccaucgccggcuucaucgagaacggcugggagggcauggucgacggcugguacggcuuccgccaccagaacuccgagggccgcggccaggccgccgaccucaaguccacccaggccgccaucgaccagaucaacggcaagcucaaccgccucaucggcaagaccaacgagaaguuccaccagaucgagaaggaguucuccgaggucgagggccgcauccaggaccucgagaaguacgucgaggacaccaagaucgaccucugguccuacaacgccgagcuccucgucgcccucgagaaccagcacaccaucgaccucaccgacuccgagaugaacaagcucuucgagaagaccaagaagcagcuccgcgagaacgccgaggacaugggcaacggcugcuucaagaucuaccacaagugcgacaacgccugcaucggcuccauccgcaacggcaccuacgaccacaacgucuaccgcgacgaggcccucaacaaccgcuuccagaucaagggcaucgagcucaaguccggcuacaaggacuggauccucuggaucuccuucgccaucuccugcuuccuccucugcgucgcccuccucggcuucaucaugugggccugccagaagggcaacauccgcugcaacaucugcaucuga

SEQ ID NO: 109018 - RNA, 1701 nt, Artificial Sequence
  derived and/or modified CDS sequence (opt2) from hemagglutinin__InfluenzaA__ALA08491
augaagaccaucaucgcccucuccuacauccucugccucgucuucgcccagaagcuccccggcaacgacaacuccaccgccacccucugccucggccaccacgccguccccaacggcaccaucgucaagaccaucaccaacgaccgcaucgaggucaccaacgccaccgagcucguccagaacuccuccaucggcgagaucugcgacuccccccaccagauccucgacggcgagaacugcacccucaucgacgcccuccucggcgacccccagugcgacggcuuccagaacaagaagugggaccucuucgucgagcgcuccaaggccuacuccaacugcuaccccuacgacguccccgacuacgccucccuccgcucccucgucgccuccuccggcacccucgaguucaacaacgaguccuucaacugggccggcgucacccagaacggcaccuccuccgccugcauccgcggcuccaacuccuccuucuucucccgccucaacuggcucacccaccucaacuucaaguaccccgcccucaacaugaccaugcccaacaacgagcaguucgacaagcucuacaucuggggcguccaccaccccggcaccgacaaggaccagaucuuccucuacgcccaguccuccggccgcaucaccgucuccaccaagcgcucccagcaggccgucauccccaacaucggcucccgcccccgcauccgcaacauccccucccgcaucuccaucuacuggaccaucgucaagcccggcgacauccuccucaucaacuccaccggcaaccucaucgccccccgcggcuacuucaagauccgcuccggcaaguccuccaucaugcgcuccgacgcccccaucggcaagugcaaguccgagugcaucacccccaacggcuccauccccaacgacaagcccuuccagaacgucaaccgcaucaccuacggcgccugcccccgcuacgucaagcaguccacccucaagcucgccaccggcaugcgcaacguccccgagaagcagacccgcggcaucuucggcgccaucgccggcuucaucgagaacggcugggagggcaugaaggacggcugguacggcuuccgccaccagaacuccgagggccgcggccaggccgccgaccucaaguccacccaggccgccaucgaccagaucaacggcaagcucaaccgccucaucggcaagaccaacgagaaguuccaccagaucgagaaggaguucuccgaggucgagggccgcauccaggaccucgagaaguacgucgaggacaccaagaucgaccucugguccuacaacgccgagcuccucgucgcccucgagaaccagcacaccaucgaccucaccgacuccgagaugaacaagcucuucgagaagaccaagaagcagcuccgcgagaacgccgaggacaugggcaacggcugcuucaagaucuaccacaagugcgacaacgccugcaucggcuccauccgcaacggcaccuacgaccacgacgucuaccgcgacgaggcccucaacaaccgcuuccagaucaagggcgucgagcucaaguccggcuacaaggacuggauccucuggaucuccuucgccaucuccugcuuccuccucugcgucgcccuccucggcuucaucaugugggccugccagaagggcaacauccgcugcaacaucugcaucuga

SEQ ID NO: 109019 - RNA, 1701 nt, Artificial Sequence; identical to SEQ ID NO: 109017
  derived and/or modified CDS sequence (opt2) from hemagglutinin__InfluenzaA__ALA08492

SEQ ID NO: 109020 - RNA, 1701 nt, Artificial Sequence
  derived and/or modified CDS sequence (opt2) from hemagglutinin__InfluenzaA__ALA08493
augaagaccaucaucgcccucuccuacauccucugccucgucuucgcccagaagauccccggcaacgacaacuccaccgccacccucugccucggccaccacgccguccccaacggcaccaucgucaagaccaucaccaacgaccgcaucgaggucaccaacgccaccgagcucguccagaacuccuccaucggcgagaucugcgacuccccccaccagauccucgacggcgagaacugcacccucaucgacgcccuccucggcgacccccagugcgacggcuuccagaacaagaagugggaccucuucgucgagcgcuccaaggccuacuccaacugcuaccccuacgacguccccgacuacgccucccuccgcucccucgucgccuccuccggcacccucgaguucaacaacgaguccuucaacuggaccggcgucacccagaacggcaccuccuccgccugcauccgccgcuccuccuccuccuucuucucccgccucaacuggcucacccaccucaacuacaccuaccccgcccucaacgucaccaugcccaacaacgagcaguucgacaagcucuacaucuggggcguccaccaccccggcaccgacaaggaccagaucuuccucuacgcccaguccuccggccgcaucaccgucuccaccaagcgcucccagcaggccgucauccccaacaucggcucccgcccccgcauccgcgacauccccucccgcaucuccaucuacuggaccaucgucaagcccggcgacauccuccucaucaacuccaccggcaaccucaucgccccccgcggcuacuucaagauccgcuccggcaaguccuccaucaugcgcuccgacgcccccaucggcaagugccgcuccgagugcaucacccccaacggcuccauccccaacgacaagcccuuccagaacgucaaccgcaucaccuacggcgccugcccccgcuacgucaagcacuccacccucaagcucgccaccggcaugcgcaacguccccgagaagcagacccgcggcaucuucggcgccaucgccggcuucaucgagaacggcugggagggcauggucgacggcugguacggcuuccgccaccagaacuccgagggccgcggccaggccgccgaccucaaguccacccaggccgccaucgaccagaucaacggcaagcucaaccgccucaucggcaagaccaacgagaaguuccaccagaucgagaaggaguucuccgaggucgagggccgcauccaggaccucgagaaguacgucgaggacaccaagaucgaccucugguccuacaacgccgagcuccucgucgcccucgagaaccagcacaccaucgaccucaccgacuccgagaugaacaagcucuucgagaagaccaagaagcagcuccgcgagaacgccgaggacaugggcaacggcugcuucaagaucuaccacaagugcgacaacgccugcaucggcuccauccgcaacggcaccuacgaccacaacgucuaccgcgacgaggcccucaacaaccgcuuccagaucaagggcaucgagcucaaguccggcuacaaggacuggauccucuggaucuccuucgccaucuccugcuuccuccucugcgucgcccuccucggcuucaucaugugggccugccagaagggcaacauccgcugcaacaucugcaucuga

SEQ ID NO: 109021 - RNA, 1701 nt, Artificial Sequence
  derived and/or modified CDS sequence (opt2) from hemagglutinin__InfluenzaA__ALA08494
augaagaccaucaucgcccucuccuacauccucugccucgucuucgcccagaagauccccggcaacgacaacuccaccgccacccucugccucggccaccacgccguccccaacggcaccaucgucaagaccaucaccaacgaccgcaucgaggucaccaacgccaccgagcucguccagaacuccuccaucggcgagaucugcgacuccccccaccagauccucgacggcgagaacugcacccucaucgacgcccuccucggcgacccccagugcgacggcuuccagaacaagaagugggaccucuucgucgagcgcuccaaggccuacuccaacugcuaccccuacgacguccccgacuacgccucccuccgcucccucgucgccuccuccggcacccucgaguucaacaacgaguccuucaacuggaccggcgucacccagaacggcaccuccuccgccugcauccgccgcuccuccuccuccuucuucucccgccucaacuggcucacccaccucaacuacaccuaccccgcccucaacgucaccaugcccaacaacgagcaguucgacaagcucuacaucuggggcguccaccaccccggcaccgacaaggaccagaucuuccucuacgcccaguccuccggccgcaucaccgucuccaccaagggcucccagcaggccgucauccccaacaucggcucccgcccccgcauccgcgacauccccucccgcaucuccaucuacuggaccaucgucaagcccggcgacauccuccucaucaacuccaccggcaaccucaucgccccccgcggcuacuucaagauccgcuccggcaaguccuccaucaugcgcuccgacgcccccaucggcaagugcaaguccgagugcaucacccccaacggcuccauccccaacgacaagcccuuccagaacgucaaccgcaucaccuacggcgccugcccccgcuacgucaagcacuccacccucaagcucgccaccggcaugcgcaacguccccgagaagcagacccgcggcaucuucggcgccaucgccggcuucaucgagaacggcugggagggcauggucgacggcugguacggcuuccgccaccagaacuccgagggccgcggccaggccgccgaccucaaguccacccaggccgccaucgaccagaucaacggcaagcucaaccgccucaucggcaagaccaacgagaaguuccaccagaucgagaaggaguucuccgaggucgagggccgcauccaggaccucgagaaguacgucgaggacaccaagaucgaccucugguccuacaacgccgagcuccucgucgcccucgagaaccagcacaccaucgaccucaccgacuccgagaugaacaagcucuucgagaagaccaagaagcagcuccgcgagaacgccgaggacaugggcaacggcugcuucaagaucuaccacaagugcgacaacgccugcaucggcuccauccgcaacggcaccuacgaccacaacgucuaccgcgacgaggcccucaacaaccgcuuccagaucaagggcgucgagcucaaguccggcuacaaggacuggauccucuggaucuccuucgccaucuccugcuuccuccucugcgucgcccuccucggcuucaucaugugggccugccagaagggcaacauccgcugcaacaucugcaucuga

SEQ ID NO: 109022 - RNA, 1701 nt, Artificial Sequence; identical to SEQ ID NO: 109021
  derived and/or modified CDS sequence (opt2) from hemagglutinin__InfluenzaA__ALA08495

SEQ ID NO: 109023 - RNA, 1701 nt, Artificial Sequence; identical to SEQ ID NO: 109021
  derived and/or modified CDS sequence (opt2) from hemagglutinin__InfluenzaA__ALA08496

SEQ ID NO: 109024 - RNA, 1701 nt, Artificial Sequence; identical to SEQ ID NO: 108477
  derived and/or modified CDS sequence (opt2) from hemagglutinin__InfluenzaA__ALA08497

SEQ ID NO: 109025 - RNA, 1701 nt, Artificial Sequence; identical to SEQ ID NO: 108477
  derived and/or modified CDS sequence (opt2) from hemagglutinin__InfluenzaA__ALA08498

SEQ ID NO: 109026 - RNA, 1701 nt, Artificial Sequence
  derived and/or modified CDS sequence (opt2) from hemagglutinin__InfluenzaA__ALA08499
augaagaccaucaucgcccucuccuacauccucugccucgucuucgcccagaagcuccccgagaacgacaacuccaccgccacccucugccucggccaccacgccguccccaacggcaccaucgucaagaccaucaccuccgaccgcaucgaggucaccaacgccaccgagcucguccagaacuccuccaucggcgagaucugcgacuccccccaccagauccucgacggcaagaacugcacccucaucgacgcccuccucggcgacccccagugcgacggcuuccagaacaagaagugggaccucuucgucgagcgcuccaaggccuacuccaacugcuaccccuacgacguccccgacuacgccucccuccgcucccucgucgccuccuccggcacccucgaguucaacgacgaguccuucaacugggccggcgucacccagaacggcaccuccuccgccugcauccgcggcuccaacuccuccuucuucucccgccucaacuggcucacccacuccaacuucaaguaccccgcccucaacgucaccaugcccaacaacgagcaguucgacaagcucuacaucuggggcguccaccaccccggcaccgacaaggaccagaucuuccucuacgcccaguccuccggccgcaucaccgucuccaccaagcgcucccagcaggccgucauccccaacaucggcucccgcccccgcauccgcgacauccccucccgcaucuccaucuacuggaccaucgucaagcccggcgacauccuccucaucaacuccaccggcaaccucaucgccccccgcggcuacuucaagauccgcuccggcaaguccuccaucaugcgcuccgacgcccccaucggcaagugcaaguccgagugcaucacccccaacggcuccauccccaacgacaagcccuuccagaacgucaaccgcaucaccuacggcgccugcccccgcuacgucaagcaguccacccucaagcucgccaccggcaugcgcaacguccccgagaagcagacccgcggcaucuucggcgccaucgccggcuucaucgagaacggcugggagggcaugaaggacggcugguacggcuuccgccaccagaacuccgagggccgcggccaggccgccgaccucaaguccacccaggccgccaucgaccagaucaacggcaagcucaaccgccucaucggcaagaccaacgagaaguuccaccagaucgagaaggaguucuccgaggucgagggccgcauccaggaccucgagaaguacgucgaggacaccaaggucgaccucugguccuacaacgccgagcuccucgucgcccucgagaaccagcacaccaucgaccucaccgacuccgagaugaacaagcucuucgagaagaccaagaagcagcuccgcgagaacgccgaggacaugggcaacggcugcuucaagaucuaccacaagugcgacaacgccugcaucggcuccauccgcaacggcaccuacgaccacgacgucuaccgcgacgaggcccucaacaaccgcuuccagaucaagggcgucgagcucaaguccggcuacaaggacuggauccucuggaucuccuucgccaucuccugcuuccuccucugcgucgcccuccucggcuucaucaugugggccugccagaagggcaacauccgcugcaacaucugcaucuga

SEQ ID NO: 109027 - RNA, 1701 nt, Artificial Sequence; identical to SEQ ID NO: 109010
  derived and/or modified CDS sequence (opt2) from hemagglutinin__InfluenzaA__ALA08501

SEQ ID NO: 109028 - RNA, 1701 nt, Artificial Sequence
  derived and/or modified CDS sequence (opt2) from hemagglutinin__InfluenzaA__ALA08502
augaagaccaucaucgcccucuccuacauccucugccucgucuucgcccagaagcuccccgagaacgacaacuccaccgccacccucugccucggccaccacgccguccccaacggcaccaucgucaagaccaucaccuccgaccgcaucgaggucaccaacgccaccgagcucguccagaacuccuccaucggcgagaucugcgacuccccccaccagauccucgacggcaagaacugcacccucaucgacgcccuccucggcgacccccagugcgacggcuuccagaacaagaagugggaccucuucgucgagcgcuccaaggccuacuccaacugcuaccccuacgacguccccgacuacgccucccuccgcucccucgucgccuccuccggcacccucgaguucaacgacgaguccuucaacugggccggcgucacccagaacggcaccuccuccgccugcauccgcggcuccaacuccuccuucuucucccgccucaacuggcucacccacuccaacuucaaguaccccgcccucaacgucaccaugcccaacaacgagcaguucgacaagcucuacaucuggggcguccaccaccccggcaccgacaaggaccagaucuuccucuacgcccaguccuccggccgcaucaccgucuccaccaagcgcucccagcaggccgucauccccaacaucggcucccgcccccgcauccgcaacauccccucccgcaucuccaucuacuggaccaucgucaagcccggcgacauccuccucaucaacuccaccggcaaccucaucgccccccgcggcuacuucaagauccgcuccggcaaguccuccaucaugcgcuccgacgcccccaucggcaagugcaaguccgagugcaucacccccaacggcuccauccccaacgacaagcccuuccagaacgucaaccgcaucaccuacggcgccugcccccgcuacgucaagcaguccacccucaagcucgccaccggcaugcgcaacguccccgagaagcagacccgcggcaucuucggcgccaucgccggcuucaucgagaacggcugggagggcaugaaggacggcugguacggcuuccgccaccagaacuccgagggccgcggccaggccgccgaccucaaguccacccaggccgccaucgaccagaucaacggcaagcucaaccgccucaucggcaagaccaacgagaaguuccaccagaucgagaaggaguucuccgaggucgagggccgcauccaggaccucgagaaguacgucgaggacaccaaggucgaccucugguccuacaacgccgagcuccucgucgcccucgagaaccagcacaccaucgaccucaccgacuccgagaugaacaagcucuucgagaagaccaagaagcagcuccgcgagaacgccgaggacaugggcaacggcugcuucaagaucuaccacaagugcgacaacgccugcaucggcuccauccgcaacggcaccuacgaccacgacgucuaccgcgacgaggcccucaacaaccgcuuccagaucaagggcgucgagcucaaguccggcuacaaggacuggauccucuggaucuccuucgccaucuccugcuuccuccucugcgucgcccuccucggcuucaucaugugggccugccagaagggcaacauccgcugcaacaucugcaucuga

SEQ ID NO: 109029 - RNA, 1701 nt, Artificial Sequence; identical to SEQ ID NO: 109028
  derived and/or modified CDS sequence (opt2) from hemagglutinin__InfluenzaA__ALA08503

SEQ ID NO: 109030 - RNA, 1701 nt, Artificial Sequence; identical to SEQ ID NO: 108477
  derived and/or modified CDS sequence (opt2) from hemagglutinin__InfluenzaA__ALA08504

SEQ ID NO: 109031 - RNA, 1701 nt, Artificial Sequence; identical to SEQ ID NO: 108477
  derived and/or modified CDS sequence (opt2) from hemagglutinin__InfluenzaA__ALA08505

SEQ ID NO: 109032 - RNA, 1701 nt, Artificial Sequence; identical to SEQ ID NO: 108477
  derived and/or modified CDS sequence (opt2) from hemagglutinin__InfluenzaA__ALA08506

SEQ ID NO: 109033 - RNA, 1701 nt, Artificial Sequence; identical to SEQ ID NO: 108477
  derived and/or modified CDS sequence (opt2) from hemagglutinin__InfluenzaA__ALA08507

SEQ ID NO: 109034 - RNA, 1701 nt, Artificial Sequence
  derived and/or modified CDS sequence (opt2) from hemagglutinin__InfluenzaA__ALA08508
augaagaccaucaucgcccucuccuacauccucugccucgucuucgcccagaagcuccccgagaacgacaacuccaccgccacccucugccucggccaccacgccguccccaacggcaccaucgucaagaccaucaccuccgaccgcaucgaggucaccaacgccaccgagcucguccagaacuccuccaucggcgagaucugcgacuccccccaccagauccucgacggcaagaacugcacccucaucgacgcccuccucggcgacccccagugcgacggcuuccagaacaagaagugggaccucuucgucgagcgcuccaaggccuacuccaacugcuaccccuacgacguccccgacuacgccucccuccgcucccucgucgccuccuccggcacccucgaguucaacgacgaguccuucaacugggccggcgucacccagaacggcaccuccuccgccugcauccgcggcuccaacuccuccuucuucucccgccucaacuggcucacccacuccaacuucaaguaccccgcccucaacgucaccaugcccaacaacgagcaguucgacaagcucuacaucuggggcguccaccaccccggcaccgacaaggaccagaucuuccucuacgcccaguccuccggccgcaucaccgucuccaccaagcgcucccagcaggccgucauccccaacaucggcucccgcccccgcauccgcaacauccccucccgcaucuccaucuacuggaccaucgucaagcccggcgacauccuccucaucaacuccaccggcaaccucaucgccccccgcggcuacuucaagauccgcuccggcaaguccuccaucaugcgcuccgacgcccccaucggcaagugcaaguccgagugcaucacccccaacggcuccauccccaacgacaagcccuuccagaacgucaaccgcaucaccuacggcgccugcccccgcuacgucaagcaguccacccucaagcucgccaccggcaugcgcaacguccccgagaagcagacccgcggcaucuucggcgccaucgccggcuucaucgagaacggcugggagggcaugaaggacggcugguacggcuuccgccaccagaacuccgagggccgcggccaggccgccgaccucaaguccacccaggccgccaucgaccagaucaacggcaagcucaaccgccucaucggcaagaccaacgagaaguuccaccagaucgagaaggaguucuccgaggucgagggccgcauccaggaccucgagaaguacgucgaggacaccaagaucgaccucugguccuacaacgccgagcuccucgucgcccucgagaaccagcacaccaucgaccucaccgacuccgagaugaacaagcucuucgagaagaccaagaagcagcuccgcgagaacgccgaggacaugggcaacggcugcuucaagaucuaccacaagugcgacaacgccugcaucggcuccauccgcaacggcaccuacgaccacgacgucuaccgcgacgaggcccucaacaaccgcuuccagaucaagggcgucgagcucaaguccggcuacaaggacuggauccucuggaucuccuucgccaucuccugcuuccuccucugcgucgcccuccucggcuucaucaugugggccugccagaagggcaacauccgcugcaacaucugcaucuga

SEQ ID NO: 109035 - RNA, 1701 nt, Artificial Sequence; identical to SEQ ID NO: 108477
  derived and/or modified CDS sequence (opt2) from hemagglutinin__InfluenzaA__ALA08509

SEQ ID NO: 109036 - RNA, 1701 nt, Artificial Sequence; identical to SEQ ID NO: 108477
  derived and/or modified CDS sequence (opt2) from hemagglutinin__InfluenzaA__ALA08510

SEQ ID NO: 109037 - RNA, 1701 nt, Artificial Sequence
  derived and/or modified CDS sequence (opt2) from hemagglutinin__InfluenzaA__ALA08511
augaagaccaucaucgcccucuccuacauccucugccucgucuucgcccagaagauccccggcaacgacaacuccaccgccacccucugccucggccaccacgccguccccaacggcaccaucgucaagaccaucaccaacgaccgcaucgaggucaccaacgccaccgagcucguccagaacuccuccaucggcgagaucugcgacuccccccaccagauccucgacggcgagaacugcacccucaucgacgcccuccucggcgacccccagugcgacggcuuccagaacaagaagugggaccucuucgucgagcgcuccaaggccuacuccaacugcuaccccuacgacguccccgacuacgccucccuccgcucccucgucgccuccuccggcacccucgaguucaacaacgaguccuucaacuggaccggcgucacccagaacggcaccuccuccuccugcauccgccgcuccuccuccuccuucuucucccgccucaacuggcucacccaccucaacuacaccuaccccgcccucaacgucaccaugcccaacaacgagcaguucgacaagcucuacaucuggggcguccaccaccccuccaccgacaaggaccagaucuuccucuacgcccaguccuccggccgcaucaccgucuccaccaagcgcucccagcaggccgucauccccaacaucggcucccgcccccgcauccgcgacauccccucccgcaucuccaucuacuggaccaucgucaagcccggcgacauccuccucaucaacuccaccggcaaccucaucgccccccgcggcuacuucaagauccgcuccggcaaguccuccaucaugcgcuccgacgcccccaucggcaagugcaaguccgagugcaucacccccaacggcuccauccccaacgacaagcccuuccagaacgucaaccgcaucaccuacggcgccugcccccgcuacgucaagcacuccacccucaagcucgccaccggcaugcgcaacguccccgagaagcagacccgcggcaucuucggcgccaucgccggcuucaucgagaacggcugggagggcauggucgacggcugguacggcuuccgccaccagaacuccgagggccgcggccaggccgccgaccucaaguccacccaggccgccaucgaccagaucaacggcaagcucaaccgccucaucggcaagaccaacgagaaguuccaccagaucgagaaggaguucuccgaggucgagggccgcauccaggaccucgagaaguacgucgaggacaccaagaucgaccucugguccuacaacgccgagcuccucgucgcccucgagaaccagcacaccaucgaccucaccgacuccgagaugaacaagcucuucgagaagaccaagaagcagcuccgcgagaacgccgaggacaugggcaacggcugcuucaagaucuaccacaagugcgacaacgccugcaucggcuccauccgcaacggcaccuacgaccacaacgucuaccgcgacgaggcccucaacaaccgcuuccagaucaagggcgucgagcucaaguccggcuacaaggacuggauccucuggaucuccuucgccaucuccugcuuccuccucugcgucgcccuccucggcuucaucaugugggccugccagaagggcaacauccgcugcaacaucugcaucuga

SEQ ID NO: 109038 - RNA, 1701 nt, Artificial Sequence; identical to SEQ ID NO: 108477
  derived and/or modified CDS sequence (opt2) from hemagglutinin__InfluenzaA__ALA08512

SEQ ID NO: 109039 - RNA, 1701 nt, Artificial Sequence; identical to SEQ ID NO: 108477
  derived and/or modified CDS sequence (opt2) from hemagglutinin__InfluenzaA__ALA08514

SEQ ID NO: 109040 - RNA, 1701 nt, Artificial Sequence; identical to SEQ ID NO: 108477
  derived and/or modified CDS sequence (opt2) from hemagglutinin__InfluenzaA__ALA08515

SEQ ID NO: 109041 - RNA, 1701 nt, Artificial Sequence; identical to SEQ ID NO: 108477
  derived and/or modified CDS sequence (opt2) from hemagglutinin__InfluenzaA__ALA08516

SEQ ID NO: 109042 - RNA, 1701 nt, Artificial Sequence; identical to SEQ ID NO: 109034
  derived and/or modified CDS sequence (opt2) from hemagglutinin__InfluenzaA__ALA08517

SEQ ID NO: 109043 - RNA, 1701 nt, Artificial Sequence; identical to SEQ ID NO: 108477
  derived and/or modified CDS sequence (opt2) from hemagglutinin__InfluenzaA__ALA08519

SEQ ID NO: 109044 - RNA, 1701 nt, Artificial Sequence
  derived and/or modified CDS sequence (opt2) from hemagglutinin__InfluenzaA__ALA08520
augaagaccaucaucgcccucuccuacauccucugccucgucuucgcccagaagauccccggcaacgacaacuccaccgccacccucugccucggccaccacgccguccccaacggcaccaucgucaagaccaucaccaacgaccgcaucgaggucaccaacgccaccgagcucguccagaacuccuccaucggcgagaucugcgacuccccccaccagauccucgacggcgagaacugcacccucaucgacgcccuccucggcgacccccagugcgacggcuuccagaacaagaagugggaccucuucgucgagcgcuccaaggccuacuccaacugcuaccccuacgacguccccgacuacgccucccuccgcucccucgucgccuccuccggcacccucgaguucaacaacgaguccuucaacuggaccggcgucacccagaacggcaccuccuccgccugcauccgccgcuccuccuccuccuucuucucccgccucaacuggcucacccaccucaacuacaccuaccccgcccucaacgucaccaugcccaacaacgagcaguucgacaagcucuacaucuggggcguccaccaccccggcaccgacaaggaccagaucuuccucuacgcccagcccuccggccgcaucaccgucuccaccaagcgcucccagcaggccgucauccccaacaucggcucccgcccccgcauccgcgacauccccucccgcaucuccaucuacuggaccaucgucaagcccggcgacauccuccucaucaacuccaccggcaaccucaucgccccccgcggcuacuucaagauccgcaacggcaaguccuccaucaugcgcuccgacgcccccaucggcaagugcaaguccgagugcaucacccccaacggcuccauccccaacgacaagcccuuccagaacgucaaccgcaucaccuacggcgccugcccccgcuacgucaagcacuccacccucaagcucgccaccggcaugcgcaacguccccgagaagcagacccgcggcaucuucggcgccaucgccggcuucaucgagaacggcugggagggcauggucgacggcugguacggcuuccgccaccagaacuccgagggccgcggccaggccgccgaccucaaguccacccaggccgccaucgaccagaucaacggcaagcucaaccgccucaucggcaagaccaacgagaaguuccaccagaucgagaaggaguucuccgaggucgagggccgcauccaggaccucgagaaguacgucgaggacaccaagaucgaccucugguccuacaacgccgagcuccucgucgcccucgagaaccagcacaccaucgaccucaccgacuccgagaugaacaagcucuucgagaagaccaagaagcagcuccgcgagaacgccgaggacaugggcaacggcugcuucaagaucuaccacaagugcgacaacgccugcaucggcuccauccgcaacggcaccuacgaccacaacgucuaccgcgacgaggcccucaacaaccgcuuccagaucaagggcgucgagcucaaguccggcuacaaggacuggauccucuggaucuccuucgccaucuccugcuuccuccucugcgucgcccuccucggcuucaucaugugggccugccagaagggcaacauccgcugcaacaucugcaucuga

SEQ ID NO: 109045 - RNA, 1701 nt, Artificial Sequence; identical to SEQ ID NO: 106174
  derived and/or modified CDS sequence (opt2) from hemagglutinin__InfluenzaA__ALA08522

SEQ ID NO: 109046 - RNA, 1701 nt, Artificial Sequence
  derived and/or modified CDS sequence (opt2) from hemagglutinin__InfluenzaA__ALA08523
augaagaccaucaucgcccucuccuacauccucugccucgucuucgcccagaagauccccggcaacgacaacuccaccgccacccucugccucggccaccacgccguccccaacggcaccaucgucaagaccaucaccaacgaccgcaucgaggucaccaacgccaccgagcucguccagaacuccuccaucggcgagaucugcgacuccccccaccagauccucgacggcgagaacugcacccucaucgacgcccuccucggcgacccccagugcgacggcuuccagaacaagaagugggaccucuucgucgagcgcuccaaggccuacuccaacugcuaccccuacgacguccccgacuacgccucccuccgcucccucgucgccuccuccggcacccucgaguucaacaacgaguccuucaacuggaccggcgucacccagaacggcaccuccuccgccugcauccgccgcuccuccuccuccuucuucucccgccucaacuggcucacccaccucaacuacaccuaccccgcccucaacgucaccaugcccaacaacgagcaguucgacaagcucuacaucuggggcguccaccaccccggcaccgacaaggaccagaucuuccucuacgcccaguccuccggccgcaucaccgucuccaccaagcgcucccagcaggccgucauccccaacaucggcucccgcccccgcauccgcgacauccccucccgcaucuccaucuacuggaccaucgucaagcccggcgacauccuccucaucaacuccaucggcaaccucaucgccccccgcggcuacuucaagauccgcuccggcaaguccuccaucaugcgcuccgacgcccccaucggcaagugcaaguccgagugcaucacccccaacggcuccauccccaacgacaagcccuuccagaacgucaaccgcaucaccuacggcgccugcccccgcuacgucaagcacuccacccucaagcucgccaccggcaugcgcaacguccccgagaagcagacccgcggcaucuucggcgccaucgccggcuucaucgagaacggcugggagggcauggucgacggcugguacggcuuccgccaccagaacuccgagggccgcggccaggccgccgaccucaaguccacccaggccgccaucgaccagaucaacggcaagcucaaccgccucaucggcaagaccaacgagaaguuccaccagaucgagaaggaguucuccgaggucgagggccgcauccaggaccucgagaaguacgucgaggacaccaagaucgaccucugguccuacaacgccgagcuccucgucgcccucgagaaccagcacaccaucgaccucaccgacuccgagaugaacaagcucuucgagaagaccaagaagcagcuccgcgagaacgccgaggacaugggcaacggcugcuucaagaucuaccacaagugcgacaacgccugcaucggcuccauccgcaacggcaccuacgaccacaacgucuaccgcgacgaggcccucaacaaccgcuuccagaucaagggcgucgagcucaaguccggcuacaaggacuggauccucuggaucuccuucgccaucuccugcuuccuccucugcgucgcccuccucggcuucaucaugugggccugccagaagggcaacauccgcugcaacaucugcaucuga

SEQ ID NO: 109047 - RNA, 1701 nt, Artificial Sequence
  derived and/or modified CDS sequence (opt2) from hemagglutinin__InfluenzaA__ALA08524
augaagaccaucaucgcccucuccuacauccucugcauggucuucgcccagaagauccccggcaacgacaacuccaccgccacccucugccucggccaccacgccguccccaacggcaccaucgucaagaccaucaccaacgaccgcaucgaggucaccaacgccaccgagcucguccagaacuccuccaucggcgagaucugcgacuccccccaccagauccucgacggcgagaacugcacccucaucgacgcccuccucggcgacccccagugcgacggcuuccagaacaagaagugggaccucuucgucgagcgcuccaaggccuacuccaacugcuaccccuacgacguccccgacuacgccucccuccgcucccucgucgccuccuccggcacccucgaguucaacaacgaguccuucaacuggaccggcgucacccagaacggcaccuccuccgccugcauccgccgcuccuccuccuccuucuucucccgccucaacuggcucacccaccucaacuacaccuaccccgcccucaacgucaccaugcccaacaacgagcaguucgacaagcucuacaucuggggcguccaccaccccggcaccgacaaggaccagaucuuccucuacgcccaguccuccggccgcaucaccgucuccaccaagcgcucccagcaggccgucauccccaacaucggcucccgccuccgcauccgcgacauccccucccgcaucuccaucuacuggaccaucgucaagcccggcgacauccuccucaucaacuccaccggcaaccucaucgccccccgcggcuacuucaagauccgcuccggcaaguccuccaucaugcgcuccgacgcccccaucggcaagugcaaguccgagugcaucacccccaacggcuccauccccaacgacaagcccuuccagaacgucaaccgcaucaccuacggcgccugcccccgcuacgucaagcacuccacccucaagcucgccaccggcaugcgcaacguccccgagaagcagacccgcggcaucuucggcgccaucgccggcuucaucgagaacggcugggagggcauggucgacggcugguacggcuuccgccaccagaacuccgagggccgcggccaggccgccgaccucaaguccacccaggccgccaucgaccagaucaacggcaagcucaaccgccucaucggcaagaccaacgagaaguuccaccagaucgagaaggaguucuccgaggucgagggccgcauccaggaccucgagaaguacgucgaggacaccaagaucgaccucugguccuacaacgccgagcuccucgucgcccucgagaaccagcacaccaucgaccucaccgacuccgagaugaacaagcucuucgagaagaccaagaagcagcuccgcgagaacgccgaggacaugggcaacggcugcuucaagaucuaccacaagugcgacaacgccugcaucggcuccauccgcaacggcaccuacgaccacaacgucuaccgcgacgaggcccucaacaaccgcuuccagaucaagggcgucgagcucaaguccggcuacaaggacuggauccucuggaucuccuucgccaucuccugcuuccuccucugcgucgcccuccucggcuucaucaugugggccugccagaagggcaacauccgcugcaacaucugcaucuga

SEQ ID NO: 109048 - RNA, 1701 nt, Artificial Sequence; identical to SEQ ID NO: 108477
  derived and/or modified CDS sequence (opt2) from hemagglutinin__InfluenzaA__ALA08525

SEQ ID NO: 109049 - RNA, 1701 nt, Artificial Sequence; identical to SEQ ID NO: 108477
  derived and/or modified CDS sequence (opt2) from hemagglutinin__InfluenzaA__ALA08526

SEQ ID NO: 109050 - RNA, 1701 nt, Artificial Sequence; identical to SEQ ID NO: 109034
  derived and/or modified CDS sequence (opt2) from hemagglutinin__InfluenzaA__ALA08527

SEQ ID NO: 109051 - RNA, 1701 nt, Artificial Sequence
  derived and/or modified CDS sequence (opt2) from hemagglutinin__InfluenzaA__ALA08528
augaagaccaucaucgcccucuccuacauccucugccucgucuucgcccagaagcuccccgagaacgacaacuccaccgccacccucugccucggccaccacgccguccccaacggcaccaucgucaagaccaucaccuccgaccgcaucgaggucaccaacgccaccgagcucguccagaacuccuccaucggcgagaucugcgacuccccccaccagauccucgacggcaagaacugcacccucaucgacgcccuccucggcgacccccagugcgacggcuuccagaacaagaagugggaccucuucgucgagcgcuccaaggccuacuccaacugcuaccccuacgacguccccgacuacgccucccuccgcucccucgucgccuccuccggcacccucgaguucaacgacgaguccuucaacugggccggcgucacccagaacggcaccuccuccgccugcauccgcggcuccaacuccuccuucuucucccgccucaacuggcucacccacuccaacuucaaguaccccgcccucaacgucaccaugcccaacaacgagcaguucgacaagcucuacaucuggggcguccaccaccccggcaccgacaaggaccagaucuaccucuacgcccaguccuccggccgcaucaccgucuccaccaagcgcucccagcaggccgucauccccaacaucggcucccgcccccgcauccgcaacauccccucccgcaucuccaucuacuggaccaucgucaagcccggcgacauccuccucaucaacuccaccggcaaccucaucgccccccgcggcuacuucaagauccgcuccggcaaguccuccaucaugcgcuccgacgcccccaucggcaagugcaaguccgagugcaucacccccaacggcuccauccccaacgacaagcccuuccagaacgucaaccgcaucaccuacggcgccugcccccgcuacgucaagcaguccacccucaagcucgccaccggcaugcgcaacguccccgagaagcagacccgcggcaucuucggcgccaucgccggcuucaucgagaacggcugggagggcaugaaggacggcugguacggcuuccgccaccagaacuccgagggccgcggccaggccgccgaccucaaguccacccaggccgccaucgaccagaucaacggcaagcucaaccgccucaucggcaagaccaacgagaaguuccaccagaucgagaaggaguucuccgaggucgagggccgcauccaggaccucgagaaguacgucgaggacaccaagaucgaccucugguccuacaacgccgagcuccucgucgcccucgagaaccagcacaccaucgaccucaccgacuccgagaugaacaagcucuucgagaagaccaagaagcagaugcgcgagaacgccgaggacaugggcaacggcugcuucaagaucuaccacaagugcgacaacgccugcaucggcuccauccgcaacggcaccuacgaccacgacgucuaccgcgacgaggcccucaacaaccgcuuccagaucaagggcgucgagcucaaguccggcuacaaggacuggauccucuggaucuccuucgccaucuccugcuuccuccucugcgucgcccuccucggcuucaucaugugggccugccagaagggcaacauccgcugcaacaucugcaucuga

SEQ ID NO: 109052 - RNA, 1701 nt, Artificial Sequence; identical to SEQ ID NO: 108477
  derived and/or modified CDS sequence (opt2) from hemagglutinin__InfluenzaA__ALA08529

SEQ ID NO: 109053 - RNA, 1701 nt, Artificial Sequence; identical to SEQ ID NO: 108477
  derived and/or modified CDS sequence (opt2) from hemagglutinin__InfluenzaA__ALA08530

SEQ ID NO: 109054 - RNA, 1701 nt, Artificial Sequence
  derived and/or modified CDS sequence (opt2) from hemagglutinin__InfluenzaA__ALA08531
augaagaccaucaucgcccucuccuacauccucugccucgucuucgcccagaagcuccccgagaacgacaacuccaccgccacccucugccucggccaccacgccguccccaacggcaccaucgucaagaccaucaccuccgaccgcaucgaggucaccaacgccaccgagcucguccagaacuccuccaucggcgagaucugcgacuccccccaccagauccucgacggcaagaacugcacccucaucgacgcccuccucggcgacccccagugcgacggcuuccagaacaagaagugggaccucuucgucgagcgcuccaaggccuacuccaacugcuaccccuacgacguccccgacuacgccucccuccgcucccucgucgccuccuccggcacccucgaguucaacgacgaguccuucaacugggccggcgucacccagaacggcaccuccuccgccugcauccgcggcuccaacuccuccuucuucucccgccucaacuggcucacccacuccaacuucaaguaccccgcccucaacgucaccaugcccaacaacgagcaguucgacaagcucuacaucuggggcguccaccaccccggcaccgacaaggaccagaucuuccucuacgcccaguccuccggccgcaucaccgucuccaccaagcgcucccagcaggccgucauccccaacaucggcucccgcccccgcauccgcaacauccccucccgcaucuccaucuacuggaccaucgucaagcccggcgacauccuccucaucaacuccaccggcaaccucaucgccccccgcggcuacuucaagauccgcuccggcaaguccuccaucaugcgcuccgacgcccccaucggcaagugcaaguccgagugcaucacccccaacggcuccauccccaacgacaagcccuuccagaacgucaaccgcaucaccuacggcgccugcccccgcuacgucaagcaguccacccucaagcucgccaccggcaugcgcaacguccccgagaagcagacccgcggcaucuucggcgccaucgccggcuucaucgagaacggcugggagggcaugaaggacggcugguacggcuuccgccaccagaacuccgagggccgcggccaggccgccgaccucaaguccacccaggccgccaucgaccagaucaacggcaagcucaaccgccucaucggcaagaccaacgagaaguuccaccagaucgagaaggaguucuccgaggucgagggccgcauccaggaccucgagaaguacgucgaggacaccaagaucgaccucugguccuacaacgccgagcuccucgucgcccucgagaaccagcacaccaucgaccucaccgacuccgagaugaacaagcucuucgagaagaccaagaagcagcuccgcgagaacgccgaggacaugggcaacggcugcuucaagaucuaccacaagugcgacaacgccugcaucggcuccauccgcaacggcaccuacaaccacgacgucuaccgcgacgaggcccucaacaaccgcuuccagaucaagggcgucgagcucaaguccggcuacaaggacuggauccucuggaucuccuucgccaucuccugcuuccuccucugcgucgcccuccucggcuucaucaugugggccugccagaagggcaacauccgcugcaacaucugcaucuga

SEQ ID NO: 109055 - RNA, 1701 nt, Artificial Sequence; identical to SEQ ID NO: 108477
  derived and/or modified CDS sequence (opt2) from hemagglutinin__InfluenzaA__ALA08532

SEQ ID NO: 109056 - RNA, 1701 nt, Artificial Sequence; identical to SEQ ID NO: 108477
  derived and/or modified CDS sequence (opt2) from hemagglutinin__InfluenzaA__ALA08533

SEQ ID NO: 109057 - RNA, 1701 nt, Artificial Sequence; identical to SEQ ID NO: 108477
  derived and/or modified CDS sequence (opt2) from hemagglutinin__InfluenzaA__ALA08534

SEQ ID NO: 109058 - RNA, 1701 nt, Artificial Sequence; identical to SEQ ID NO: 108477
  derived and/or modified CDS sequence (opt2) from hemagglutinin__InfluenzaA__ALA08535

SEQ ID NO: 109059 - RNA, 1701 nt, Artificial Sequence; identical to SEQ ID NO: 109034
  derived and/or modified CDS sequence (opt2) from hemagglutinin__InfluenzaA__ALA08536

SEQ ID NO: 109060 - RNA, 1701 nt, Artificial Sequence; identical to SEQ ID NO: 109034
  derived and/or modified CDS sequence (opt2) from hemagglutinin__InfluenzaA__ALA08537

SEQ ID NO: 109061 - RNA, 1701 nt, Artificial Sequence; identical to SEQ ID NO: 109034
  derived and/or modified CDS sequence (opt2) from hemagglutinin__InfluenzaA__ALA08538

SEQ ID NO: 109062 - RNA, 1701 nt, Artificial Sequence; identical to SEQ ID NO: 108477
  derived and/or modified CDS sequence (opt2) from hemagglutinin__InfluenzaA__ALA08539

SEQ ID NO: 109063 - RNA, 1701 nt, Artificial Sequence; identical to SEQ ID NO: 109034
  derived and/or modified CDS sequence (opt2) from hemagglutinin__InfluenzaA__ALA08540

SEQ ID NO: 109064 - RNA, 1701 nt, Artificial Sequence; identical to SEQ ID NO: 109034
  derived and/or modified CDS sequence (opt2) from hemagglutinin__InfluenzaA__ALA08541

SEQ ID NO: 109065 - RNA, 1701 nt, Artificial Sequence; identical to SEQ ID NO: 109034
  derived and/or modified CDS sequence (opt2) from hemagglutinin__InfluenzaA__ALA08542

SEQ ID NO: 109066 - RNA, 1701 nt, Artificial Sequence
  derived and/or modified CDS sequence (opt2) from hemagglutinin__InfluenzaA__ALA08543
augaagaccaucaucgcccucuccuacauccucugccucgucuucgcccagaagauccccggcaacgacaacuccaccgccacccucugccucggccaccacgccguccccaacggcaccaucgucaagaccaucaccaacgaccgcaucgaggucaccaacgccaccgagcucguccagaacuccuccaucggcgagaucugcgacuccccccaccagauccucgacggcgagaacugcacccucaucgacgcccuccucggcgacccccagugcgacggcuuccagaacaagaagugggaccucuucgucgagcgcuccaaggccuacuccaacugcuaccccuacgacguccccgacuacgccucccuccgcucccucgucgccuccuccggcacccucgaguucaacaacgaguccuucaacuggaccggcgucacccagaacggcaccuccuccgccugcauccgccgcuccuccuccuccuucuucucccgccucaacuggcucacccaccucaacuacaccuaccccgcccucaacgucaccaugcccaacaacgagcaguucgacaagcucuacaucuggggcguccaccaccccggcaccgacaaggaccagaucuuccucuacgcccaguccuccggccgcaucaccgucuccaccaagcgcucccagcaggccgccauccccaacaucggcucccgcccccgcauccgcgacauccccucccgcaucuccaucuacuggaccaucgucaagcccggcgacauccuccucaucaacuccaccggcaaccucaucgccccccgcggcuacuucaagauccgcuccggcaaguccuccaucaugcgcuccgacgcccccaucggcaagugcaaguccgagugcaucacccccaacggcuccauccccaacgacaagcccuuccagaacgucaaccgcaucaccuacggcgccugcccccgcuacgucaagcacuccacccucaagcucgccaccggcaugcgcaacguccccgagaagcagacccgcggcaucuucggcgccaucgccggcuucaucgagaacggcugggagggcauggucgacggcugguacggcuuccgccaccagaacuccgagggccgcggccaggccgccgaccucaaguccacccaggccgccaucgaccagaucaacggcaagcucaaccgccucaucggcaagaccaacgagaaguuccaccagaucgagaaggaguucuccgaggucgagggccgcauccaggaccucgagaaguacgucgaggacaccaagaucgaccucugguccuacaacgccgagcuccucgucgcccucgagaaccagcacaccaucgaccucaccgacuccgagaugaacaagcucuucgagaagaccaagaagcagcuccgcgagaacgccgaggacaugggcaacggcugcuucaagaucuaccacaagugcgacaacgccugcaucggcuccauccgcaacggcaccuacgaccacaacgucuaccgcgacgaggcccucaacaaccgcuuccagaucaagggcgucgagcucaaguccggcuacaaggacuggauccucuggaucuccuucgccaucuccugcuuccuccucugcgucgcccuccucggcuucaucaugugggccugccagaagggcaacauccgcugcaacaucugcaucuga

SEQ ID NO: 109067 - RNA, 1701 nt, Artificial Sequence; identical to SEQ ID NO: 108477
  derived and/or modified CDS sequence (opt2) from hemagglutinin__InfluenzaA__ALA08545

SEQ ID NO: 109068 - RNA, 1701 nt, Artificial Sequence; identical to SEQ ID NO: 108477
  derived and/or modified CDS sequence (opt2) from hemagglutinin__InfluenzaA__ALA08546

SEQ ID NO: 109069 - RNA, 1701 nt, Artificial Sequence
  derived and/or modified CDS sequence (opt2) from hemagglutinin__InfluenzaA__ALA08548
augaagaccaucaucgcccucuccuacauccucugccucgucuucgcccagaagcuccccgagaacgacaacuccaccgccacccucugccucggccaccacgccguccccaacggcaccaucgucaagaccaucaccuccgaccgcaucgaggucaccaacgccaccgagcucguccagaacuccuccaucggcgagaucugcgacuccccccaccagauccucgacggcaagaacugcacccucaucgacgcccuccucggcgacccccagugcgacggcuuccagaacaagaagugggaccucuucgucgagcgcuccaaggccuacuccaacugcuaccccuacgacguccccgacuacgccucccuccgcucccucgucgccuccuccggcacccucgaguucaacgacgaguccuucaacugggccggcgucgcccagaacggcaccuccuccgccugcauccgcggcuccaacuccuccuucuucucccgccucaacuggcucacccacuccaacuucaaguaccccgcccucaacgucaccaugcccaacaacgagcaguucgacaagcucuacaucuggggcguccaccaccccggcaccgacaaggaccagaucuuccucuacgcccaguccuccggccgcaucaccgucuccaccaagcgcucccagcaggccgucauccccaacaucggcucccgcccccgcauccgcaacauccccucccgcaucuccaucuacuggaccaucgucaagcccggcgacauccuccucaucaacuccaccggcaaccucaucgccccccgcggcuacuucaagauccgcuccggcaaguccuccaucaugcgcuccgacgcccccaucggcaagugcaaguccgagugcaucacccccaacggcuccauccccaacgacaagcccuuccagaacgucaaccgcaucaccuacggcgccugcccccgcuacgucaagcaguccacccucaagcucgccaccggcaugcgcaacguccccgagaagcagacccgcggcaucuucggcgccaucgccggcuucaucgagaacggcugggagggcaugaaggacggcugguacggcuuccgccaccagaacuccgagggccgcggccaggccgccgaccucaaguccacccaggccgccaucgaccagaucaacggcaagcucaaccgccucaucggcaagaccaacgagaaguuccaccagaucgagaaggaguucuccgaggucgagggccgcauccaggaccucgagaaguacgucgaggacaccaagaucgaccucugguccuacaacgccgagcuccucgucgcccucgagaaccagcacaccaucgaccucaccgacuccgagaugaacaagcucuucgagaagaccaagaagcagcuccgcgagaacgccgaggacaugggcaacggcugcuucaagaucuaccacaagugcgacaacgccugcaucggcuccauccgcaacggcaccuacgaccacgacgucuaccgcgacgaggcccucaacaaccgcuuccagaucaagggcgucgagcucaaguccggcuacaaggacuggauccucuggaucuccuucgccaucuccugcuuccuccucugcgucgcccuccucggcuucaucaugugggccugccagaagggcaacauccgcugcaacaucugcaucuga

SEQ ID NO: 109070 - RNA, 1701 nt, Artificial Sequence
  derived and/or modified CDS sequence (opt2) from hemagglutinin__InfluenzaA__ALA08549
augaagaccaucaucgcccucuccuacauccucugccucgucuucgcccagaagauccccggcaacgacaacuccaccgccacccucugccucggccaccacgccguccccaacggcaccaucgucaagaccaucaccaacgaccgcaucgaggucaccaacgccaccgagcucguccagaacuccuccaccggcgucaucugcgacuccccccaccagauccucgacggcgagaacugcacccucaucgacgcccuccucggcgacccccagugcgacggcuuccagaacaagaagugggaccucuucgucgagcgcuccaaggccuacuccaacugcuaccccuacgacguccccgacuacgccucccuccgcucccucgucgccuccuccggcacccucgaguucaacaacgaguccuucaacuggaccggcgucacccagaacggcaccuccuccgccugcauccgccgcuccuccuccuccuucuucucccgccucaacuggcucacccaccucaacuacaccuaccccgcccucaacgucaccaugcccaacaacgagcaguucgacaagcucuacaucuggggcguccaccaccccggcaccgacaaggaccagaucuuccucuacgcccaguccuccggccgcaucaccgucuccaccaagggcucccagcaggccgucauccccaacaucggcucccgcccccgcauccgcgacauccccucccgcaucuccaucuacuggaccaucgucaagcccggcgacauccuccucaucaacuccaccggcaaccucaucgccccccgcggcuacuucaagauccgcuccggcaaguccuccaucaugcgcuccgacgcccccaucggcaagugcaaguccgagugcaucacccccaacggcuccauccccaacgacaagcccuuccagaacgucaaccgcaucaccuacggcgccugcccccgcuacgucaagcacuccacccucaagcucgccaccggcaugcgcaacguccccgagaagcagacccgcggcaucuucggcgccaucgccggcuucaucgagaacggcugggagggcauggucgacggcugguacggcuuccgccaccagaacuccgagggccgcggccaggccgccgaccucaaguccacccaggccgccaucgaccagaucaacggcaagcucaaccgccucaucggcaagaccaacgagaaguuccaccagaucgagaaggaguucuccgaggucgagggccgcauccaggaccucgagaaguacgucgaggacaccaagaucgaccucugguccuacaacgccgagcuccucgucgcccucgagaaccagcacaccaucgaccucaccgacuccgagaugaacaagcucuucgagaagacccgcaagcagcuccgcgagaacgccgaggacaugggcaacggcugcuucaagaucuaccacaagugcgacaacgccugcaucggcuccauccgcaacggcaccuacgaccacaacgucuaccgcgacgaggcccucaacaaccgcuuccagaucaagggcgucgagcucaaguccggcuacaaggacuggauccucuggaucuccuucgccaucuccugcuuccuccucugcgucgcccuccucggcuucaucaugugggccugccagaagggcaacauccgcugcaacaucugcaucuga

SEQ ID NO: 109071 - RNA, 1701 nt, Artificial Sequence; identical to SEQ ID NO: 109034
  derived and/or modified CDS sequence (opt2) from hemagglutinin__InfluenzaA__ALA08550

SEQ ID NO: 109072 - RNA, 1701 nt, Artificial Sequence
  derived and/or modified CDS sequence (opt2) from hemagglutinin__InfluenzaA__ALA08551
augaagaccaucaucgcccucuccuacauccucugccucgucuucgcccagaagcuccucgagaacgacaacuccaccgccacccucugccucggccaccacgccguccccaacggcaccaucgucaagaccaucaccuccgaccgcaucgaggucaccaacgccaccgagcucguccagaacuccuccaucggcgagaucugcgacuccccccaccagauccucgacggcaagaacugcacccucaucgacgcccuccucggcgacccccagugcgacggcuuccagaacaagaagugggaccucuucgucgagcgcuccaaggccuacuccaacugcuaccccuacgacguccccgacuacgccucccuccgcucccucgucgccuccuccggcacccucgaguucaacgacgaguccuucaacugggccggcgucacccagaacggcaccuccuccgccugcauccgcggcuccaacuccuccuucuucucccgccucaacuggcucacccacuccaacuucaaguaccccgcccucaacgucaccaugcccaacaacgagcaguucgacaagcucuacaucuggggcguccaccaccccggcaccgacaaggaccagaucuuccucuacgcccaguccuccggccgcaucaccgucuccaccaagcgcucccagcaggccgucauccccaacaucggcucccgcccccgcauccgcaacauccccucccgcaucuccaucuacuggaccaucgucaagcccggcgacauccuccucaucaacuccaccggcaaccucaucgccccccgcggcuacuucaagauccgcuccggcaaguccuccaucaugcgcuccgacgcccccaucggcaagugcaaguccgagugcaucacccccaacggcuccauccccaacgacaagcccuuccagaacgucaaccgcaucaccuacggcgccugcccccgcuacgucaagcaguccacccucaagcucgccaccggcaugcgcaacguccccgagaagcagacccgcggcaucuucggcgccaucgccggcuucaucgagaacggcugggagggcaugaaggacggcugguacggcuuccgccaccagaacuccgagggccgcggccaggccgccgaccucaaguccacccaggccgccaucgaccagaucaacggcaagcucaaccgccucaucggcaagaccaacgagaaguuccaccagaucgagaaggaguucuccgaggucgagggccgcauccaggaccucgagaaguacgucgaggacaccaagaucgaccucugguccuacaacgccgagcuccucgucgcccucgagaaccagcacaccaucgaccucaccgacuccgagaugaacaagcucuucgagaagaccaagaagcagcuccgcgagaacgccgaggacaugggcaacggcugcuucaagaucuaccacaagugcgacaacgccugcaucggcuccauccgcaacggcaccuacgaccacaacgucuaccgcgacgaggcccucaacaaccgcuuccagaucaagggcgucgagcucaaguccggcuacaaggacuggauccucuggaucuccuucgccaucuccugcuuccuccucugcgucgcccuccucggcuucaucaugugggccugccagaagggcaacauccgcugcaacaucugcaucuga

SEQ ID NO: 109073 - RNA, 1701 nt, Artificial Sequence; identical to SEQ ID NO: 109034
  derived and/or modified CDS sequence (opt2) from hemagglutinin__InfluenzaA__ALA08552

SEQ ID NO: 109074 - RNA, 1701 nt, Artificial Sequence; identical to SEQ ID NO: 109034
  derived and/or modified CDS sequence (opt2) from hemagglutinin__InfluenzaA__ALA08553

SEQ ID NO: 109075 - RNA, 1701 nt, Artificial Sequence
  derived and/or modified CDS sequence (opt2) from hemagglutinin__InfluenzaA__ALA08554
augaagaccaucaucgcccucuccuacauccucugccucgucuucgcccagaagauccccggcaacgacaacuccaccgccacccucugccucggccaccacgccguccccaacggcaccaucgucaagaccaucaccaacgaccgcaucgaggucaccaacgccaccgagcucguccagaacuccuccaucggcgagaucugcgacuccccccaccagauccucgacggcgagaacugcacccucaucgacgcccuccucggcgacccccagugcgacggcuuccagaacaagaagugggaccucuucgucgagcgcuccaaggccuacuccaacugcuaccccuacgacguccccgacuacgccucccuccgcucccucgucgccuccuccggcacccucgaguucaacaacgaguccuucaacuggaccggcgucacccagaacggcaccuccuccgccugcauccgccgcuccuccuccuccuucuucucccgccucaacuggcucacccaccucaacuacaccuaccccgcccucaacgucaccaugcccaacaacgagcaguucgacaagcucuacaucuggggcguccaccaccccggcaccgacaaggaccagaucuuccucuacgcccaguccuccggccgcaucaccgucuccaccaagcgcucccagcaggccgucauccccaacaucggcucccgcccccgcauccgcgacauccccucccgcaucuccaucuacuggaccaucgucaagcccggcgacauccuccucaucaacuccaccggcaaccucaucgccccccgcggcuacuucaagauccgcuccggcaaguccuccaucaugcgcuccgacgcccccaucggcaagugcaaguccgagugcaucacccccaacggcuccauccccaacgacaagcccuuccagaacgucaaccgcaucaccuacggcgccugcccccgcuacgucaagcacuccacccucaagcucgccaccggcaugcgcaacguccccgagaagcagacccgcggcaucuucggcgccaucgccggcuucaucgagaacggcugggagggcauggucgacggcugguacggcuuccgccaccagaacuccgagggccgcggccaggccgccgaccucaaguccacccaggccgccaucgaccagaucaacggcaagcucaaccgccucaucggcaagaccaacgagaaguuccaccagaucgagaaggaguucuccgaggucgagggccgcauccaggaccucgagaaguacgucgaggacaccaagaucgaccucugguccuacaacgccgagcuccucgucgcccucgagaaccagcacaccaucgaccucaccgacuccgagaugaacaagcucuucgagaagaccaagaagcagcuccgcgagaacgccgaggacaugggcaacggcugcuucaagaucuaccacaagugcgacaacgccugcaucggcuccauccgcaacggcaccuacgaccacaacgucuaccgcgacgaggcccucaacaaccgcuuccagaucaagggcgucgagcucauguccggcuacaaggacuggauccucuggaucuccuucgccaucuccugcuuccuccucugcgucgcccuccucggcuucaucaugugggccugccagaagggcaacauccgcugcaacaucugcaucuga

SEQ ID NO: 109076 - RNA, 1701 nt, Artificial Sequence
  derived and/or modified CDS sequence (opt2) from hemagglutinin__InfluenzaA__ALA08555
augaagaccaucaucgcccucuccuacauccucugccucgucuucgcccagaagcuccccgagaacgacaacuccaccgccacccucugccucggccaccacgccguccccaacggcaccaucgucaagaccaucaccuccgaccagaucgaggucaccaacgccaccgagcucguccagaacuccuccaucggcgagaucugcgacuccccccaccagauccucgacggcaagaacugcacccucaucgacgcccuccucggcgacccccagugcgacggcuuccagaacaagaagugggaccucuucgucgagcgcuccaaggccuacuccaacugcuaccccuacgacguccccgacuacgccucccuccgcucccucgucgccuccuccggcacccucgaguucaacgacgaguccuucaacugggccggcgucacccagaacggcaccuccuccgccugcauccgcggcuccaacuccuccuucuucucccgccucaacuggcucacccacuccaacuucaaguaccccgcccucaacgucaccaugcccaacaacgagcaguucgacaagcucuacaucuggggcguccaccaccccggcaccgacaaggaccagaucuuccucuacgcccaguccuccggccgcaucaccgucuccaccaagcgcucccagcaggccgucauccccuccaucggcucccgcccccgcauccgcaacauccccucccgcaucuccaucuacuggaccaucgucaagcccggcgacauccuccucaucaacuccaccggcaaccucaucgccccccgcggcuacuucaagauccgcuccggcaaguccuccaucaugcgcuccgacgcccccaucggcaagugcaaguccgagugcaucacccccaacggcuccauccccaacgacaagcccuuccagaacgucaaccgcaucaccuacggcgccugcccccgcuacgucaagcaguccacccucaagcucgccaccggcaugcgcaacguccccgagaagcagacccgcggcaucuucggcgccaucgccggcuucaucgagaacggcugggagggcaugaaggacggcugguacggcuuccgccaccagaacuccgagggccgcggccaggccgccgaccucaaguccacccaggccgccaucgaccagaucaacggcaagcucaaccgccucaucggcaagaccaacgagaaguuccaccagaucgagaaggaguucuccgaggucgagggccgcauccaggaccucgagaaguacgucgaggacaccaagaucgaccucugguccuacaacgccgagcuccucgucgcccucgagaaccagcacaccaucgaccucaccgacuccgagaugaacaagcucuucgagaagaccaagaagcagcuccgcgagaacgccgaggacaugggcaacggcugcuucaagaucuaccacaagugcgacaacgccugcaucggcuccauccgcaacggcaccuacgaccacaacgucuaccgcgacgaggcccucaacaaccgcuuccagaucaagggcgucgagcucaaguccggcuacaaggacuggauccucuggaucuccuucgccaucuccugcuuccuccucugcgucgcccuccucggcuucaucaugugggccugccagaagggcaacauccgcugcaacaucugcaucuga

SEQ ID NO: 109077 - RNA, 1701 nt, Artificial Sequence
  derived and/or modified CDS sequence (opt2) from hemagglutinin__InfluenzaA__ALA08556
augaagaccaucaucgcccucuccuacauccucugccucgucuucgcccagaagauccccggcaacgacaacuccaccgccacccucugccucggccaccacgccguccccaacggcaccaucgucaagaccaucaccaacgaccgcaucgaggucaccaacgccaccgagcucguccagaacuccuccaucggcgagaucugcgacuccccccaccagauccucgacggcgagaacugcacccucaucgacgcccuccucggcgacccccagugcgacggcuuccagaacaagaagugggaccucuucgucgagcgcuccaaggccuacuccaacugcuaccccuacgacguccccgacuacgccucccuccgcucccucgucgccuccuccggcacccucgaguucaacaacgaguccuucaacuggaccggcaucacccagaacggcaccuccuccgccugcauccgccgcuccuccuccuccuucuucucccgccucaacuggcucacccaccucaacuacaccuaccccgcccucaacgucaccaugcccaacaacgagcaguucgacaagcucuacaucuggggcguccaccaccccggcaccgacaaggaccagaucuuccucuacgcccaguccuccggccgcaucaccgucuccaccaagcgcucccagcaggccgucauccccaacaucggcucccgcccccgcauccgcgacauccccucccgcaucuccaucuacuggaccaucgucaagcccggcgacauccuccucaucaacuccaccggcaaccucaucgccccccgcggcuacuucaagauccgcuccggcaaguccuccaucaugcgcuccgacgcccccaucggcaagugcaaguccgagugcaucacccccaacggcuccauccccaacgacaagcccuuccagaacgucaaccgcaucaccuacggcgccugcccccgcuacgucaagcacuccacccucaagcucgccaccggcaugcgcaacguccccgagaagcagacccgcggcaucuucggcgccaucgccggcuucaucgagaacggcugggagggcauggucgacggcugguacggcuuccgccaccagaacuccgagggccgcggccaggccgccgaccucaaguccacccaggccgccaucgaccagaucaacggcaagcucaaccgccucaucggcaagaccaacgagaaguuccaccagaucgagaaggaguucuccgaggucgagggccgcauccaggaccucgagaaguacgucgaggacaccaagaucgaccucugguccuacaacgccgagcuccucgucgcccucgagaaccagcacaccaucgaccucaccgacuccgagaugaacaagcucuucgagaagaccaagaagcagcuccgcgagaacgccgaggacaugggcaacggcugcuucaagaucuaccacaagugcgacaacgccugcaucggcuccauccgcaacggcaccuacgaccacaacgucuaccgcgacgaggcccucaacaaccgcuuccagaucaagggcgucgagcucaaguccggcuacaaggacuggauccucuggaucuccuucgccaucuccugcuuccuccucugcgucgcccuccucggcuucaucaugugggccugccagaagggcaacauccgcugcaacaucugcaucuga

SEQ ID NO: 109078 - RNA, 1701 nt, Artificial Sequence; identical to SEQ ID NO: 109034
  derived and/or modified CDS sequence (opt2) from hemagglutinin__InfluenzaA__ALA08557

SEQ ID NO: 109079 - RNA, 1701 nt, Artificial Sequence; identical to SEQ ID NO: 109034
  derived and/or modified CDS sequence (opt2) from hemagglutinin__InfluenzaA__ALA08558

SEQ ID NO: 109080 - RNA, 1701 nt, Artificial Sequence
  derived and/or modified CDS sequence (opt2) from hemagglutinin__InfluenzaA__ALA08559
augaagaccaucaucgcccucuccuacauccucugccucgucuucgcccagaagauccccggcaacgacaacuccaccgccacccucugccucggccaccacgccguccccaacggcaccaucgucaagaccaucaccaacgaccgcaucgaggucaccaacgccaccgagcucguccagaacuccuccaucggcgagaucugcgacuccccccaccagauccucgacggcgagaacugcacccucaucgacgcccuccucggcgacccccagugcgacggcuuccagaacaagaagugggaccucuucgucgagcgcuccaaggccuacuccaacugcuaccccuacgacguccccgacuacgccucccuccgcucccucgucgccuccuccggcacccucgaguucaacaacgaguccuucaacuggaccggcgucacccagaacggcaccuccuccgccugcauccgccgcuccuccuccuccuucuucucccgccucaacuggcucacccaccucaacuacaccuaccccgcccucaacgucaccaugcccaacaacgagcaguucgacaagcucuacaucuggggcguccaccaccccggcaccgacaaggaccagaucuuccucuacgcccgcuccuccggccgcaucaccgucuccaccaagggcucccagcaggccgucauccccaacaucggcucccgcccccgcauccgcgacauccccucccgcaucuccaucuacuggaccaucgucaagcccggcgacauccuccucaucaacuccgccggcaaccucaucgccccccgcggcuacuucaagauccgcuccggcaaguccuccaucaugcgcuccgacgcccccaucggcaagugcaaguccgagugcaucacccccaacggcuccauccccaacgacaagcccuuccagaacgucaaccgcaucaccuacggcgccugcccccgcuacgucaagcacuccacccucaagcucgccaccggcaugcgcaacguccccgagaagcagacccgcggcaucuucggcgccaucgccggcuucaucgagaacggcugggagggcauggucgacggcugguacggcuuccgccaccagaacuccgagggccgcggccaggccgccgaccucaaguccacccaggccgccaucgaccagaucaacggcaagcucaaccgccucaucggcaagaccaacgagaaguuccaccagaucgagaaggaguucuccgaggucgagggccgcauccaggaccucgagaaguacgucgaggacaccaagaucgaccucugguccuacaacgccgagcuccucgucgcccucgagaaccagcacaccaucgaccucaccgacuccgagaugaacaagcucuucgagaagaccaagaagcagcuccgcgagaacgccgaggacaugggcaacggcugcuucaagaucuaccacaagugcgacaacgccugcaucggcuccauccgcaacggcaccuacgaccacaacgucuaccgcgacgaggcccucaacaaccgcuuccagaucaagggcgucgagcucaaguccggcuacaaggacuggauccucuggaucuccuucgccaucuccugcuuccuccucugcgucgcccuccucggcuucaucaugugggccugccagaagggcaacauccgcugcaacaucugcaucuga

SEQ ID NO: 109081 - RNA, 1701 nt, Artificial Sequence; identical to SEQ ID NO: 108477
  derived and/or modified CDS sequence (opt2) from hemagglutinin__InfluenzaA__ALA08560

SEQ ID NO: 109082 - RNA, 1701 nt, Artificial Sequence
  derived and/or modified CDS sequence (opt2) from hemagglutinin__InfluenzaA__ALA08561
augaagaccaucaucgcccucuccuacauccucugccucgucuucgcccagaagauccccggcaacgacaacuccaccgccacccucugccucggccaccacgccguccccaacggcaccaucgucaagaccaucaccaacgaccgcaucgaggucaccaacgccaccgagcucguccagaacuccuccaucggcgagaucugcgacuccccccaccagauccucgacggcgagaacugcacccucaucgacgcccuccucggcgacccccagugcgacggcuuccagaacaagaagugggaccucuucgucgagcgcuccaaggccuacuccaacugcuaccccuacgacguccccgacuacgccucccuccgcucccucgucgccuccuccggcacccucgaguucaacaacgaguccuucaacuggaccggcgucacccagaacggcaccuccuccgccugcauccgccgcuccuccuccuccuucuucucccgccucaacuggcucacccaccucaacuacaaguaccccgcccucaacgucaccaugcccaacaaggagcaguucgacaagcucuacaucuggggcguccaccaccccggcaccgacaaggaccagaucuuccucuacgcccaguccuccggccgcaucaccgucuccaccaagcgcucccagcaggccgucauccccaacaucggcucccgcccccgcauccgcgacauccccucccgcaucuccaucuacuggaccaucgucaagcccggcgacauccuccucaucaacuccaccggcaaccucaucgccccccgcggcuacuucaagauccgcuccggcaaguccuccaucaugcgcuccgacgcccccaucggcaagugcaaguccgagugcaucacccccaacggcuccauccccaacgacaagcccuuccagaacgucaaccgcaucaccuacggcgccugcccccgcuacgucaagcacuccacccucaagcucgccaccggcaugcgcaacguccccgagaagcagacccgcggcaucuucggcgccaucgccggcuucaucgagaacggcugggagggcauggucgacggcugguacggcuuccgccaccagaacuccgagggccgcggccaggccgccgaccucaaguccacccaggccgccaucgaccagaucaacggcaagcucaaccgccucaucggcaagaccaacgagaaguuccaccagaucgagaaggaguucuccgaggucgagggccgcauccaggaccucgagaaguacgucgaggacaccaagaucgaccucugguccuacaacgccgagcuccucgucgcccucgagaaccagcacaccaucgaccucaccgacuccgagaugaacaagcucuucgagaagaccaagaagcagcuccgcgagaacgccgaggacaugggcaacggcugcuucaagaucuaccacaagugcgacaacgccugcaucggcuccauccgcaacggcaccuacgaccacaacgucuaccgcgacgaggcccucaacaaccgcuuccagaucaagggcgucgagcucaaguccggcuacaaggacuggauccucuggaucuccuucgccaucuccugcuuccuccucugcgucgcccuccucggcuucaucaugugggccugccagaagggcaacauccgcugcaacaucugcaucuga

SEQ ID NO: 109083 - RNA, 1701 nt, Artificial Sequence
  derived and/or modified CDS sequence (opt2) from hemagglutinin__InfluenzaA__ALA08563
augaagaccaucaucgcccucuccuacauccucugccucgucuucgcccagaagauccccggcaacgacaacuccaccgccacccucugccucggccaccacgccguccccaacggcaccaucgucaagaccaucaccaacgaccgcaucgaggucaccaacgccaccgagcucguccagaacuccuccaucggcgagaucugcgacuccccccaccagauccucgacggcgagaacugcacccucaucgacgcccuccucggcgacccccagugcgacggcuuccagaacaagaagugggaccucuucgucgagcgcuccaaggccuacuccaacugcuaccccuacgacguccccgacuacgccucccuccgcucccucgucgccuccuccggcacccucgaguucaacaacgaguccuucaacuggaccggcgucacccagaacggcaccuccuccgccugcauccgccgcuccuccuccuccuucuucucccgccucaacuggcucacccaccucaacuacaccuaccccgcccucaacgucaccaugcccaacaacgagcaguucgacaagcucuacaucuggggcguccaccaccccggcaccgacaaggaccagaucuuccucuacgcccaguccuccggccgcaucaccgucuccaccaagcgcucccagcaggccgucauccccaacaucggcucccgcccccgcauccgcgacauccccucccgcaucuccaucuacuggaccaucgucaagcccggcgacauccuccucaucaacuccaccggcaaccucaucgccccccgcggcuacuucaagauccucuccggcaaguccuccaucaugcgcuccgacgcccccaucggcaagugcaaguccgagugcaucacccccaacggcuccauccccaacgacaagcccuuccagaacgucaaccgcaucaccuacggcgccugcccccgcuacgucaagcacuccacccucaagcucgccaccggcaugcgcaacguccccgagaagcagacccgcggcaucuucggcgccaucgccggcuucaucgagaacggcugggagggcauggucgacggcugguacggcuuccgccaccagaacuccgagggccgcggccaggccgccgaccucaaguccacccaggccgccaucgaccagaucaacggcaagcucaaccgccucaucggcaagaccaacgagaaguuccaccagaucgagaaggaguucuccgaggucgagggccgcauccaggaccucgagaaguacgucgaggacaccaagaucgaccucugguccuacaacgccgagcuccucgucgcccucgagaaccagcacaccaucgaccucaccgacuccgagaugaacaagcucuucgagaagaccaagaagcagcuccgcgagaacgccgaggacaugggcaacggcugcuucaagaucuaccacaagugcgacaacgccugcaucggcuccauccgcaacggcaccuacgaccacaacgucuaccgcgacgaggcccucaacaaccgcuuccagaucaagggcgucgagcucaaguccggcuacaaggacuggauccucuggaucuccuucgccaucuccugcuuccuccucugcgucgcccuccucggcuucaucaugugggccugccagaagggcaacauccgcugcaacaucugcaucuga

SEQ ID NO: 109084 - RNA, 1701 nt, Artificial Sequence
  derived and/or modified CDS sequence (opt2) from hemagglutinin__InfluenzaA__ALA08571
augaagaccaucaucgcccucuccuacauccucugccucgucuucgcccagaagauccccggcaacgacaacuccaccgccacccucugccucggccaccacgccguccccaacggcaccaucgucaagaccaucaccaacgaccgcaucgaggucaccaacgccaccgagcucguccagaacuccuccaucggcgagaucugcgacuccccccaccagauccucgacggcgagaacugcacccucaucgacgcccuccucggcgacccccagugcgacggcuuccagaacaagaagugggaccucuucgucgagcgcuccaaggccuacuccaacugcuaccccuacgacguccccgacuacgccucccuccgcucccucgucgccuccuccggcacccucgaguucaacaacgaguccuucaacuggaccggcgucacccagaacggcaccuccuccgccugcauccgccgcuccuccuccuccuucuucucccgccucaacuggcucacccaccucaacuacaccuaccccgcccucaacgucaccaugcccaacaacgagcaguucgacaagcucuacaucuggggcguccaccaccccggcaccgacaaggaccagaucuuccucuacgcccaguccuccggccgcaucaccgucuccaccaagcgcucccagcaggccgucauccccaacaucggcucccgcccccgcauccgcgacauccccucccgcaucuccaucuacuggaccaucgucaagcccggcgacauccuccucaucaacuccaccggcaaccucaucgccccccgcggcuacuucaagauccgcuccggcaaguccuccaucaugcgcuccgacgcccccaucggcaagugcaaguccgagugcaucacccccaacggcuccauccccaacgacaagcccuuccagaacgucaaccgcaucaccuacggcgccugcccccgcuacgucaagcacuccacccucaagcucgccaccggcaugcgcaacguccccgagaagcagacccgcggcaucuucggcgccaucgccggcuucaucgagaacggcugggagggcauggucgacggcugguacggcuuccgccaccagaacuccgagggccgcggccaggccgccgaccucaaguccacccaggccgccaucgaccagaucaacggcaagcucaaccgccucaucggcaagaccaacgagaaguuccaccagaucgagaaggaguucuccgaggucgagggccgcauccaggaccucgagaaguacgucgaggacaccaagaucgaccucugguccuacaacgccgagcuccucgucgcccucgagaaccagcacaccaucgaccucaccgacuccgagaugaacaagcucuucgagaagaccaagaagcagcuccgcgagaacgccgaggacaugggcaacggcugcuucaagaucuaccacaagugcgacaacgccugcaucggcuccauccgcaacggcaccuacgaccacaacgucuaccgcgacgaggcccucaacaaccgcuuccagaucaagggcgucgagcucaaguccggcuacaaggacuggauccucuggaucuccuucgccaccuccugcuuccuccucugcgucgcccuccucggcuucaucaugugggccugccagaagggcaacauccgcugcaacaucugcaucuga

SEQ ID NO: 109085 - RNA, 1701 nt, Artificial Sequence; identical to SEQ ID NO: 109020
  derived and/or modified CDS sequence (opt2) from hemagglutinin__InfluenzaA__ALA08572

SEQ ID NO: 109086 - RNA, 1701 nt, Artificial Sequence; identical to SEQ ID NO: 109017
  derived and/or modified CDS sequence (opt2) from hemagglutinin__InfluenzaA__ALA08573

SEQ ID NO: 109087 - RNA, 1701 nt, Artificial Sequence
  derived and/or modified CDS sequence (opt2) from hemagglutinin__InfluenzaA__ALA08574
augaagaccaucaucgcccucuccuacauccucugccucgucuucgcccagaagauccccggcaacgacaacuccaccgccacccucugccucggccaccacgccguccccaacggcaccaucgucaagaccaucaccaacgaccgcaucgaggucaccaacgccaccgagcucguccagaacuccuccaucggcgagaucugcgacuccccccaccagauccucgacggcgagaacugcacccucaucgacgcccuccucggcgacccccagugcgacggcuuccagaacaagaagugggaccucuucgucgagcgcuccaaggccuacuccaacugcuaccccuacgacguccccgacuacgccucccuccgcucccucgucgccuccuccggcacccucgaguucaacaacgaguccuucaacuggaccggcgucacccagaacggcaccuccuccgccugcauccgccgcuccuccuccuccuucuucucccgccucaacuggcucacccaccucaacuacaccuaccccgcccucaacgucaccaugcccaacaacgagcaguucgacaagcucuacaucuggggcguccaccaccccggcaccgacaaggaccagaucuuccucuacgcccaguccuccggccgcaucaccgucuccaccaagcgcucccagcaggccgucauccccaacaucggcucccgcccccgcauccgcgacauccccucccgcaucuccaucuacuggaccaucgucaagcccggcgacauccuccucaucaacuccaccggcaaccucaucgccccccgcggcuacuucaagauccgcuccggcaaguccuccaucaugcgcuccgacgcccccaucggcaagugcaaguccgagugcaucacccccaacggcuccauccccaacgacaagcccuuccagaacgucaaccgcaucaccuacggcgccugcccccgcuacgucaagcacuccacccucaagcucgccaccggcaugcgcaacguccccgagaagcagacccgcggcaucuucggcgccaucgccggcuucaucgagaacggcugggagggcauggucgacggcugguacggcuuccgccaccagaacuccgagggccgcggccaggccgccgaccucaaguccacccaggccgccaucgaccagaucuccggcaagcucaaccgccucaucggcaagaccaacgagaaguuccaccagaucgagaaggaguucuccgaggucgagggccgcauccaggaccucgagaaguacgucgaggacaccaagaucgaccucugguccuacaacgccgagcuccucgucgcccucgagaaccagcacaccaucgaccucaccgacuccgagaugaacaagcucuucgagaagaccaagaagcagcuccgcgagaacgccgaggacaugggcaacggcugcuucaagaucuaccacaagugcgacaacgccugcaucggcuccauccgcaacggcaccuacgaccacaacgucuaccgcgacgaggcccucaacaaccgcuuccagaucaagggcgucgagcucaaguccggcuacaaggacuggauccucuggaucuccuucgccaucuccugcuuccuccucugcgucgcccuccucggcuucaucaugugggccugccagaagggcaacauccgcugcaacaucugcaucuga

SEQ ID NO: 109088 - RNA, 1701 nt, Artificial Sequence
  derived and/or modified CDS sequence (opt2) from hemagglutinin__InfluenzaA__ALA08575
augaagaccaucaucgcccucuccuacauccucugccucgucuucgcccagaagauccccggcaacgacaacuccaccgccacccucugccucggccaccacgccguccccaacggcaccaucgucaagaccaucaccaacgaccgcaucgaggucaccaacgccaccgagcucguccagaacuccuccaucggcgagaucugcgacuccccccaccagauccucgacggcgagaacugcacccucaucgacgcccuccucggcgacccccagugcgacggcuuccagaacaagaagugggaccucuucgucgagcgcuccaaggccuacuccaacugcuaccccuacgacguccccgacuacgccucccuccgcucccucgucgccuccuccggcacccucgaguucaacaacgaguccuucaacuggaccggcgucacccagaacggcaccuccuccgccugcauccgccgcuccuccuccuccuucuucucccgccucaacuggcucacccaccucaacuacaccuaccccgcccucaacgucaccaugcccaacaacgagcaguucgacaagcucuacaucuggggcguccaccaccccggcaccgacaaggaccagaucuuccucuacgcccaguccuccggccgcaucaccgucuccaccaagcgcucccagcaggccgucauccccaacaucggcucccgcccccgcauccgcgacauccccucccgcaucuccaucuacuggaccaucgucaagcccggcgacauccuccucaucaacuccaccggcaaccucaucgccccccgcggcuacuucaagauccgcuccggcaaguccuccaucaugcgcuccgacgcccccaucggcaagugcaaguccgagugcaucacccccaacggcuccauccccaacgacaagcccuuccagaacgucaaccgcaucaccuacggcgccugcccccgcuacgucaagcaguccacccucaagcucgccaccggcaugcgcaacguccccgagaagcagacccgcggcaucuucggcgccaucgccggcuucaucgagaacggcugggagggcauggucgacggcugguacggcuuccgccaccagaacuccgagggccgcggccaggccgccgaccucaaguccacccaggccgccaucgaccagaucaacggcaagcucaaccgccucaucggcaagaccaacgagaaguuccaccagaucgagaaggaguucuccgaggucgagggccgcauccaggaccucgagaaguacgucgaggacaccaagaucgaccucugguccuacaacgccgagcuccucgucgcccucgagaaccagcacaccaucgaccucaccgacuccgagaugaacaagcucuucgagaagaccaagaagcagcuccgcgagaacgccgaggacaugggcaacggcugcuucaagaucuaccacaagugcgacaacgccugcaucggcuccauccgcaacggcaccuacgaccacaacgucuaccgcgacgaggcccucaacaaccgcuuccagaucaagggcgucgagcucaaguccggcuacaaggacuggauccucuggaucuccuucgccaucuccugcuuccuccucugcgucgcccuccucggcuucaucaugugggccugccagaagggcaacauccgcugcaacaucugcaucuga

SEQ ID NO: 109089 - RNA, 1701 nt, Artificial Sequence; identical to SEQ ID NO: 108477
  derived and/or modified CDS sequence (opt2) from hemagglutinin__InfluenzaA__ALA08576

SEQ ID NO: 109090 - RNA, 1701 nt, Artificial Sequence; identical to SEQ ID NO: 108477
  derived and/or modified CDS sequence (opt2) from hemagglutinin__InfluenzaA__ALA08577

SEQ ID NO: 109091 - RNA, 1701 nt, Artificial Sequence
  derived and/or modified CDS sequence (opt2) from hemagglutinin__InfluenzaA__ALA08579
augaagaccaucaucgcccucuccuacauccucugccucaucuucgcccagaagauccccggcaacgacaacuccaccgccacccucugccucggccaccacgccguccccaacggcaccaucgucaagaccaucaccaacgaccgcaucgaggucaccaacgccaccgagcucguccagaacuccuccaucggcgagaucugcgacuccccccaccagauccucgacggcgagaacugcacccucaucgacgcccuccucggcgacccccagugcgacggcuuccagaacaagaagugggaccucuucgucgagcgcuccaaggccuacuccaacugcuaccccuacgacguccccgacuacgccucccuccgcucccucgucgccuccuccggcacccucgaguucaacaacgaguccuucaacuggaccggcgucacccagaacggcaccuccuccgccugcauccgcaaguccuccuccuccuucuucucccgccucaacuggcucacccaccucaacuacaccuaccccgcccucaacgucaccaugcccaacaacgagcaguucgacaagcucuacaucuggggcguccaccaccccggcaccgacaaggaccagaucuuccucuacgcccgcuccuccggccgcaucaccgucuccaccaagcgcucccagcaggccgucauccccaacaucggcucccgcccccgcauccgcgacauccccucccgcaucuccaucuacuggaccaucgucaagcccggcgacauccuccucaucaacuccaccggcaaccucaucgccccccgcggcuacuucaagauccgcuccggcaaguccuccaucaugcgcuccgacgcccccaucggcaagugcaaguccgagugcaucacccccaacggcuccauccccaacgacaagcccuuccagaacgucaaccgcaucaccuacggcgccugcccccgcuacgucaagcacuccacccucaagcucgccaccggcaugcgcaacguccccgagaagcagacccgcggcaucuucggcgccaucgccggcuucaucgagaacggcugggagggcauggucgacggcugguacggcuuccgccaccagaacuccgagggccgcggccaggccgccgaccucaaguccacccaggccgccaucgaccagaucaacggcaagcucaaccgccucaucggcaagaccaacgagaaguuccaccagaucgagaaggaguucuccgaggucgagggccgcauccaggaccucgagaaguacgucgaggacaccaagaucgaccucugguccuacaacgccgagcuccucgucgcccucgagaaccagcacaccaucgaccucaccgacuccgagaugaacaagcucuucgagaagaccaagaagcagcuccgcgagaacgccgaggacaugggcaacggcugcuucaagaucuaccacaagugcgacaacgccugcaucggcuccauccgcaacggcaccuacgaccacaacgucuaccgcgacgaggcccucaacaaccgcuuccagaucaagggcgucgagcucaaguccggcuacaaggacuggauccucuggaucuccuucgccaucuccugcuuccuccucugcgucgcccuccucggcuucaucaugugggccugccagaagggcaacauccgcugcaacaucugcaucuga

SEQ ID NO: 109092 - RNA, 1701 nt, Artificial Sequence
  derived and/or modified CDS sequence (opt2) from hemagglutinin__InfluenzaA__ALA08580
augaagaccaucaucgcccucuccuacauccucugccucgucuucgcccagaagauccccggcaacgacaacuccaccgccacccucugccucggccaccacgccguccccaacggcaccaucgucaagaccaucaccaacgaccgcaucgaggucaccaacgccaccgagcucguccagaacuccuccaucggcgagaucugcgacuccccccaccagauccucgacggcgagaacugcacccucaucgacgcccuccucggcgacccccagugcgacggcuuccagaacaagaagugggaccucuucgucgagcgcuccaaggccuacuccaacugcuaccccuacgacguccccgacuacgccucccuccgcucccucgucgccuccuccggcacccucgaguucaacaacgaguccuucaacuggaccggcgucacccagaacggcaccuccuccgccugcauccgccgcuccuccuccuccuucuucucccgccucaacuggcucacccaccucaacuacaccuaccccgcccucaacgucaccaugcccaacaacgagcaguucgacaagcucuacaucuggggcguccaccaccccggcaccgacaaggaccagaucuuccucuacgcccgcuccuccggccgcaucaccgucuccaccaagggcucccagcaggccgucauccccaacaucggcucccgcccccgcauccgcgacauccccucccgcaucuccaucuacuggaccaucgucaagcccggcgacauccuccucaucaacuccaccggcaaccucaucgccccccgcggcuacuucaagauccgcuccggcaaguccuccaucaugcgcuccgacgcccccaucggcaagugcaaguccgagugcaucacccccaacggcuccauccccaacgacaagcccuuccagaacgucaaccgcaucaccuacggcgccugcccccgcuacgucaagcacuccacccucaagcucgccaccggcaugcgcaacguccccgagaagcagacccgcggcaucuucggcgccaucgccggcuucaucgagaacggcugggagggcauggucgacggcugguacggcuuccgccaccagaacuccgagggccgcggccaggccgccgaccucaaguccacccaggccgccaucgaccagaucaacggcaagcucaaccgccucaucggcaagaccaacgagaaguuccaccagaucgagaaggaguucuccgaggucgagggccgcauccaggaccucgagaaguacgucgaggacaccaagaucgaccucugguccuacaacgccgagcuccucgucgcccucgagaaccagcacaccaucgaccucaccgacuccgagaugaacaagcucuucgagaagaccaagaagcagcuccgcgagaacgccgaggacaugggcaacggcugcuucaagaucuaccacaagugcgacaacgccugcaucggcuccauccgcaacggcaccuacgaccacaacgucuaccgcgacgaggcccucaacaaccgcuuccagaucaagggcgucgagcucaaguccggcuacaaggacuggauccucuggaucuccuucgccaucuccugcuuccuccucugcgucgcccuccucggcuucaucaugugggccugccagaagggcaacauccgcugcaacaucugcaucuga

SEQ ID NO: 109093 - RNA, 1701 nt, Artificial Sequence
  derived and/or modified CDS sequence (opt2) from hemagglutinin__InfluenzaA__ALA08582
augaagaccaucaucgcccucuccuacauccucugccucgucuucgcccagaagcuccccgagaacgacaacuccaccgccacccucugccucggccaccacgccguccccaacggcaccaucgucaagaccaucaccaacgaccgcaucgaggucaccaacgccaccgagcucguccagaacuccuccaucggcgagaucugcgacuccccccaccagauccucgacggcaagaacugcacccucaucgacgcccuccucggcgacccccagugcgacggcuuccagaacaagaagugggaccucuucgucgagcgcuccaaggccuacuccaacugcuaccccuacgacguccccgacuacgccucccuccgcucccucgucgccuccuccggcacccucgaguucaacgacgaguccuucaacugggccggcgucacccagaacggcaccuccuccgccugcauccgcggcuccaacuccuccuucuucucccgccucaacuggcucacccacuccaacuucaaguaccccgcccucaacgucaccaugcccaacaacgagcaguucgacaagcucuacaucuggggcguccaccaccccggcaccgacaaggaccagaucuuccucuacgcccaguccuccggccgcaucaccgucuccaccaagcgcucccagcaggccgucauccccaacaucggcucccgcccccgcauccgcaacauccccucccgcaucuccaucuacuggaccaucgucaagcccggcgacauccuccucaucaacuccaccggcaaccucaucgccccccgcggcuacuucaagauccgcuccggcaaguccuccaucaugcgcuccgacgcccccaucggcaagugcaaguccgagugcaucacccccaacggcuccauccccaacgacaagcccuuccagaacgucaaccgcaucaccuacggcgccugcccccgcuacgucaagcaguccacccucaagcucgccaccggcaugcgcaacguccccgagaagcagacccgcggcaucuucggcgccaucgccggcuucaucgagaacggcugggagggcaugaaggacggcugguacggcuuccgccaccagaacuccgagggccgcggccaggccgccgaccucaaguccacccaggccgccaucgaccagaucaacggcaagcucaaccgccucaucggcaagaccaacgagaaguuccaccagaucgagaaggaguucuccgaggucgagggccgcauccaggaccucgagaaguacgucgaggacaccaagaucgaccucugguccuacaacgccgagcuccucgucgcccucgagaaccagcacaccaucgaccucaccgacuccgagaugaacaagcucuucgagaagaccaagaagcagcuccgcgagaacgccgaggacaugggcaacggcugcuucaagaucuaccacaagugcgacaacgccugcaucggcuccauccgcaacggcaccuacgaccacgacgucuaccgcgacgaggcccucaacaaccgcuuccagaucaagggcgucgagcucaaguccggcuacaaggacuggauccucuggaucuccuucgccaucuccugcuuccuccucugcgucgcccuccucggcuucaucaugugggccugccagaagggcaacauccgcugcaacaucugcaucuga

SEQ ID NO: 109094 - RNA, 1701 nt, Artificial Sequence; identical to SEQ ID NO: 109093
  derived and/or modified CDS sequence (opt2) from hemagglutinin__InfluenzaA__ALA08583

SEQ ID NO: 109095 - RNA, 1701 nt, Artificial Sequence; identical to SEQ ID NO: 109093
  derived and/or modified CDS sequence (opt2) from hemagglutinin__InfluenzaA__ALA08584

SEQ ID NO: 109096 - RNA, 1701 nt, Artificial Sequence; identical to SEQ ID NO: 109093
  derived and/or modified CDS sequence (opt2) from hemagglutinin__InfluenzaA__ALA08585

SEQ ID NO: 109097 - RNA, 1701 nt, Artificial Sequence; identical to SEQ ID NO: 108477
  derived and/or modified CDS sequence (opt2) from hemagglutinin__InfluenzaA__ALA08586

SEQ ID NO: 109098 - RNA, 1701 nt, Artificial Sequence; identical to SEQ ID NO: 109093
  derived and/or modified CDS sequence (opt2) from hemagglutinin__InfluenzaA__ALA08587

SEQ ID NO: 109099 - RNA, 1701 nt, Artificial Sequence; identical to SEQ ID NO: 108477
  derived and/or modified CDS sequence (opt2) from hemagglutinin__InfluenzaA__ALA08588

SEQ ID NO: 109100 - RNA, 1701 nt, Artificial Sequence; identical to SEQ ID NO: 108477
  derived and/or modified CDS sequence (opt2) from hemagglutinin__InfluenzaA__ALA08589

SEQ ID NO: 109101 - RNA, 1701 nt, Artificial Sequence; identical to SEQ ID NO: 109093
  derived and/or modified CDS sequence (opt2) from hemagglutinin__InfluenzaA__ALA08590

SEQ ID NO: 109102 - RNA, 1701 nt, Artificial Sequence; identical to SEQ ID NO: 108477
  derived and/or modified CDS sequence (opt2) from hemagglutinin__InfluenzaA__ALA08591

SEQ ID NO: 109103 - RNA, 1701 nt, Artificial Sequence; identical to SEQ ID NO: 109034
  derived and/or modified CDS sequence (opt2) from hemagglutinin__InfluenzaA__ALA08592

SEQ ID NO: 109104 - RNA, 1701 nt, Artificial Sequence
  derived and/or modified CDS sequence (opt2) from hemagglutinin__InfluenzaA__ALA08594
augaagaccaucaucgcccucuccuacauccucugccucgucuucgcccagaagcuccccgagaacgacaacuccaccgccacccucugccucggccaccacgccguccccaacggcaccaucgucaagaccaucaccuccgaccgcaucgaggucaccaacgccaccgagcucguccagaacuccuccaucggcgagaucugcgacuccccccaccagauccucgacggcaagaacugcacccucaucgacgcccuccucggcgacccccagugcgacggcuuccagaacaagaagugggaccucuucgucgagcgcuccaaggccuacuccaacugcuaccccuacgacguccccgacuacgccucccuccgcucccucgucgccuccuccggcacccucgaguucaacgacgaguccuucaacugggccggcgucacccagaacggcaccuccuccgccugcauccgcggcuccaacuccuccuucuucucccgccucaacuggcucacccacuccaacuucaaguaccccgcccucaacgucaccaugcccaacaacgagcaguucgacaagcucuacaucuggggcguccaccaccccggcaccgacaaggaccagaucuuccucuacgcccaguccuccggccgcaucaccgucuccaccaagcgcucccagcaggccgucauccccaacaucggcucccgcccccgcauccgcaacauccccucccgcaucuccaucuacuggaccaucgucaagcccggcgacauccuccucaucaacuccaccggcaaccucaucgccccccgcggcuacuucaagauccgcuccggcaaguccuccaucaugcgcuccgacgcccccaucggcaagugcaaguccgagugcaucacccccaacggcuccauccccaacgacaagcccuuccagaacgucaaccgcaucaccuacggcgccugcccccgcuacgucaagcaguccacccucaagcucgccaccggcaugcgcaacguccccgagaagcagacccgcggcaucuucggcgccaucgccggcuucaucgagaacggcugggagggcaugaaggacggcugguacggcuuccgccaccagaacuccgagggccgcggccaggccgccgaccucaaguccacccaggccgccaucgaccagaucaacggcaagcucaaccgccucaucggcaagaccaacgagaaguuccaccagaucgagaaggaguucuccgaggucgagggccgcauccaggaccucgagaaguacgucgaggacaccaagaucgaccucugguccuacaacgccgagcuccucgucgcccucgagaaccagcacaccaucgaccucaccgacuccgagaugaacaagcucuucgagaagaccaagaagcagcuccgcgagaacgccgaggacaugggcaacggcugcuucaagaucuaccacaagugcgacaacgccugcaucggcuccauccgcaacggcaccuacgaccacgacgucuaccgcgacgaggcccucaacaaccgcuuccagaucaagggcgucgagcucaaguccggcuacaaggacuggauccucuggaucuccuucgccauguccugcuuccuccucugcgucgcccuccucggcuucaucaugugggccugccagaagggcaacauccgcugcaacaucugcaucuga

SEQ ID NO: 109105 - RNA, 1701 nt, Artificial Sequence; identical to SEQ ID NO: 108477
  derived and/or modified CDS sequence (opt2) from hemagglutinin__InfluenzaA__ALA08595

SEQ ID NO: 109106 - RNA, 1701 nt, Artificial Sequence; identical to SEQ ID NO: 108477
  derived and/or modified CDS sequence (opt2) from hemagglutinin__InfluenzaA__ALA08596

SEQ ID NO: 109107 - RNA, 1701 nt, Artificial Sequence
  derived and/or modified CDS sequence (opt2) from hemagglutinin__InfluenzaA__ALA08597
augaagaccaucaucgcccucuccuacauccucugccucgucuucgcccagaagauccccggcaacgacaacuccaccgccacccucugccucggccaccacgccguccccaacggcaccaucgucaagaccaucaccaacgaccgcaucgaggucaccaacgccaccgagcucguccagaacuccuccaucggcgagaucugcgacuccccccaccagauccucgacggcgagaacugcacccucaucgacgcccuccucggcgacccccagugcgacggcuuccagaacaagaagugggaccucuucgucgagcgcuccaaggccuacuccaacugcuaccccuacgacguccccgacuacgccucccuccgcucccucgucgccuccuccggcacccucgaguucaacaacgaguccuucaacuggaccggcgucacccagaacggcaccuccuccgccugcauccgccgcuccuccuccuccuucuucucccgccucaacuggcucacccaccucaacuacaccuaccccgcccucaacgucaccaugcccaacaacgagcaguucgacaagcucuacaucuggggcguccaccaccccggcaccgacaaggaccagaucuuccucuacgcccaguccuccggccgcaucaccgucuccaccaagcgcucccagcaggccgucauccccaacaucggcucccgcccccgcauccgcgacauccccucccgcaucuccaucuacuggaccaucgucaagcccggcgacauccuccucaucaacuccaccggcaaccucaucgccccccgcggcuacuucaagauccgcuccggcaaguccuccaucaugcgcuccgacgcccccaucggcaagugcaaguccgagugcaucacccccaacggcuccauccccaacgacaagcccuuccagaacgucaaccgcaucaccuacggcgccugcccccgcuacgucaagcacuccacccucaagcucgccaccggcaugcgcaacguccccgagaagcagacccgcggcaucuucggcgccaucgccggcuucaucgagaacggcugggagggcauggucgacggcugguacggcuuccgccaccagaacuccgagggccgcggccaggccgccgaccucaaguccacccaggccgccaucgaccagaucaacggcaagcucaaccgccucaucggcaagaccaacgagaaguuccaccagaucgagaaggaguucuccgaggucgagggccgcauccaggaccucgagaaguacgucgaggacaccaagaucgaccucugguccuacaacgccgagcuccucgucgcccucgagaaccagcacaccaucgaccucaccgacuccgagaugaacaagcucuucgagaagaccaagaagcagcuccgcgagaacgccgaggacaugggcaacggcugcuucaagaucuaccacaagugcgacaacgccugcaucggcuccauccgcaacggcaccuacgaccacaacgucuaccgcgacgaggcccucaacaaccgcuuccagaucaagggcgucgagcucaaguccggcuacaaggacuggauccucuggaucuccuucgccaucuccugcuuccuccucugcgucgcccuccucggcuucaucaugugggccugccagaacggcaacauccgcugcaacaucugcaucuga

SEQ ID NO: 109108 - RNA, 1701 nt, Artificial Sequence
  derived and/or modified CDS sequence (opt2) from hemagglutinin__InfluenzaA__ALA08598
augaagaccaucaucgccuccuccuacauccucugccucgucuucgcccagaagauccccggcaacgacaacuccaccgccacccucugccucggccaccacgccguccccaacggcaccaucgucaagaccaucaccaacgaccgcaucgaggucaccaacgccaccgagcucguccagaacuccuccaucggcgagaucugcgacuccccccaccagauccucgacggcgagaacugcacccucaucgacgcccuccucggcgacccccagugcgacggcuuccagaacaagaagugggaccucuucgucgagcgcuccaaggccuacuccaacugcuaccccuacgacguccccgacuacgccucccuccgcucccucgucgccuccuccggcacccucgaguucaacaacgaguccuucaacuggaccggcgucacccagaacggcaccuccuccgccugcauccgccgcuccuccuccuccuucuucucccgccucaacuggcucacccaccucaacuacaccuaccccgcccucaacgucaccaugcccaacaacgagcaguucgacaagcucuacaucuggggcguccaccaccccggcaccgacaaggaccagaucuuccucuacgcccaguccuccggccgcaucaccgucuccaccaagcgcucccagcaggccgucauccccaacaucggcucccgcccccgcauccgcgacauccccucccgcaucuccaucuacuggaccaucgucaagcccggcgacauccuccucaucaacuccaccggcaaccucaucgccccccgcggcuacuucaagauccgcuccggcaaguccuccaucaugcgcuccgacgcccccaucggcaagugcaaguccgagugcaucacccccaacggcuccauccccaacgacaagcccuuccagaacgucaaccgcaucaccuacggcgccugcccccgcuacgucaagcacuccacccucaagcucgccaccggcaugcgcaacguccccgagaagcagacccgcggcaucuucggcgccaucgccggcuucaucgagaacggcugggagggcauggucgacggcugguacggcuuccgccaccagaacuccgagggccgcggccaggccgccgaccucaaguccacccaggccgccaucgaccagaucaacggcaagcucaaccgccucaucggcaagaccaacgagaaguuccaccagaucgagaaggaguucuccgaggucgagggccgcauccaggaccucgagaaguacgucgaggacaccaagaucgaccucugguccuacaacgccgagcuccucgucgcccucgagaaccagcacaccaucgaccucaccgacuccgagaugaacaagcucuucgagaagaccaagaagcagcuccgcgagaacgccgaggacaugggcaacggcugcuucaagaucuaccacaagugcgacaacgccugcaucggcuccauccgcaacggcaccuacgaccacaacgucuaccgcgacgaggcccucaacaaccgcuuccagaucaagggcgucgagcucaaguccggcuacaaggacuggauccucuggaucuccuucgccaucuccugcuuccuccucugcgucgcccuccucggcuucaucaugugggccugccagaagggcaacauccgcugcaacaucugcaucuga

SEQ ID NO: 109109 - RNA, 1701 nt, Artificial Sequence; identical to SEQ ID NO: 108477
  derived and/or modified CDS sequence (opt2) from hemagglutinin__InfluenzaA__ALA08599

SEQ ID NO: 109110 - RNA, 1701 nt, Artificial Sequence
  derived and/or modified CDS sequence (opt2) from hemagglutinin__InfluenzaA__ALA08600
augaagaccaucaucgcccucuccuacauccucugccucgucuucgcccagaagauccccggcaacgacaacuccaccgccacccucugccucggccaccacgccguccccaacggcaccaucgucaagaccaucaccaacgaccgcaucgaggucaccaacgccaccgagcucguccagaacuccuccaucggcgagaucugcgacuccccccaccagauccucgacggcgagaacugcacccucaucgacgcccuccucggcgacccccagugcgacggcuuccagaacaagaagugggaccucuucgucgagcgcuccaaggccuacuccaacugcuaccccuacgacguccccgacuacgccucccuccgcucccucgucgccuccuccggcacccucgaguucaacaacgaguccuucaacuggaccggcgucacccagaacggcaccuccuccgccugcauccgccgcuccuccuccuccuucuucucccgccucaacuggcucacccaccucaacuaccgcuaccccgcccucaacgucaccaugcccaacaacgagcaguucgacaagcucuacaucuggggcguccaccaccccggcaccgacaaggaccagaucucccucuacgcccaguccuccggccgcaucaccgucuccaccaagcgcucccagcaggccgucauccccaacaucggcucccgcccccgcauccgcgacauccccucccgcaucuccaucuacuggaccaucgucaagcccggcgacauccuccucaucaacuccaccggcaaccucaucgccccccgcggcuacuucaagauccgcuccggcaaguccuccaucaugcgcuccgacgcccccaucggcaagugcaaguccgagugcaucacccccaacggcuccauccccaacgacaagcccuuccagaacgucaaccgcaucaccuacggcgccugcccccgcuacgucaagcacuccacccucaagcucgccaccggcaugcgcaacguccccgagaagcagacccgcggcaucuucggcgccaucgccggcuucaucgagaacggcugggagggcauggucgacggcugguacggcuuccgccaccagaacuccgagggccgcggccaggccgccgaccucaaguccacccaggccgccaucgaccagaucaacggcaagcucaaccgccucaucggcaagaccaacgagaaguuccaccagaucgagaaggaguucuccgaggucgagggccgcauccaggaccucgagaaguacgucgaggacaccaagaucgaccucugguccuacaacgccgagcuccucgucgcccucgagaaccagcacaccaucgaccucaccgacuccgagaugaacaagcucuucgagaagaccaagaagcagcuccgcgagaacgccgaggacaugggcaacggcugcuucaagaucuaccacaagugcgacaacgccugcaucggcuccauccgcaacggcaccuacgaccacaacgucuaccgcgacgaggcccucaacaaccgcuuccagaucaagggcgucgagcucaaguccggcuacaaggacuggauccucuggaucuccuucgccaucuccugcuuccuccucugcgucgcccuccucggcuucaucaugugggccugccagaagggcaacauccgcugcaacaucugcaucuga

SEQ ID NO: 109111 - RNA, 1701 nt, Artificial Sequence; identical to SEQ ID NO: 108477
  derived and/or modified CDS sequence (opt2) from hemagglutinin__InfluenzaA__ALA08601

SEQ ID NO: 109112 - RNA, 1701 nt, Artificial Sequence
  derived and/or modified CDS sequence (opt2) from hemagglutinin__InfluenzaA__ALA08602
augaagaccaucaucgcccucuccuacauccucugccucgucuucgcccagaagauccccggcaacgacaacuccaccgccacccucugccucggccaccacgccguccccaacggcaccaucgucaagaccaucaccaacgaccgcaucgaggucaccaacgccaccgagcucguccagaacuccuccaucggcgagaucugcgacuccccccaccagauccucgacggcgagaacugcacccucaucgacgcccuccucggcgacccccagugcgacgacuuccagaacaagaagugggaccucuucgucgagcgcuccaaggccuacuccaacugcuaccccuacgacguccccgacuacgccucccuccgcucccucgucgccuccuccggcacccucgaguucaacaacgaguccuucaacuggaccggcgucacccagaacggcaccuccuccgccugcauccgccgcuccuccuccuccuucuucucccgccucaacuggcucacccaccucaacuacaccuaccccgcccucaacgucaccaugcccaacaacgagcaguucgacaagcucuacaucuggggcguccaccaccccggcaccgacaaggaccagaucucccucuacgcccaguccuccggccgcaucaccgucuccaccaagcgcucccagcaggccgucauccccaacaucggcucccgcccccgcauccgcgacauccccucccgcaucuccaucuacuggaccaucgucaagcccggcgacauccuccucaucaacuccaccggcaaccucaucgccccccgcggcuacuucaagauccgcuccggcaaguccuccaucaugcgcuccgacgcccccaucggcaagugcaaguccgagugcaucacccccaacggcuccauccccaacgacaagcccuuccagaacgucaaccgcaucaccuacggcgccugcccccgcuacgucaagcacuccacccucaagcucgccaccggcaugcgcaacguccccgagaagcagacccgcggcaucuucggcgccaucgccggcuucaucgagaacggcugggagggcauggucgacggcugguacggcuuccgccaccagaacuccgagggccgcggccaggccgccgaccucaaguccacccaggccgccaucgaccagaucaacggcaagcucaaccgccucaucggcaagaccaacgagaaguuccaccagaucgagaaggaguucuccgaggucgagggccgcauccaggaccucgagaaguacgucgaggacaccaagaucgaccucugguccuacaacgccgagcuccucgucgcccucgagaaccagcacaccaucgaccucaccgacuccgagaugaacaagcucuucgagaagaccaagaagcagcuccgcgagaacgccgaggacaugggcaacggcugcuucaagaucuaccacaagugcgacaacgccugcaucggcuccauccgcaacggcaccuacgaccacaacgucuaccgcgacgaggcccucaacaaccgcuuccagaucaagggcgucgagcucaaguccggcuacaaggacuggauccucuggaucuccuucgccaucuccugcuuccuccucugcgucgcccuccucggcuucaucaugugggccugccagaagggcaacauccgcugcaacaucugcaucuga

SEQ ID NO: 109113 - RNA, 1701 nt, Artificial Sequence
  derived and/or modified CDS sequence (opt2) from hemagglutinin__InfluenzaA__ALA08603
augaagaccaucaucgcccucuccuacauccucugccucgucuucgcccagaagauccccggcaacgacaacuccaccgccacccucugccucggccaccacgccguccccaacggcaccaucgucaagaccaucaccaacgaccgcaucgaggucaccaacgccaccgagcucguccagaacuccuccaucggcgagaucugcgacuccccccaccagauccucgacggcgagaacugcacccucaucgacgcccuccucggcgacccccagugcgacggcuuccagaacaagaagugggaccucuucgucgagcgcuccaaggccuacuccaacugcuaccccuacgacguccccgacuacgccucccuccgcucccucgucgccuccuccggcacccucgaguucaacaacgaguccuucaacuggaccggcgucacccagaacggcaccuccuccgccugcauccgccgcuccuccuccuccuucuucucccgccucaacuggcucacccaccucaacuacaucuaccccgcccucaacgucaccaugcccaacaacgagcaguucgacaagcucuacaucuggggcguccaccaccccggcaccgacaaggaccagaucuuccucuacgcccaguccuccggccgcaucaccgucuccaccaagcgcucccagcaggccgucauccccaacaucggcucccgcccccgcauccgcgacauccccucccgcaucuccaucuacuggaccaucgucaagcccggcgacauccuccucaucaacuccaccggcaaccucaucgccccccgcggcuacuucaagauccgcuccggcaaguccuccaucaugcgcuccgacgcccccaucggcaagugcaaguccgagugcaucacccccaacggcuccauccccaacgacaagcccuuccagaacgucaaccgcaucaccuacggcgccugcccccgcuacgucaagcacuccacccucaagcucgccaccggcaugcgcaacguccccgagaagcagacccgcggcaucuucggcgccaucgccggcuucaucgagaacggcugggagggcauggucgacggcugguacggcuuccgccaccagaacuccgagggccgcggccaggccgccgaccucaaguccacccaggccgccaucgaccagaucaacggcaagcucaaccgccucaucggcaagaccaacgagaaguuccaccagaucgagaaggaguucuccgaggucgagggccgcauccaggaccucgagaaguacgucgaggacaccaagaucgaccucugguccuacaacgccgagcuccucgucgcccucgagaaccagcacaccaucgaccucaccgacuccgagaugaacaagcucuucgagaagaccaagaagcagcuccgcgagaacgccgaggacaugggcaacggcugcuucaagaucuaccacaagugcgacaacgccugcaucggcuccauccgcaacggcaccuacgaccacaacgucuaccgcgacgaggcccucaacaaccgcuuccagaucaagggcgucgagcucaaguccggcuacaaggacuggauccucuggaucuccuucgccaucuccugcuuccuccucugcgucgcccuccucggcuucaucaugugggccugccagaagggcaacauccgcugcaacaucugcaucuga

SEQ ID NO: 109114 - RNA, 1701 nt, Artificial Sequence; identical to SEQ ID NO: 108477
  derived and/or modified CDS sequence (opt2) from hemagglutinin__InfluenzaA__ALA08605

SEQ ID NO: 109115 - RNA, 1701 nt, Artificial Sequence; identical to SEQ ID NO: 108477
  derived and/or modified CDS sequence (opt2) from hemagglutinin__InfluenzaA__ALA08606

SEQ ID NO: 109116 - RNA, 1701 nt, Artificial Sequence; identical to SEQ ID NO: 109092
  derived and/or modified CDS sequence (opt2) from hemagglutinin__InfluenzaA__ALA08607

SEQ ID NO: 109117 - RNA, 1701 nt, Artificial Sequence
  derived and/or modified CDS sequence (opt2) from hemagglutinin__InfluenzaA__ALA08609
augaagaccaucaucgcccucggcuacauccucugccucgucuucgcccagaagauccccggcaacgacaacuccaccgccacccucugccucggccaccacgccguccccaacggcaccaucgucaagaccaucaccaacgaccgcaucgaggucaccaacgccaccgagcucguccagaacuccuccaucggcgagaucugcgacuccccccacaagauccucgacggcgagaacugcacccucaucgacgcccuccucggcgacccccagugcgacggcuuccagaacaagaagugggaccucuucgucgagcgcuccaaggccuacuccaacugcuaccccuacgacguccccgacuacgccucccuccgcucccucgucgccuccuccggcacccucgaguucaacaacgaguccuucaacuggaccggcgucacccagaacggcaccuccuccgccugcauccgccgcuccuccuccuccuucuucucccgccucaacuggcucacccaccucaacuacaccuaccccgcccucaacgucaccaugcccaacaacgagcaguucgacaagcucuacaucuggggcguccaccaccccggcaccgacaaggaccagaucuuccucuacgcccaguccuccggccgcaucaccgucuccaccaagcgcucccagcaggccgucauccccaacaucggcucccgcccccgcauccgcgacauccccucccgcaucuccaucuacuggaccaucgucaagcccggcgacauccuccucaucaacuccaccggcaaccucaucgccccccgcggcuacuucaagauccgcuccggcaaguccuccaucaugcgcuccgacgcccccaucggcaagugcaaguccgagugcaucacccccaacggcuccauccccaacgacaagcccuuccagaacgucaaccgcaucaccuacggcgccugcccccgcuacgucaagcacuccacccucaagcucgccaccggcaugcgcaacguccccgagaagcagacccgcggcaucuucggcgccaucgccggcuucaucgagaacggcugggagggcauggucgacggcugguacggcuuccgccaccagaacuccgagggccgcggccaggccgccgaccucaaguccacccaggccgccaucgaccagaucaacggcaagcucaaccgccucaucggcaagaccaacgagaaguuccaccagaucgagaaggaguucuccgaggucgagggccgcauccaggaccucgacaaguacgucgaggacaccaagaucgaccucugguccuacaacgccgagcuccucgucgcccucgagaaccagcacaccaucgaccucaccgacuccgagaugaacaagcucuucgagaagaccaagaagcagcuccgcgagaacgccgaggacaugggcaacggcugcuucaagaucuaccacaagugcgacaacgccugcaucggcuccauccgcaacggcaccuacgaccacaacgucuaccgcgacgaggcccucaacaaccgcuuccagaucaagggcgucgagcucaaguccggcuacaaggacuggauccucuggaucuccuucgccaucuccugcuuccuccucugcgucgcccuccucggcuucaucaugugggccugccagaagggcaacauccgcugcaacaucugcaucuga

SEQ ID NO: 109118 - RNA, 1701 nt, Artificial Sequence; identical to SEQ ID NO: 109034
  derived and/or modified CDS sequence (opt2) from hemagglutinin__InfluenzaA__ALA08610

SEQ ID NO: 109119 - RNA, 1701 nt, Artificial Sequence
  derived and/or modified CDS sequence (opt2) from hemagglutinin__InfluenzaA__ALA08611
augaagaucaucaucgcccucuccuacauccucugccucgucuucgcccagaagauccccggcaacgacaacuccaccgccacccucugccucggccaccacgccguccccaacggcaccaucgucaagaccaucaccaacgaccgcaucgaggucaccaacgccaccgagcucguccagaacuccuccaucggcgagaucugcgacuccccccaccgcauccucgacggcgagaacugcacccucaucgacgcccuccucggcgacccccagugcgacggcuuccagaacaagaagugggaccucuucgucgagcgcuccaaggccuacuccaacugcuaccccuacgacguccccgacuacgccucccuccgcucccucgucgccuccuccggcacccucgaguucaacaacgaguccuucaacuggaccggcgucacccagaacggcaccuccuccgccugcauccgccgcuccuccuccuccuucuucucccgccucaacuggcucacccaccucaacuacaccuaccccgcccucaacgucaccaugcccaacaacgagcaguucgacaagcucuacaucuggggcguccaccaccccggcaccgacaaggaccagaucuuccucuacgcccaguccuccggccgcaucaccgucuccaccaagcgcucccagcaggccgucauccccaacaucggcucccgcccccgcauccgcgacauccccucccgcaucuccaucuacuggaccaucgucaagcccggcgacauccuccucaucaacuccaccggcaaccucaucgccccccgcggcuacuucaagauccgcuccggcaaguccuccaucaugcgcuccgacgcccccaucggcaagugcaaguccgagugcaucacccccaacggcuccauccccaacgacaagcccuuccagaacgucaaccgcaucaccuacggcgccugcccccgcuacgucaagcacuccacccucaagcucgccaccggcaugcgcaacguccccgagaagcagacccgcggcaucuucggcgccaucgccggcuucaucgagaacggcugggagggcauggucgacggcugguacggcuuccgccaccagaacuccgagggccgcggccaggccgccgaccucaaguccacccaggccgccaucgaccagaucaacggcaagcucaaccgccucaucggcaagaccaacgagaaguuccaccagaucgagaaggaguucuccgaggucgagggccgcauccaggaccucgagaaguacgucgaggacaccaagaucgaccucugguccuacaacgccgagcuccucgucgcccucgagaaccagcacaccaucgaccucaccgacuccgagaugaacaagcucuucgagaagaccaagaagcagcuccgcgagaacgccgaggacaugggcaacggcugcuucaagaucuaccacaagugcgacaacgccugcaucggcuccauccgcaacggcaccuacgaccacaacgucuaccgcgacgaggcccucaacaaccgcuuccagaucaagggcgucgagcucaaguccggcuacaaggacuggauccucuggaucuccuucgccaucuccugcuuccuccucugcgucgcccuccucggcuucaucaugugggccugccagaagggcaacauccgcugcaacaucugcaucuga

SEQ ID NO: 109120 - RNA, 1701 nt, Artificial Sequence; identical to SEQ ID NO: 109092
  derived and/or modified CDS sequence (opt2) from hemagglutinin__InfluenzaA__ALA08612

SEQ ID NO: 109121 - RNA, 1701 nt, Artificial Sequence; identical to SEQ ID NO: 108477
  derived and/or modified CDS sequence (opt2) from hemagglutinin__InfluenzaA__ALA08614

SEQ ID NO: 109122 - RNA, 1701 nt, Artificial Sequence; identical to SEQ ID NO: 108477
  derived and/or modified CDS sequence (opt2) from hemagglutinin__InfluenzaA__ALA08615

SEQ ID NO: 109123 - RNA, 1701 nt, Artificial Sequence; identical to SEQ ID NO: 108477
  derived and/or modified CDS sequence (opt2) from hemagglutinin__InfluenzaA__ALA08616

SEQ ID NO: 109124 - RNA, 1701 nt, Artificial Sequence; identical to SEQ ID NO: 109017
  derived and/or modified CDS sequence (opt2) from hemagglutinin__InfluenzaA__ALA08617

SEQ ID NO: 109125 - RNA, 1701 nt, Artificial Sequence
  derived and/or modified CDS sequence (opt2) from hemagglutinin__InfluenzaA__ALA08619
augaagaccgucaucgcccucuccuacauccucugccucgucuucgcccagaagauccccggcaacgacaacuccaccgccacccucugccucggccaccacgccguccccaacggcaccaucgucaagaccaucaccaacgaccgcaucgaggucaccaacgccaccgagcucguccagaacuccuccaucggcgagaucugcgacuccccccaccagauccucgacggcgagaacugcacccucaucgacgcccuccucggcgacccccagugcgacggcuuccagaacaagaagugggaccucuucgucgagcgcuccaaggccuacuccaacugcuaccccuacgacguccccgacuacgccucccuccgcucccucaucgccuccuccggcacccucgaguucaacaacgaguccuucaacuggaccggcgucacccagaacggcaccuccuccgccugcauccgcaaguccuccuccuccuucuucucccgccucaacuggcucacccaccucaacuacaccuaccccgcccucaacgucaccaugcccaacaacgagcaguucgacaagcucuacaucuggggcguccaccaccccggcaccgacaaggaccagaucuuccucuacgcccgcuccuccggccgcaucaccgucuccaccaagcgcucccagcaggccgucauccccaacaucggcucccgcccccgcauccgcgacauccccucccgcaucuccaucuacuggaccaucgucaagcccggcgacauccuccucaucaacuccaccggcaaccucaucgccccccgcggcuacuucaagauccgcuccggcaaguccuccaucaugcgcuccgacgcccccaucggcaagugcaaguccgagugcaucacccccaacggcuccauccccaacgagaagcccuuccagaacgucaaccgcaucaccuacggcgccugcccccgcuacgucaagcacuccacccucaagcucgccaccggcaugcgcaacguccccgagaagcagacccgcggcaucuucggcgccaucgccggcuucaucgagaacggcugggagggcauggucgacggcugguacggcuuccgccaccagaacuccgagggccgcggccaggccgccgaccucaaguccacccaggccgccaucgaccagaucaacggcaagcucaaccgccucaucggcaagaccaacgagaaguuccaccagaucgagaaggaguucuccgaggucgagggccgcauccaggaccucgagaaguacgucgaggacaccaagaucgaccucugguccuacaacgccgagcuccucgucgcccucgagaaccagcacaccaucgaccucaccgacuccgagaugaacaagcucuucgagaagaccaagaagcagcuccgcgagaacgccgaggacaugggcaacggcugcuucaagaucuaccacaagugcgacaacgccugcaucggcuccauccgcaacggcaucuacgaccacaacgucuaccgcgacgaggcccucaacaaccgcuuccagaucaagggcgucgagcucaaguccggcuacaaggacuggauccucuggaucuccuucgccaucuccugcuuccuccucugcgucgcccuccucggcuucaucaugugggccugccagaagggcaacauccgcugcaacaucugcaucuga

SEQ ID NO: 109126 - RNA, 1701 nt, Artificial Sequence; identical to SEQ ID NO: 109092
  derived and/or modified CDS sequence (opt2) from hemagglutinin__InfluenzaA__ALA08620

SEQ ID NO: 109127 - RNA, 1701 nt, Artificial Sequence; identical to SEQ ID NO: 109083
  derived and/or modified CDS sequence (opt2) from hemagglutinin__InfluenzaA__ALA08621

SEQ ID NO: 109128 - RNA, 1701 nt, Artificial Sequence
  derived and/or modified CDS sequence (opt2) from hemagglutinin__InfluenzaA__ALA08622
augaagaccaucaucgcccucuccuacauccucugccucgucuucgcccagaagauccccggcaacgacaacuccaccgccacccucugccucggccaccacgccguccccaacggcaccaucgucaagaccaucaccaacgaccgcaucgaggucaccaacgccaccgagcucguccagaacuccuccaucggcgagaucugcgacuccccccaccagauccucgacggcgagaacugcacccucaucgacgcccuccucggcgacccccagugcgacggcuuccagaacaagaagugggaccucuucgucgagcgcuccaaggccuacuccaacugcuaccccuacgacguccccgacuacgccucccuccgcucccucgucgccuccuccggcacccucgaguucaacaacgaguccuucaacuggaccggcgucacccagaacggcaccuccuccgccugcauccgccgcuccuccuccuccuucuucucccgccucaacuggcucacccaccucaacuacaaguaccccgcccucaacgucaccaugcccaacaacgagcaguucgacaagcucuacaucuggggcguccaccaccccggcaccgacaaggaccagaucuuccucuacgcccaguccuccggccgcaucaccgucuccaccaagcgcucccagcaggccgucauccccaacaucggcucccgcccccgcauccgcgacauccccucccgcaucuccaucuacuggaccaucgucaagcccggcgacauccuccucaucaacuccaccggcaaccucaucgccccccgcggcuacuucaagauccgcuccggcaaguccuccaucaugcgcuccgacgcccccaucggcaagugcaaguccgagugcaucacccccaacggcuccauccccaacgacaagcccuuccagaacgucaaccgcaucaccuacggcgccugcccccgcuacgucaagcacuccacccucaagcucgccaccggcaugcgcaacguccccgagaagcagacccgcggcaucuucggcgccaucgccggcuucaucgagaacggcugggagggcauggucgacggcugguacggcuuccgccaccagaacuccgagggccgcggccaggccgccgaccucaaguccacccaggccgccaucgaccagaucaacggcaagcucaaccgccucaucggcaagaccaacgagaaguuccaccagaucgagaaggaguucuccgaggucgagggccgcauccaggaccucgagaaguacgucgaggacaccaagaucgaccucugguccuacaacgccgagcuccucgucgcccucgagaaccagcacaccaucgaccucaccgacuccgagaugaacaagcucuucgagaagaccaagaagcagcuccgcgagaacgccgaggacaugggcaacggcugcuucaagaucuaccacaagugcgacaacgccugcaucggcuccauccgcaacggcaccuacgaccacaacgucuaccgcgacgaggcccucaacaaccgcuuccagaucaagggcgucgagcucaaguccggcuacaaggacuggauccucuggaucuccuucgccaucuccugcuuccuccucugcgucgcccuccucggcuucaucaugugggccugccagaagggcaacauccgcugcaacaucugcaucuga

SEQ ID NO: 109129 - RNA, 1701 nt, Artificial Sequence; identical to SEQ ID NO: 108477
  derived and/or modified CDS sequence (opt2) from hemagglutinin__InfluenzaA__ALA08623

SEQ ID NO: 109130 - RNA, 1701 nt, Artificial Sequence; identical to SEQ ID NO: 109083
  derived and/or modified CDS sequence (opt2) from hemagglutinin__InfluenzaA__ALA08624

SEQ ID NO: 109131 - RNA, 1701 nt, Artificial Sequence; identical to SEQ ID NO: 108477
  derived and/or modified CDS sequence (opt2) from hemagglutinin__InfluenzaA__ALA08625

SEQ ID NO: 109132 - RNA, 1701 nt, Artificial Sequence; identical to SEQ ID NO: 108477
  derived and/or modified CDS sequence (opt2) from hemagglutinin__InfluenzaA__ALA08626

SEQ ID NO: 109133 - RNA, 1701 nt, Artificial Sequence; identical to SEQ ID NO: 108477
  derived and/or modified CDS sequence (opt2) from hemagglutinin__InfluenzaA__ALA08627

SEQ ID NO: 109134 - RNA, 1701 nt, Artificial Sequence; identical to SEQ ID NO: 109021
  derived and/or modified CDS sequence (opt2) from hemagglutinin__InfluenzaA__ALA08629

SEQ ID NO: 109135 - RNA, 1701 nt, Artificial Sequence
  derived and/or modified CDS sequence (opt2) from hemagglutinin__InfluenzaA__ALA08630
augaagaccaucaucgcccucuccuacauccucugccucgucuucgcccagaagauccccggcaacgacaacuccaccgccacccucugccucggccaccacgccguccccaacggcaccaucgucaagaccaucaccaacgaccgcaucgaggucaccaacgccaccgagcucguccagaacuccuccaucggcgagaucugcgacuccccccaccagauccucgacggcgagaacugcacccucaucgacgcccuccucggcgacccccagugcgacggcuuccagaacaagaagugggaccucuucgucgagcgcuccaaggccuacuccaacugcuaccccuacgacguccccgacuacgccucccuccgcucccucgucgccuccuccggcacccucgaguucaacaacgaguccuucaacuggaccggcgucacccagaacggcaccuccuccgccugcauccgcaaguccuccuccuccuucuucucccgccucaacuggcucacccaccucaacuacaccuaccccgcccucaacgucaccaugcccaacaacgagcaguucgacaagcucuacaucuggggcguccaccaccccggcaccgacaaggaccagaucuuccucuacgcccgcuccuccggccgcaucaccgucuccaccaagcgcucccagcaggccgucauccccaacaucggcucccgcccccgcauccgcgacauccccucccgcaucuccaucuacuggaccaucgucaagcccggcgacauccuccucaucaacuccaccggcaaccucaucgccccccgcggcuacuucaagauccgcuccggcaaguccuccaucaugcgcuccgacgcccccaucggcaagugcaaguccgagugcaucacccccaacggcuccauccccaacgacaagcccuuccagaacgucaaccgcaucaccuacggcgccugcccccgcuacgucaagcacuccacccucaagcucgccaccggcaugcgcaacguccccgagaagcagacccgcggcaucuucggcgccaucgccggcuucaucgagaacggcugggagggcauggucgacggcugguacggcuuccgccaccagaacuccgagggccgcggccaggccgccgaccucaaguccacccaggccgccaucgaccagaucaacggcaagcucaaccgccucaucggcaagaccaacgagaaguuccaccagaucgagaaggaguucuccgaggucgagggccgcauccaggaccucgagaaguacgucgaggacaccaagaucgaccucugguccuacaacgccgagcuccucgucgcccucgagaaccagcacaccaucgaccucaccgacuccgagaugaacaagcucuucgagaagaccaagaagcagcuccgcgagaacgccgaggacaugggcaacggcugcuucaagaucuaccacaagugcgacaacgccugcaucggcuccauccgcaacggcaccuacgaccacaacgucuaccgcgacgaggcccucaacaaccgcuuccagaucaagggcgucgagcucaaguccggcuacaaggacuggauccucuggaucuccuucgccaucuccugcuuccuccucugcgucgcccuccucggcuucaucaugugggccugccagaagggcaacauccgcugcaacaucugcaucuga

SEQ ID NO: 109136 - RNA, 1701 nt, Artificial Sequence
  derived and/or modified CDS sequence (opt2) from hemagglutinin__InfluenzaA__ALA08631
augaagaccaucaucgcccucuccuacauccucugccucgucuucgcccagaagauccccggcaacgacaacuccaccgccacccucugccucggccaccacgccguccccaacggcaccaucgucaagaccaucaccaacgaccgcaucgaggucaccaacgccaccgagcucguccagaacuccuccaucggcgagaucugcgacuccccccaccagauccucgacggcgagaacugcacccucaucgacgcccuccucggcgacccccagugcgacggcuuccagaacaagaagugggaccucuucgucgagcgcuccaaggccuacuccaacugcuaccccuacgacguccccgacuacgccucccuccgcucccucgucgccuccuccggcacccucgaguucaacaacgaguccuucaacuggaccggcgucacccagaacggcaccuccuccgccugcauccgccgcuccuccuccuccuucuucucccgccucaacuggcucacccaccucaacuacaccuaccccgcccucaacgucaccaugcccaacaaggagcaguucgacaagcucuacaucuggggcguccaccaccccggcaccgacaaggaccagaucuuccucuacgcccaguccuccggccgcaucaccgucuccaccaagcgcucccagcaggccgucauccccaacaucggcucccgcccccgcauccgcgacauccccucccgcaucuccaucuacuggaccaucgucaagcccggcgacauccuccucaucaacuccaccggcaaccucaucgccccccgcggcuacuucaagauccgcuccggcaaguccuccaucaugcgcuccgacgcccccaucggcaagugcaaguccgagugcaucacccccaacggcuccauccccaacgacaagcccuuccagaacgucaaccgcaucaccuacggcgccugcccccgcuacgucaagcacuccacccucaagcucgccaccggcaugcgcaacguccccgagaagcagacccgcggcaucuucggcgccaucgccggcuucaucgagaacggcugggagggcauggucgacggcugguacggcuuccgccaccagaacuccgagggccgcggccaggccgccgaccucaaguccacccaggccgccaucgaccagaucaacggcaagcucaaccgccucaucggcaagaccaacgagaaguuccaccagaucgagaaggaguucuccgaggucgagggccgcauccaggaccucgagaaguacgucgaggacaccaagaucgaccucugguccuacaacgccgagcuccucgucgcccucgagaaccagcacaccaucgaccucaccgacuccgagaugaacaagcucuucgagaagaccaagaagcagcuccgcgagaacgccgaggacaugggcaacggcugcuucaagaucuaccacaagugcgacaacgccugcaucggcuccauccgcaacggcaccuacgaccacaacgucuaccgcgacgaggcccucaacaaccgcuuccagaucaagggcgucgagcucaaguccggcuacaaggacuggauccucuggaucuccuucgccaucuccugcuuccuccucugcgucgcccuccucggcuucaucaugugggccugccagaagggcaacauccgcugcaacaucugcaucuga

SEQ ID NO: 109137 - RNA, 1701 nt, Artificial Sequence
  derived and/or modified CDS sequence (opt2) from hemagglutinin__InfluenzaA__ALA08632
augaagaccaucaucgcccucuccuacauccucugccucgucuucgcccagaagauccccggcaacgacaacuccaccgccacccucugccucggccaccacgccguccccaacggcaccaucgucaagaccaucaccaacgaccgcaucgaggucaccaacgccaccgagcucguccagaacuccuccaucggcgagaucugcgacuccccccaccagauccucgacggcgagaacugcacccucaucgacgcccuccucggcgacccccagugcgacggcuuccagaacaagaagugggaccucuucgucgagcgcuccaaggccuacuccaacugcuaccccuacgacguccccgacuacgccucccuccgcucccucgucgccuccuccggcacccucgaguucaacaacgaguccuucaacuggaccggcgucacccagaacggcaccuccuccgccugcauccgccgcuccuccuccuccuucuucucccgccucaacuggcucacccaccucaacuacaccuaccccgcccucaacgucaccaugcccaacaacgagcaguucgacaagcucuacaucuggggcguccaccaccccggcaccgacaaggaccagaucuuccucuacgcccaguccuccggccgcaucaccgucuccaccaagggcucccagcaggccgucauccccaacgucggcucccgcccccgcauccgcgacauccccucccgcaucuccaucuacuggaccaucgucaagcccggcgacauccuccucaucaacuccaccggcaaccucaucgccccccgcggcuacuucaagauccgcuccggcaaguccuccaucaugcgcuccgacgcccccaucggcaagugcaaguccgagugcaucacccccaacggcuccauccccaacgacaagcccuuccagaacgucaaccgcaucaccuacggcgccugcccccgcuacgucaagcacuccacccucaagcucgccaccggcaugcgcaacguccccgagaagcagacccgcggcaucuucggcgccaucgccggcuucaucgagaacggcugggagggcauggucgacggcugguacggcuuccgccaccagaacuccgagggccgcggccaggccgccgaccucaaguccacccaggccgccaucgaccagaucaacggcaagcucaaccgccucaucggcaagaccaacgagaaguuccaccagaucgagaaggaguucuccgaggucgagggccgcauccaggaccucgagaaguacgucgaggacaccaagaucgaccucugguccuacaacgccgagcuccucgucgcccucgagaaccagcacaccaucgaccucaccgacuccgagaugaacaagcucuucgagaagaccaagaagcagcuccgcgagaacgccgaggacaugggcaacggcugcuucaagaucuaccacaagugcgacaacgccugcaucggcuccauccgcaacggcaccuacgaccacaacgucuaccgcgacgaggcccucaacaaccgcuuccagaucaagggcgucgagcucaaguccggcuacaaggacuggauccucuggaucuccuucgccaucuccugcuuccuccucugcgucgcccuccucggcuucaucaugugggccugccagaagggcaacauccgcugcaacaucugcaucuga

SEQ ID NO: 109138 - RNA, 1701 nt, Artificial Sequence; identical to SEQ ID NO: 109034
  derived and/or modified CDS sequence (opt2) from hemagglutinin__InfluenzaA__ALA08634

SEQ ID NO: 109139 - RNA, 1701 nt, Artificial Sequence; identical to SEQ ID NO: 108477
  derived and/or modified CDS sequence (opt2) from hemagglutinin__InfluenzaA__ALA08635

SEQ ID NO: 109140 - RNA, 1701 nt, Artificial Sequence
  derived and/or modified CDS sequence (opt2) from hemagglutinin__InfluenzaA__ALA08636
augaagaccaucaucgcccucuccuacauccucugccucgucuucgcccagaagauccccggcaacgacaacuccaccgccacccucugccucggccaccacgccguccccaacggcaccaucgucaagaccaucaccaacgaccgcaucgaggucaccaacgccaccgagcucguccagaacuccuccaucggcgagaucugcgacuccccccaccagauccucgacggcgagaacugcacccucaucgacgcccuccucggcgacccccagugcgacggcuuccagaacaagaagugggaccucuucgucgagcgcuccaaggccuacuccaacugcuaccccuacgacguccccgacuacgccucccuccgcucccucgucgccuccuccggcacccucgaguucaacaacgaguccuucaacuggaccggcgucacccagaacggcaccuccuccgccugcauccgccgcuccuccuccuccuucuucucccgccucaacuggcucacccaccucaacuacaccuaccccgcccucaacgucaccaugcccaacaacgagcaguucgacaagcucuacaucuggggcauccaccaccccggcaccgacaaggaccagaucuuccucuacgcccaguccuccggccgcaucaccgucuccaccaagcgcucccagcaggccgucauccccaacaucggcucccgcccccgcauccgcgacauccccucccgcaucuccaucuacuggaccaucgucaagcccggcgacauccuccucaucaacuccaccggcaaccucaucgccccccgcggcuacuucaagauccgcuccggcaaguccuccaucaugcgcuccgacgcccccaucggcaagugcaaguccgagugcaucacccccaacggcuccauccccaacgacaagcccuuccagaacgucaaccgcaucaccuacggcgccugcccccgcuacgucaagcacuccacccucaagcucgccaccggcaugcgcaacguccccgagaagcagacccgcggcaucuucggcgccaucgccggcuucaucgagaacggcugggagggcauggucgacggcugguacggcuuccgccaccagaacuccgagggccgcggccaggccgccgaccucaaguccacccaggccgccaucgaccagaucaacggcaagcucaaccgccucaucggcaagaccaacgagaaguuccaccagaucgagaaggaguucuccgaggucgagggccgcauccaggaccucgagaaguacgucgaggacaccaagaucgaccucugguccuacaacgccgagcuccucgucgcccucgagaaccagcacaccaucgaccucaccgacuccgagaugaacaagcucuucgagaagaccaagaagcagcuccgcgagaacgccgaggacaugggcaacggcugcuucaagaucuaccacaagugcgacaacgccugcaucggcuccauccgcaacggcaccuacgaccacaacgucuaccgcgacgaggcccucaacaaccgcuuccagaucaagggcgucgagcucaaguccggcuacaaggacuggauccucuggaucuccuucgccaucuccugcuuccuccucugcgucgcccuccucggcuucaucaugugggccugccagaagggcaacauccgcugcaacaucugcaucuga

SEQ ID NO: 109141 - RNA, 1701 nt, Artificial Sequence; identical to SEQ ID NO: 109034
  derived and/or modified CDS sequence (opt2) from hemagglutinin__InfluenzaA__ALA08637

SEQ ID NO: 109142 - RNA, 1701 nt, Artificial Sequence
  derived and/or modified CDS sequence (opt2) from hemagglutinin__InfluenzaA__ALA08638
augaagaccaucaucgcccucuccuacauccucugccucgucuucgcccagaagauccccggcaacgacaacuccaccgccacccucugccucggccaccacgccguccccaacggcaccaucgucaagaccaucaccaacgaccgcaucgaggucaccaacgccaccgagcucguccagaacuccuccaucggcgagaucugcgacuccccccaccagauccucgacggcgagaacugcacccucaucgacgcccuccucggcgacccccagugcgacggcuuccagaacaagaagugggaccucuucgucgagcgcuccaaggccuacuccaacugcuaccccuacgacguccccgacuacgccucccuccgcucccucgucgccuccuccggcacccucgaguucaacaacgaguccuucaacuggaccggcgucacccagaacggcaccuccuccgccugcauccgcggcuccaacuccuccuucuucucccgccucaacuggcucacccacuccaacuucaaguaccccgcccucaacgucaccaugcccaacaacgagcaguucgacaagcucuacaucuggggcguccaccaccccggcaccgacaaggaccagaucuuccucuacgcccaguccuccggccgcaucaccgucuccaccaagcgcucccagcaggccgucauccccaacaucggcucccgcccccgcauccgcgacauccccucccgcaucuccaucuacuggaccaucgucaagcccggcgacauccuccucaucaacuccaccggcaaccucaucgccccccgcggcuacuucaagauccgcuccggcaaguccuccaucaugcgcuccgacgcccccaucggcaagugcaaguccgagugcaucacccccaacggcuccauccccaacgacaagcccuuccagaacgucaaccgcaucaccuacggcgccugcccccgcuacgucaagcacuccacccucaagcucgccaccggcaugcgcaacguccccgagaagcagacccgcggcaucuucggcgccaucgccggcuucaucgagaacggcugggagggcauggucgacggcugguacggcuuccgccaccagaacuccgagggccgcggccaggccgccgaccucaaguccacccaggccgccaucgaccagaucaacggcaagcucaaccgccucaucggcaagaccaacgagaaguuccaccagaucgagaaggaguucuccgaggucgagggccgcauccaggaccucgagaaguacgucgaggacaccaagaucgaccucugguccuacaacgccgagcuccucgucgcccucgagaaccagcacaccaucgaccucaccgacuccgagaugaacaagcucuucgagaagaccaagaagcagcuccgcgagaacgccgaggacaugggcaacggcugcuucaagaucuaccacaagugcgacaacgccugcaucggcuccauccgcaacggcaccuacgaccacaacgucuaccgcgacgaggcccucaacaaccgcuuccagaucaagggcgucgagcucaaguccggcuacaaggacuggauccucuggaucuccuucgccaucuccugcuuccuccucugcgucgcccuccucggcuucaucaugugggccugccagaagggcaacauccgcugcaacaucugcaucuga

SEQ ID NO: 109143 - RNA, 1701 nt, Artificial Sequence; identical to SEQ ID NO: 109034
  derived and/or modified CDS sequence (opt2) from hemagglutinin__InfluenzaA__ALA08639

SEQ ID NO: 109144 - RNA, 1701 nt, Artificial Sequence; identical to SEQ ID NO: 109034
  derived and/or modified CDS sequence (opt2) from hemagglutinin__InfluenzaA__ALA08640

SEQ ID NO: 109145 - RNA, 1701 nt, Artificial Sequence; identical to SEQ ID NO: 109034
  derived and/or modified CDS sequence (opt2) from hemagglutinin__InfluenzaA__ALA08641

SEQ ID NO: 109146 - RNA, 1701 nt, Artificial Sequence; identical to SEQ ID NO: 109034
  derived and/or modified CDS sequence (opt2) from hemagglutinin__InfluenzaA__ALA08642

SEQ ID NO: 109147 - RNA, 1701 nt, Artificial Sequence; identical to SEQ ID NO: 109034
  derived and/or modified CDS sequence (opt2) from hemagglutinin__InfluenzaA__ALA08643

SEQ ID NO: 109148 - RNA, 1701 nt, Artificial Sequence; identical to SEQ ID NO: 108477
  derived and/or modified CDS sequence (opt2) from hemagglutinin__InfluenzaA__ALA08644

SEQ ID NO: 109149 - RNA, 1701 nt, Artificial Sequence
  derived and/or modified CDS sequence (opt2) from hemagglutinin__InfluenzaA__ALA08645
augaagaccaucaucgcccucuccuacauccucugccucgucuucgcccagaagcuccccgagaacgacaacuccaccgccacccucugccucggccaccacgccguccccaacggcaccaucgucaagaccaucaccuccgaccgcaucgaggucaccaacgccaccgagcucguccagaacuccuccaucggcgagaucugcgacuccccccaccagauccucgacggcaagaacugcacccucaucgacgcccuccucggcgacccccagugcgacggcuuccagaacaagaagugggaccucuucgucgagcgcuccaaggccuacuccaacugcuaccccuacgacguccccgacuacgccucccuccgcucccucgucgccuccuccggcacccucgaguucaacgacgaguccuucaacugggccggcgucacccagaacggcaccuccuccgccugcauccgcggcuccaacuccuccuucuucucccgccucaacuggcucacccacuccaacuucaaguaccccgcccucaacgucaccaugcccaacaacgagcaguucgacaagcucuacaucuggggcguccaccaccccggcaccgacaaggaccagaucuuccucuacgcccaguccuccggccgcaucaccgucuccaccaagcgcucccagcaggccgucauccccaacaucggcucccgcccccgcauccgcaacauccccucccgcaucuccaucuacuggaccaucgucaagcccggcgacauccuccucaucaacuccaccggcaaccucaucgccccccgcggcuacuucaagauccgcuccggcaaguccuccaucaugcgcuccgacgcccccaucggcaagugcaaguccgagugcaucacccccaacggcuccauccccaacgacaagcccuuccagaacgucaaccgcaucaccuacggcgccugcccccgcuacgucaagcaguccacccucaagcucgccaccggcaugcgcaacguccccgagaagcagacccgcggcaucuucggcgccaucgccggcuucaucgagaacggcugggagggcaugaaggacggcugguacggcuuccgccaccagaacuccgagggccgcggccaggccgccgaccucaaguccacccaggccgccaucgaccagaucaacggcaagcucaaccgccucaucggcaagaccaacgagaaguuccaccagaucgagaaggaguucuccgaggucgagggccgcauccaggaccucgagaaguacgucgaggacaccaagaucgacaucugguccuacaacgccgagcuccucgucgcccucgagaaccagcacaccaucgaccucaccgacuccgagaugaacaagcucuucgagaagaccaagaagcagcuccgcgagaacgccgaggacaugggcaacggcugcuucaagaucuaccacaagugcgacaacgccugcaucggcuccauccgcaacggcaccuacgaccacgacgucuaccgcgacgaggcccucaacaaccgcuuccagaucaagggcgucgagcucaaguccggcuacaaggacuggauccucuggaucuccuucgccaucuccugcuuccuccucugcgucgcccuccucggcuucaucaugugggccugccagaagggcaacauccgcugcaacaucugcaucuga

SEQ ID NO: 109150 - RNA, 1701 nt, Artificial Sequence; identical to SEQ ID NO: 108477
  derived and/or modified CDS sequence (opt2) from hemagglutinin__InfluenzaA__ALA08646

SEQ ID NO: 109151 - RNA, 1701 nt, Artificial Sequence; identical to SEQ ID NO: 108477
  derived and/or modified CDS sequence (opt2) from hemagglutinin__InfluenzaA__ALA08647

SEQ ID NO: 109152 - RNA, 1701 nt, Artificial Sequence; identical to SEQ ID NO: 109034
  derived and/or modified CDS sequence (opt2) from hemagglutinin__InfluenzaA__ALA08648

SEQ ID NO: 109153 - RNA, 1701 nt, Artificial Sequence
  derived and/or modified CDS sequence (opt2) from hemagglutinin__InfluenzaA__ALA08650
augaagaccaucaucgcccucuccuacauccucugccucgucuucgcccagaagauccccggcaacgacaacuccaccgccacccucugccucggccaccacgccguccccaacggcaccaucgucaagaccaucaccaacgagcgcaucgaggucaccaacgccaccgagcucguccagaacuccuccaucggcgagaucugcgacuccccccaccagauccucgacggcgagaacugcacccucaucgacgcccuccucggcgacccccagugcgacggcuuccagaacaagaagugggaccucuucgucgagcgcuccaaggccuacuccaacugcuaccccuacgacguccccgacuacgccucccuccgcucccucgucgccuccuccggcacccucgaguucaacaacgaguccuucaacuggaccggcgucacccagaacggcaccuccuccgccugcauccgccgcuccuccuccuccuucuucucccgccucaacuggcucacccaccucaacuacaccuaccccgcccucaacgucaccaugcccaacaacgagcaguucgacaagcucuacaucuggggcguccaccaccccggcaccgacaaggaccagaucuuccucuacgcccaguccuccggccgcaucaccgucuccaccaagcgcucccagcaggccgucauccccaacaucggcucccgcccccgcauccgcgacauccccucccgcaucuccaucuacuggaccaucgucaagcccggcgacauccuccucaucaacuccaccggcaaccucaucgccccccgcggcuacuucaagauccgcuccggcaaguccuccaucaugcgcuccgacgcccccaucggcaagugcaaguccgagugcaucacccccaacggcuccauccccaacgacaagcccuuccagaacgucaaccgcaucaccuacggcgccugcccccgcuacgucaagcacuccacccucaagcucgccaccggcaugcgcaacguccccgagaagcagacccgcggcaucuucggcgccaucgccggcuucaucgagaacggcugggagggcauggucgacggcugguacggcuuccgccaccagaacuccgagggccgcggccaggccgccgaccucaaguccacccaggccgccaucgaccagaucaacggcaagcucaaccgccucaucggcaagaccaacgagaaguuccaccagaucgagaaggaguucuccgaggucgagggccgcauccaggaccucgagaaguacgucgaggacaccaagaucgaccucugguccuacaacgccgagcuccucgucgcccucgagaaccagcacaccaucgaccucaccgacuccgagaugaacaagcucuucgagaagaccaagaagcagcuccgcgagaacgccgaggacaugggcaacggcugcuucaagaucuaccacaagugcgacaacgccugcaucggcuccauccgcaacggcaccuacgaccacaacgucuaccgcgacgaggcccucaacaaccgcuuccagaucaagggcgucgagcucaaguccggcuacaaggacuggauccucuggaucuccuucgccaucuccugcuuccuccucugcgucgcccuccucggcuucaucaugugggccugccagaagggcaacauccgcugcaacaucugcaucuga

SEQ ID NO: 109154 - RNA, 1701 nt, Artificial Sequence; identical to SEQ ID NO: 109034
  derived and/or modified CDS sequence (opt2) from hemagglutinin__InfluenzaA__ALA08652

SEQ ID NO: 109155 - RNA, 1701 nt, Artificial Sequence; identical to SEQ ID NO: 108477
  derived and/or modified CDS sequence (opt2) from hemagglutinin__InfluenzaA__ALA08653

SEQ ID NO: 109156 - RNA, 1701 nt, Artificial Sequence
  derived and/or modified CDS sequence (opt2) from hemagglutinin__InfluenzaA__ALA08654
augaagaccaucaucgcccucuccuacauccucugccucgucuucgcccagaagauccccggcaacgacaacuccaccgccacccucugccucggccaccacgccguccccaacggcaccaucgucaagaccaucaccaacgaccgcaucgaggucaccaacgccaccgagcucguccagaacuccuccaucggcgagaucugcgacuccccccaccagauccucgacggcgagaacugcacccucaucgacgcccuccucggcgacccccagugcgacggcuuccagaacaagaagugggaccucuucgucgagcgcuccaaggccuacuccaacugcuaccccuacgacguccccgacuacgccucccuccgcucccucgucgccuccuccggcacccucgaguucaacaacgaguccuucaacuggaccggcgucacccagaacggcaccuccuccgccugcauccgccgcuccuccuccuccuucuucucccgccucaacuggcucacccaccucaacuacaccuaccccgcccucaacgucaccaugcccaacaacgagcaguucgacaagcucuacaucuggggcguccaccaccccggcaccgacaaggaccagaucuuccucuacgcccaguccuccggccgcaucaccgucuccaccaagcgcucccagcaggccgucauccccaacaucggcucccgcccccgcauccgcgacauccccucccgcaucuccaucuacuggaccaucgucaagcccggcgacauccuccucaucaacuccaccggcaaccucaucgccccccgcggcuacuucaagauccgcuccggcaaguccuccaucaugcgcuccgacgcccccaucggcaagugcaaguccgagugcaucacccccaacggcuccauccccaacgacaagcccuuccagaacgucaaccgcaucaccuacggcgccugcccccgcuacgucaagcacuccacccucaagcucgccaccggcaugcgcaacguccccgagaagcagacccgcggcaucuucggcgccaucgccggcuucaucgagaacggcugggagggcauggucgacggcugguacggcuuccgccaccagaacuccgagggccgcggccaggccgccgaccucaaguccacccaggccgccaucgaccagaucaacggcaagcucaaccgccucaucggcaagaccaacgagaaguuccaccagaucgagaaggaguucuccgaggucgagggccgcauccaggaccucgagaaguacgucgaggacaccaagaucgaccucugguccuacaacgccgagcuccucgucgcccucgagaaccagcacaccaucgaccucaccgacuccgagaugaacaagcucuucgagaagaccaagaagcagcuccgcgagaacgccgaggacaugggcaacggcugcuucaagaucuaccacaagugcgacaacgccugcaucggcuccauccgcaacggcaccuacgaccacaacgucuaccgcgacgaggcccucaacaaccgcuuccagaucaagggcgucgagcucaaguccggcuacaaggacuggauccucuggaucuccuucgccaaguccugcuuccuccucugcgucgcccuccucggcuucaucaugugggccugccagaagggcaacauccgcugcaacaucugcaucuga

SEQ ID NO: 109157 - RNA, 1701 nt, Artificial Sequence; identical to SEQ ID NO: 109034
  derived and/or modified CDS sequence (opt2) from hemagglutinin__InfluenzaA__ALA08655

SEQ ID NO: 109158 - RNA, 1701 nt, Artificial Sequence; identical to SEQ ID NO: 109034
  derived and/or modified CDS sequence (opt2) from hemagglutinin__InfluenzaA__ALA08656

SEQ ID NO: 109159 - RNA, 1701 nt, Artificial Sequence
  derived and/or modified CDS sequence (opt2) from hemagglutinin__InfluenzaA__ALA08657
augaagaccaucaucgcccucuccuacauccucugccucgucuucgcccagaagcuccccgagaacgacaacuccaccgccacccucugccucggccaccacgccguccccaacggcaccaucgucaagaccaucaccuccgaccgcaucgaggucaccaacgccaccgagcucguccagaacuccuccaucggcgagaucugcgacuccccccaccagauccucgacggcaagaacugcacccucaucgacgcccuccucggcgacccccagugcgacggcuuccagaacaagaagugggaccucuucaucgagcgcuccaaggccuacuccaacugcuaccccuacgacguccccgacuacgccucccuccgcucccucgucgccuccuccggcacccucgaguucaacgacgaguccuucaacugggccggcgucacccagaacggcaccuccuccgccugcauccgcggcuccaacuccuccuucuucucccgccucaacuggcucacccacuccaacuucaaguaccccgcccucaacgucaccaugcccaacaacgagcaguucgacaagcucuacaucuggggcguccaccaccccggcaccgacaaggaccagaucuuccucuacgcccaguccuccggccgcaucaccgucuccaccaagcgcucccagcaggccgucauccccaacaucggcucccgcccccgcauccgcaacauccccucccgcaucuccaucuacuggaccaucgucaagcccggcgacauccuccucaucaacuccaccggcaaccucaucgccccccgcggcuacuucaagauccgcuccggcaaguccuccaucaugcgcuccgacgcccccaucggcaagugcaaguccgagugcaucacccccaacggcuccauccccaacgacaagcccuuccagaacgucaaccgcaucaccuacggcgccugcccccgcuacgucaagcaguccacccucaagcucgccaccggcaugcgcaacguccccgagaagcagacccgcggcaucuucggcgccaucgccggcuucaucgagaacggcugggagggcaugaaggacggcugguacggcuuccgccaccagaacuccgagggccgcggccaggccgccgaccucaaguccacccaggccgccaucgaccagaucaacggcaagcucaaccgccucaucggcaagaccaacgagaaguuccaccagaucgagaaggaguucuccgaggucgagggccgcauccaggaccucgagaaguacgucgaggacaccaagaucgaccucugguccuacaacgccgagcuccucgucgcccucgagaaccagcacaccaucgaccucaccgacuccgagaugaacaagcucuucgagaagaccaagaagcagcuccgcgagaacgccgaggacaugggcaacggcugcuucaagaucuaccacaagugcgacaacgccugcaucggcuccauccgcaacggcaccuacgaccacgacgucuaccgcgacgaggcccucaacaaccgcuuccagaucaagggcgucgagcucaaguccggcuacaaggacuggauccucuggaucuccuucgccaucuccugcuuccuccucugcgucgcccuccucggcuucaucaugugggccugccagaagggcaacauccgcugcaacaucugcaucuga

SEQ ID NO: 109160 - RNA, 1701 nt, Artificial Sequence; identical to SEQ ID NO: 109034
  derived and/or modified CDS sequence (opt2) from hemagglutinin__InfluenzaA__ALA08658

SEQ ID NO: 109161 - RNA, 1701 nt, Artificial Sequence; identical to SEQ ID NO: 109021
  derived and/or modified CDS sequence (opt2) from hemagglutinin__InfluenzaA__ALA08659

SEQ ID NO: 109162 - RNA, 1701 nt, Artificial Sequence
  derived and/or modified CDS sequence (opt2) from hemagglutinin__InfluenzaA__ALA08660
augaagaccaucaucgcccucuccuacauccucugccucgucuucgcccagaagauccccggcaacgacaacuccaccgccacccucugccucggccaccacgccguccccaacggcaccaucgucaagaccaucaccaacgaccgcaucgaggucaccaacgccaccgagcucguccagaacuccuccaucggcgagaucugcgacuccccccaccagauccucgacggcgagaacugcacccucaucgacgcccuccucggcgacccccagugcgacggcuuccagaacaagaagugggaccucuucgucgagcgcuccaaggccuacuccaacugcuaccccuacgacguccccgacuacgccucccuccgcucccucgucgccuccuccggcacccucgaguucaacaacgaguccuucaacuggaccggcgucacccagaacggcaccuccuccgccugcauccgccgcuccuccuccuccuucuucucccgccucaacuggcucacccaccucaacuacaccuaccccgcccucaacgucaccaugcccaacaacgagcaguucgacaagcucuacaucuggggcguccaccaccccggcaccgacaaggaccagaucuuccucuacgcccaguccuccggccgcaucaccgucuccaccaagcgcucccagcaggccgucauccccaacaucggcucccgcccccgcauccgcgacauccccucccgcaucuccaucuacuggaccaucgucaagcccggcgacauccuccucaucaacuccaccggcaaccucaucgccccccgcggcuacuucaagauccgcuccggcaaguccuccaucaugcgcuccgacgcccccaucggcaagugcaaguccgagugcaucacccccaacggcuccauccccaacgacaagcccuuccagaacgucaaccgcaucaccuacggcgccugcccccgcuacgucaagcacggcacccucaagcucgccaccggcaugcgcaacguccccgagaagcagacccgcggcaucuucggcgccaucgccggcuucaucgagaacggcugggagggcauggucgacggcugguacggcuuccgccaccagaacuccgagggccgcggccaggccgccgaccucaaguccacccaggccgccaucgaccagaucaacggcaagcucaaccgccucaucggcaagaccaacgagaaguuccaccagaucgagaaggaguucuccgaggucgagggccgcauccaggaccucgagaaguacgucgaggacaccaagaucgaccucugguccuacaacgccgagcuccucgucgcccucgagaaccagcacaccaucgaccucaccgacuccgagaugaacaagcucuucgagaagaccaagaagcagcuccgcgagaacgccgaggacaugggcaacggcugcuucaagaucuaccacaagugcgacaacgccugcaucggcuccauccgcaacggcaccuacgaccacaacgucuaccgcgacgaggcccucaacaaccgcuuccagaucaagggcgucgagcucaaguccggcuacaaggacuggauccucuggaucuccuucgccaucuccugcuuccuccucugcgucgcccuccucggcuucaucaugugggccugccagaagggcaacauccgcugcaacaucugcaucuga

SEQ ID NO: 109163 - RNA, 1701 nt, Artificial Sequence
  derived and/or modified CDS sequence (opt2) from hemagglutinin__InfluenzaA__ALA08662
augaagaccaucaucgcccucuccuacauccucugccucgucuucgcccagaagauccccggcaacgacaacuccaccgccacccucugccucggccaccacgccguccccaacggcaccaucgucaagaccaucaccaacgaccgcaucgaggucaccaacgccaccgagcucguccagaacuccuccaucggcgagaucugcgacuccccccaccagauccucgacggcgagaacugcacccucaucgacgcccuccucggcgacccccagugcgacggcuuccagaacaagaagugggaccucuucgucgagcgcuccaaggccuacuccaacugcuaccccuacgacguccccgacuacgccucccuccgcucccucgucgccuccuccggcacccucgaguucaacaacgaguccuucaacuggaccggcgucacccagaacggcaccuccuccgccugcauccgccgcuccuccuccuccuucuucucccgccucaacuggcucacccaccucaacuacaccuaccccgcccucaacgucaccaugcccaacaacgagcaguucgacaagcucuacaucuggggcguccaccaccccggcaccgacaaggaccagaucuuccucuacgcccaguccuccggccgcaucaccgucuccaccaagcgcucccagcaggccgucauccccaacaucggcucccgcccccgcauccgcgacauccccucccgcaucuccaucuacuggaccaucgucaagcccggcgacauccuccucaucaacuccaccggcaaccucaucgccccccgcggcuacuucaagauccucuccggcaaguccuccaucaugcgcuccgacgcccccaucggcaagugcaaguccgagugcaucacccccaacggcuccauccccaacgacaagcccuuccagaacgucaaccgcaucaccuacggcgccugcccccgcuacgucaagcacuccacccucaagcucgccaccggcaugcgcaacguccccgagaagcagacccgcggcaucuucggcgccaucgccggcuucaucgagaacggcugggagggcauggucgacggcugguacggcuuccgccaccagaacuccgagggccgcggccaggccgccgaccucaaguccacccaggccgccaucgaccagaucaacggcaagcucaaccgccucaucggcaagaccaacgagaaguuccaccagaucgagaaggaguucuccgaggucgagggccgcauccaggaccucgagaaguacgucgaggacuccaagaucgaccucugguccuacaacgccgagcuccucgucgcccucgagaaccagcacaccaucgaccucaccgacuccgagaugaacaagcucuucgagaagaccaagaagcagcuccgcgagaacgccgaggacaugggcaacggcugcuucaagaucuaccacaagugcgacaacgccugcaucggcuccauccgcaacggcaccuacgaccacaacgucuaccgcgacgaggcccucaacaaccgcuuccagaucaagggcgucgagcucaaguccggcuacaaggacuggauccucuggaucuccuucgccaucuccugcuuccuccucugcgucgcccuccucggcuucaucaugugggccugccagaagggcaacauccgcugcaacaucugcaucuga

SEQ ID NO: 109164 - RNA, 1701 nt, Artificial Sequence; identical to SEQ ID NO: 109135
  derived and/or modified CDS sequence (opt2) from hemagglutinin__InfluenzaA__ALA08663

SEQ ID NO: 109165 - RNA, 1701 nt, Artificial Sequence; identical to SEQ ID NO: 109163
  derived and/or modified CDS sequence (opt2) from hemagglutinin__InfluenzaA__ALA08665

SEQ ID NO: 109166 - RNA, 1701 nt, Artificial Sequence
  derived and/or modified CDS sequence (opt2) from hemagglutinin__InfluenzaA__ALA08666
augaagaccaucaucgcccucuccuacauccucugccucgucuucgcccagaagcuccccggcaacgacaacuccaccgccacccucugccucggccaccacgccguccccaacggcaccaucgucaagaccaucaccaacgaccgcaucgaggucaccaacgccaccgagcucguccagaacuccuccaucggcgagaucugcgacuccccccaccagauccucgacggcgagaacugcacccucaucgacgcccuccucggcgacccccagugcgacggcuuccagaacaagaagugggaccucuucgucgagcgcuccaaggccuacuccaacugcuaccccuacgacguccccgacuacgccucccuccgcucccucgucgccuccuccggcacccucgaguucaacaacgaguccuucaacugggccggcgucacccagaacggcaccuccuccgccugcauccgcggcuccaacuccuccuucuucucccgccucaacuggcucacccaccucaacuucaaguaccccgcccucaacgucaccaugcccaacaacgagcaguucgacaagcucuacaucuggggcguccaccaccccggcaccgacaaggaccagaucuuccucuacgcccaguccuccggccgcaucaccgucuccaccaagcgcucccagcaggccgucauccccaacaucggcucccgcccccgcauccgcaacauccccucccgcaucuccaucuacuggaccaucgucaagcccggcgacauccuccucaucaacuccaccggcaaccucaucgccccccgcggcuacuucaagauccgcuccggcaaguccuccaucaugcgcuccgacgcccccaucggcaagugcaaguccgagugcaucacccccaacggcuccauccccaacgacaagcccuuccagaacgucaaccgcaucaccuacggcgccugcccccgcuacgucaagcaguccacccucaagcucgccaccggcaugcgcaacguccccgagaagcagacccgcggcaucuucggcgccaucgccggcuucaucgagaacggcugggagggcauggucgacggcugguacggcuuccgccaccagaacuccgagggccgcggccaggccgccgaccucaaguccacccaggccgccaucgaccagaucaacggcaagcucaaccgccucaucggcaagaccaacgagaaguuccaccagaucgagaaggaguucuccgaggucgagggccgcauccaggaccucgagaaguacgucgaggacaccaagaucgaccucugguccuacaacgccgagcuccucgucgcccucgagaaccagcacaccaucgaccucaccgacuccgagaugaacaagcucuucgagaagaccaagaagcagcuccgcgagaacgccgaggacaugggcaacggcugcuucaagaucuaccacaagugcgacaacgccugcaucggcuccauccgcaacggcaccuacgaccacgacgucuaccgcgacgaggcccucaacaaccgcuuccagaucaagggcgucgagcucaaguccggcuacaaggacuggauccucuggaucuccuucgccauguccugcuuccuccucugcgucgcccuccucggcuucaucaugugggccugccagaagggcaacauccgcugcaacaucugcaucuga

SEQ ID NO: 109167 - RNA, 1701 nt, Artificial Sequence
  derived and/or modified CDS sequence (opt2) from hemagglutinin__InfluenzaA__ALA08667
augaagaccaucaucgcccucuccuacauccucugccucgucuucgcccagaagauccccggcaacgacaacuccaccgccacccucugccucggccaccacgccguccccaacggcaccaucgucaagaccaucaccaacgaccgcaucgaggucaccaacgccaccgagcucguccagaacuccuccaucggcgagaucugcgacuccccccaccagauccucgacggcgagaacugcacccucaucgacgcccuccucggcgacccccagugcgacggcuuccagaacaagaagugggaccucuucgucgagcgcuccaaggccuacuccaacugcuaccccuacgacguccccgacuacgccucccuccgcucccucgucgccuccuccggcacccucgaguucaacaacgaguccuucaacuggaccggcgucacccagaacggcaccuccuccgccugcauccgcaaguccuccuccuccuucuucucccgccucaacuggcucacccaccucaacuacaaguaccccgcccucaacgucaccaugcccaacaacgagcaguucgacaagcucuacaucuggggcguccaccaccccggcaccgacaaggaccagaucuuccucuacgcccgcuccuccggccgcaucaccgucuccaccaagcgcucccagcaggccgucauccccaacaucggcucccgcccccgcauccgcgacauccccucccgcaucuccaucuacuggaccaucgucaagcccggcgacauccuccucaucaacuccaccggcaaccucaucgccccccgcggcuacuucaagauccgcuccggcaaguccuccaucaugcgcuccgacgcccccaucggcaagugcaaguccgagugcaucacccccaacggcuccauccccaacgacaagcccuuccagaacgucaaccgcaucaccuacggcgccugcccccgcuacgucaagcacuccacccucaagcucgccaccggcaugcgcaacguccccgagaagcagacccgcggcaucuucggcgccaucgccggcuucaucgagaacggcugggagggcauggucgacggcugguacggcuuccgccaccagaacuccgagggccgcggccaggccgccgaccucaaguccacccaggccgccaucgaccagaucaacggcaagcucaaccgccucaucggcaagaccaacgagaaguuccaccagaucgagaaggaguucuccgaggucgagggccgcauccaggaccucgagaaguacgucgaggacaccaagaucgaccucugguccuacaacgccgagcuccucgucgcccucgagaaccagcacaccaucgaccucaccgacuccgagaugaacaagcucuucgagaagaccaagaagcagcuccgcgagaacgccgaggacaugggcaacggcugcuucaagaucuaccacaagugcgacaacgccugcaucggcuccauccgcaacggcaccuacgaccacaacgucuaccgcgacgaggcccucaacaaccgcuuccagaucaagggcgucgagcucaaguccggcuacaaggacuggauccucuggaucuccuucgccaucuccugcuuccuccucugcgucgcccuccucggcuucaucaugugggccugccagaagggcaacauccgcugcaacaucugcaucuga

SEQ ID NO: 109168 - RNA, 1701 nt, Artificial Sequence
  derived and/or modified CDS sequence (opt2) from hemagglutinin__InfluenzaA__ALA08668
augaagaccaucaucgcccucuccuacauccucugccucgucuucgcccagaagauccccggcaacgacaacuccaccgccacccucugccucggccaccacgccguccccaacggcaccaucgucaagaccaucaccaacgaccgcaucgaggucaccaacgccaccgagcucguccagaacuccuccaucggcgagaucugcgacuccccccaccagauccucgacggcgagaacugcacccucaucgacgcccuccucggcgacccccagugcgacggcuuccagaacaagaagugggaccucuucgucgagcgcuccaaggccuacuccaacugcuaccccuacgacguccccgacuacgccucccuccgcucccucgucgccuccuccggcacccucgaguucaacaacgaguccuucaacuggaccggcgucacccagaacggcaccuccuccgccugcauccgccgcuccuccuccuccuucuucucccgccucaacuggcucacccaccucaacuacaccuaccccgcccucaacgucaccaugcccaacaacgagcaguucgacaagcucuacaucuggggcguccaccaccccggcaccgacaaggaccagaucuuccucuacgcccaguccuccggccgcaucaccgucuccaccaagcgcucccagcaggccgucauccccaacaucggcucccgcccccgcauccgcgacauccccucccgcaucuccaucuacuggaccaucgucaagcccggcgacauccuccucaucaacuccaccggcaaccucaucgccccccgcggcuacuucaagauccgcuccggcaaguccuccaucaugcgcuccgacgcccccaucggcaagugcaaguccgagugcaucacccccaacggcuccauccccaacgacaagcccuuccagaacgucaaccgcaucaccuacggcgccugcccccgcuacgucaagcacuccacccucaagcucgccaccggcaugcgcaacguccccgagaagcagacccgcggcaucuucggcgccaucgccggcuucaucgagaacggcugggagggcauggucgacggcugguacggcuuccgccaccagaacuccgagggccgcggccaggccgccgaccucaaguccacccaggccgccaucgaccagaucaacggcaagcucaaccgccucaucggcaagaccaacgagaaguuccaccagaucgagaaggaguucuccgaggucgagggccgcauccaggaccucgagaaguacgucgaggacaccaagaucgaccucugguccuacaacgccgagcuccucgucgcccucgagaaccagcacaccaucgaccucaccgacuccgagaugaacaagcucuucgagaagaccaagaagcagcuccgcgagaacgccgaggacaugggcaacggcugcuucaagaucuaccacaagugcgacaacgccugcaucggcuccauccgcaacggcaccuacgaccacaacgucuaccgcgacgaggccaucaacaaccgcuuccagaucaagggcgucgagcucaaguccggcuacaaggacuggauccucuggaucuccuucgccaucuccugcuuccuccucugcgucgcccuccucggcuucaucaugugggccugccagaagggcaacauccgcugcaacaucugcaucuga

SEQ ID NO: 109169 - RNA, 1701 nt, Artificial Sequence; identical to SEQ ID NO: 109135
  derived and/or modified CDS sequence (opt2) from hemagglutinin__InfluenzaA__ALA08669

SEQ ID NO: 109170 - RNA, 1701 nt, Artificial Sequence; identical to SEQ ID NO: 109028
  derived and/or modified CDS sequence (opt2) from hemagglutinin__InfluenzaA__ALA08670

SEQ ID NO: 109171 - RNA, 1701 nt, Artificial Sequence; identical to SEQ ID NO: 109135
  derived and/or modified CDS sequence (opt2) from hemagglutinin__InfluenzaA__ALA08671

SEQ ID NO: 109172 - RNA, 1701 nt, Artificial Sequence; identical to SEQ ID NO: 109135
  derived and/or modified CDS sequence (opt2) from hemagglutinin__InfluenzaA__ALA08672

SEQ ID NO: 109173 - RNA, 1701 nt, Artificial Sequence; identical to SEQ ID NO: 109028
  derived and/or modified CDS sequence (opt2) from hemagglutinin__InfluenzaA__ALA08673

SEQ ID NO: 109174 - RNA, 1701 nt, Artificial Sequence; identical to SEQ ID NO: 109135
  derived and/or modified CDS sequence (opt2) from hemagglutinin__InfluenzaA__ALA08674

SEQ ID NO: 109175 - RNA, 1701 nt, Artificial Sequence; identical to SEQ ID NO: 108477
  derived and/or modified CDS sequence (opt2) from hemagglutinin__InfluenzaA__ALA08675

SEQ ID NO: 109176 - RNA, 1701 nt, Artificial Sequence; identical to SEQ ID NO: 109135
  derived and/or modified CDS sequence (opt2) from hemagglutinin__InfluenzaA__ALA08676

SEQ ID NO: 109177 - RNA, 1701 nt, Artificial Sequence; identical to SEQ ID NO: 109135
  derived and/or modified CDS sequence (opt2) from hemagglutinin__InfluenzaA__ALA08677

SEQ ID NO: 109178 - RNA, 1701 nt, Artificial Sequence; identical to SEQ ID NO: 109135
  derived and/or modified CDS sequence (opt2) from hemagglutinin__InfluenzaA__ALA08678

SEQ ID NO: 109179 - RNA, 1701 nt, Artificial Sequence; identical to SEQ ID NO: 109135
  derived and/or modified CDS sequence (opt2) from hemagglutinin__InfluenzaA__ALA08679

SEQ ID NO: 109180 - RNA, 1701 nt, Artificial Sequence; identical to SEQ ID NO: 109135
  derived and/or modified CDS sequence (opt2) from hemagglutinin__InfluenzaA__ALA08680

SEQ ID NO: 109181 - RNA, 1701 nt, Artificial Sequence; identical to SEQ ID NO: 109034
  derived and/or modified CDS sequence (opt2) from hemagglutinin__InfluenzaA__ALA08681

SEQ ID NO: 109182 - RNA, 1701 nt, Artificial Sequence; identical to SEQ ID NO: 109113
  derived and/or modified CDS sequence (opt2) from hemagglutinin__InfluenzaA__ALA08682

SEQ ID NO: 109183 - RNA, 1701 nt, Artificial Sequence; identical to SEQ ID NO: 109034
  derived and/or modified CDS sequence (opt2) from hemagglutinin__InfluenzaA__ALA08683

SEQ ID NO: 109184 - RNA, 1701 nt, Artificial Sequence
  derived and/or modified CDS sequence (opt2) from hemagglutinin__InfluenzaA__ALA08684
augaagaccaucaucgcccucucccacauccucugccucgucuucgcccagaagauccccggcaacgacaacuccaccgccacccucugccucggccaccacgccguccccaacggcaccaucgucaagaccaucaccaacgaccgcaucgaggucaccaacgccaccgagcucguccagaacuccuccaucggcgagaucugcgacuccccccaccagauccucgacggcgagaacugcacccucaucgacgcccuccucggcgacccccagugcgacggcuuccagaacaagaagugggaccucuucgucgagcgcuccaaggccuacuccaacugcuaccccuacgacguccccgacuacgccucccuccgcucccucgucgccuccuccggcacccucgaguucaacaacgaguccuucaacuggaccggcgucacccagaacggcaccuccuccgccugcauccgccgcuccuccuccuccuucuucucccgccucaacuggcucacccaccucaacuacaaguaccccgcccucaacgucaccaugcccaacaacgagcaguucgacaagcucuacaucuggggcguccaccaccccggcaccgacaaggaccagaucuuccucuacgcccaguccuccggccgcaucaccgucuccaccaagggcucccagcaggccgucauccccaacaucggcucccgcccccgcauccgcgacauccccucccgcaucuccaucuacuggaccaucgucaagcccggcgacauccuccucaucaacuccaccggcaaccucaucgccccccgcggcuacuucaagauccgcuccggcaaguccuccaucaugcgcuccgacgcccccaucggcaagugcaaguccgagugcaucacccccaacggcuccauccccaacgacaagcccuuccagaacgucaaccgcaucaccuacggcgccugcccccgcuacgucaagcacuccacccucaagcucgccaccggcaugcgcaacguccccgagaagcagacccgcggcaucuucggcgccaucgccggcuucaucgagaacggcugggagggcauggucgacggcugguacggcuuccgccaccagaacuccgagggccgcggccaggccgccgaccucaaguccacccaggccgccaucgaccagaucaacggcaagcucaaccgccucaucggcaagaccaacgagaaguuccaccagaucgagaaggaguucuccgaggucgagggccgcauccaggaccucgagaaguacgucgaggacaccaagaucgaccucugguccuacaacgccgagcuccucgucgcccucgagaaccagcacaccaucgaccucaccgacuccgagaugaacaagcucuucgagaagaccaagaagcagcuccgcgagaacgccgaggacaugggcaacggcugcuucaagaucuaccacaagugcgacaacgccugcaucggcuccauccgcaacggcaccuacgaccacaacgucuaccgcgacgaggcccucaacaaccgcuuccagaucaagggcaucgagcucaaguccggcuacaaggacuggauccucuggaucuccuucgccaucuccugcuuccuccucugcgucgcccuccucggcuucaucaugugggccugccagaagggcaacauccgcugcaacaucugcaucuga

SEQ ID NO: 109185 - RNA, 1701 nt, Artificial Sequence; identical to SEQ ID NO: 108477
  derived and/or modified CDS sequence (opt2) from hemagglutinin__InfluenzaA__ALA08686

SEQ ID NO: 109186 - RNA, 1701 nt, Artificial Sequence
  derived and/or modified CDS sequence (opt2) from hemagglutinin__InfluenzaA__ALA08687
augaagaccaucaucgcccucuccuacauccucugccucgucuucgcccagaagauccccggcaacgacaacuccaccgccacccucugccucggccaccacgccguccccaacggcaccaucgucaagaccaucaccaacgaccgcaucgaggucaccaacgccaccgagcucguccagaacuccuccaucggcgagaucugcgacuccccccaccagauccucgacggcgagaacugcacccucaucgacgcccuccucggcgacccccagugcgacggcuuccagaacaagaagugggaccucuucgucgagcgcuccaaggccuacuccaacugcuaccccuacgacguccccgacuacgccucccuccgcucccucaucgccuccuccggcacccucgaguucaacaacgaguccuucaacuggaccggcgucacccagaacggcaccuccuccgccugcauccgccgcuccuccuccuccuucuucucccgccucaacuggcucacccaccucaacuacaccuaccccgcccucaacgucaccaugcccaacaacgagcaguucgacaagcucuacaucuggggcguccaccaccccggcaccgacaaggaccagaucuuccucuacgcccaguccuccggccgcaucaccgucuccaccaagcgcucccagcaggccgucauccccaacaucggcucccgcccccgcauccgcgacauccccucccgcaucuccaucuacuggaccaucgucaagcccggcgacauccuccucaucaacuccaccggcaaccucaucgccccccgcggcuacuucaagauccgcuccggcaaguccuccaucaugcgcuccgacgcccccaucggcaagugcaaguccgagugcaucacccccaacggcuccauccccaacgacaagcccuuccagaacgucaaccgcaucaccuacggcgccugcccccgcuacgucaagcacuccacccucaagcucgccaccggcaugcgcaacguccccgagaagcagacccgcggcaucuucggcgccaucgccggcuucaucgagaacggcugggagggcauggucgacggcugguacggcuuccgccaccagaacuccgagggccgcggccaggccgccgaccucaaguccacccaggccgccaucgaccagaucaacggcaagcucaaccgccucaucggcaagaccaacgagaaguuccaccagaucgagaaggaguucuccgaggucgagggccgcauccaggaccucgagaaguacgucgaggacaccaagaucgaccucugguccuacaacgccgagcuccucgucgcccucgagaaccagcacaccaucgaccucaccgacuccgagaugaacaagcucuucgagaagaccaagaagcagcuccgcgagaacgccgaggacaugggcaacggcugcuucaagaucuaccacaagugcgacaacgccugcaucggcuccauccgcaacggcaccuacgaccacaacgucuaccgcgacgaggcccucaacaaccgcuuccagaucaagggcgucgagcucaaguccggcuacaaggacuggauccucuggaucuccuucgccaucuccugcuuccuccucugcgucgcccuccucggcuucaucaugugggccugccagaagggcaacauccgcugcaacaucugcaucuga

SEQ ID NO: 109187 - RNA, 1701 nt, Artificial Sequence; identical to SEQ ID NO: 109128
  derived and/or modified CDS sequence (opt2) from hemagglutinin__InfluenzaA__ALA08688

SEQ ID NO: 109188 - RNA, 1701 nt, Artificial Sequence; identical to SEQ ID NO: 108477
  derived and/or modified CDS sequence (opt2) from hemagglutinin__InfluenzaA__ALE31612

SEQ ID NO: 109189 - RNA, 1701 nt, Artificial Sequence
  derived and/or modified CDS sequence (opt2) from hemagglutinin__InfluenzaA__ALE31613
augaagaccaucaucgcccucuccuacauccucugccucgucuucgcccagaagauccccggcaacgacaacuccaccgccacccucugccucggccaccacgccguccccaacggcaccaucgucaagaccaucaccaacgaccgcaucgaggucaccaacgccaccgagcucguccagaacuccuccaucggcgagaucugcgacuccccccaccagauccucgacggcgagaacugcacccucaucgacgcccuccucggcgacccccagugcgacggcuuccagaacaagaagugggaccucuucgucgagcgcuccaaggccuacuccaacugcuaccccuacgacguccccgacuacgccucccuccgcucccucgucgccuccuccggcacccucgaguucaacaacgaguccuucaacuggaccggcgucacccagaacggcaccuccuccgccugcauccgccgcuccuccuccuccuucuucucccgccucaacuggcucacccaccucaacuacaccuaccccgcccucaacgucaccaugcccaacaacgagcaguucgacaagcucuacaucuggggcguccaccaccccggcaccgacaaggaccagaucuuccucuacgcccaguccuccggccgcaucaccgucuccaccaagggcucccagcaggccgucauccccaacaucggcucccgcccccgcauccgcgacauccccucccgcaucuccaucuacuggaccaucgucaagcccggcgacauccuccucaucuccuccaccggcaaccucaucgccccccgcggcuacuucaagauccgcuccggcaaguccuccaucaugcgcuccgacgcccccaucggcaagugcaaguccgagugcaucacccccaacggcuccauccccaacgacaagcccuuccagaacgucaaccgcaucaccuacggcgccugcccccgcuacgucaagcacuccacccucaagcucgccaccggcaugcgcaacguccccgagaagcagacccgcggcaucuucggcgccaucgccggcuucaucgagaacggcugggagggcauggucgacggcugguacggcuuccgccaccagaacuccgagggccgcggccaggccgccgaccucaaguccacccaggccgccaucgaccagaucaacggcaagcucaaccgccucaucggcaagaccaacgagaaguuccaccagaucgagaaggaguucuccgaggucgagggccgcauccaggaccucgagaaguacgucgaggacaccaagaucgaccucugguccuacaacgccgagcuccucgucgcccucgagaaccagcacaccaucgaccucaccgacuccgagaugaacaagcucuucgagaagaccaagaagcagcuccgcgagaacgccgaggacaugggcaacggcugcuucaagaucuaccacaagugcgacaacgccugcaucggcuccauccgcaacggcaccuacgaccacaacgucuaccgcgacgaggcccucaacaaccgcuuccagaucaagggcgucgagcucaaguccggcuacaaggacuggauccucuggaucuccuucgccaucuccugccuccuccucugcgucgcccuccucggcuucaucaugugggccugccagaagggcaacauccgcugcaacaucugcaucuga

SEQ ID NO: 109190 - RNA, 1701 nt, Artificial Sequence
  derived and/or modified CDS sequence (opt2) from hemagglutinin__InfluenzaA__ALE31614
augaagaccaucaucgcccucuccuacauccucugccucgucuucgcccagaagauccccggcaacgacaacuccaccgccacccucugccucggccaccacgccguccccaacggcaccaucgucaagaccaucaccaacgaccgcaucgaggucaccaacgccaccgagcucguccagaacuccuccaucggcaagaucugcgacuccccccaccagauccucgacggcgagaacugcacccucaucgacgcccuccucggcgacccccagugcgacggcuuccagaacaagaagugggaccucuucgucgagcgcuccaaggccuacuccaacugcuaccccuacgacguccccgacuacgccucccuccgcucccucgucgccuccuccggcacccucgaguucaacaacgaguccuucaacuggaccggcgucacccagaacggcaccuccuccgccugcauccgccgcuccuccuccuccuucuucucccgccucaacuggcucacccaccucaacuacaccuaccccgcccucaacgucaccaugcccaacaacgagcaguucgacaagcucuacaucuggggcguccaccaccccggcaccgacaaggaccagaucuuccucuacgcccaguccuccggccgcaucaccgucuccaccaagcgcucccagcaggccgucauccccaacaucggcucccgcccccgcauccgcgacauccccucccgcaucuccaucuacuggaccaucgucaagcccggcgacauccuccucaucaacuccaccggcaaccucaucgccccccgcggcuacuucaagauccgcuccggcaaguccuccaucaugcgcuccgacgcccccaucggcaagugcaaguccgagugcaucacccccaacggcuccauccccaacgacaagcccuuccagaacgucaaccgcaucaccuacggcgccugcccccgcuacgucaagcacuccacccucaagcucgccaccggcaugcgcaacguccccgagaagcagacccgcggcaucuucggcgccaucgccggcuucaucgagaacggcugggagggcauggucgacggcugguacggcuuccgccaccagaacuccgagggccgcggccaggccgccgaccucaaguccacccaggccgccaucgaccagaucaacggcaagcucaaccgccucaucggcaagaccaacgagaaguuccaccagaucgagaaggaguucuccgaggucgagggccgcauccaggaccucgagaaguacgucgaggacaccaagaucgaccucugguccuacaacgccgagcuccucgucgcccucgagaaccagcacaccaucgaccucaccgacuccgagaugaacaagcucuucgagaagaccaagaagcagcuccgcgagaacgccgaggacaugggcaacggcugcuucaagaucuaccacaagugcgacaacgccugcaucggcuccauccgcaacggcaccuacgaccacaacgucuaccgcgacgaggcccucaacaaccgcuuccagaucaagggcgucgagcucaaguccggcuacaaggacuggauccucuggaucuccuucgccaucuccugcuuccuccucugcgucgcccuccucggcuucaucaugugggccugccagaagggcaacauccgcugcaacaucugcaucuga

SEQ ID NO: 109191 - RNA, 1701 nt, Artificial Sequence
  derived and/or modified CDS sequence (opt2) from hemagglutinin__InfluenzaA__ALE31615
augaagaccaucaucgcccucuccuacauccucugccucgucuucgcccagaagcuccccggcaacgacaacuccaccgccacccucugccucggccaccacgccguccccaacggcaccaucgucaagaccaucaccaacgaccgcaucgaggucaccaacgccaccgagcucguccagaacuccuccaucggcgagaucugcgacuccccccaccagauccucgacggcgagaacugcacccucaucgacgcccuccucggcgacccccagugcgacggcuuccagaacaagaagugggaccucuucgucgagcgcuccaaggccuacuccaacugcuaccccuacgacguccccgacuacgccucccuccgcucccucgucgccuccuccggcacccucgaguucaacaacgaguccuucaacugggccggcgucacccagaacggcaccuccuccgccugcauccgcggcuccaacuccuccuucuucucccgccucaacuggcucacccaccucaacuucaaguaccccgcccucaacgucaccaugcccaacaacgagcaguucgacaagcucuacaucuggggcguccaccaccccggcaccgacaaggaccagaucuuccucuacgcccaguccuccggccgcaucaccgucuccaccaagcgcucccagcaggccgucauccccaacaucggcucccgcccccgcauccgcaacauccccucccgcaucuccaucuacuggaccaucgucaagcccggcgacauccuccucaucaacuccaccggcaaccucaucgccccccgcggcuacuucaagauccgcuccggcaaguccuccaucaugcgcuccgacgcccccaucggcaagugcaaguccgagugcaucacccccaacggcuccauccccaacgacaagcccuuccagaacgucaaccgcaucaccuacggcgccugcccccgcuacgucaagcaguccacccucaagcucgccaccggcaugcgcaacguccccgagaagcagacccgcggcaucuucggcgccaucgccggcuucaucgagaacggcugggagggcauggucgacggcugguacggcuuccgccaccagaacuccgagggccgcggccaggccgccgaccucaaguccacccaggccgccaucgaccagaucaacggcaagcucaaccgccucaucggcaagaccaacgagaaguuccaccagaucgagaaggaguucuccgaggucgagggccgcauccaggaccucgagaaguacgucgaggacaccaagaucgaccucugguccuacaacgccgagcuccucgucgcccucgagaaccagcacaccaucgaccucaccgacuccgagaugaacaagcucuucgagaagaccaagaagcagcuccgcgagaacgccgaggacaugggcaacggcugcuucaagaucuaccacaagugcgacaacgccugcaucgaguccauccgcaacggcaccuacgaccacgacgucuaccgcgacgaggcccucaacaaccgcuuccagaucaagggcgucgagcucaaguccggcuacaaggacuggauccucuggaucuccuucgccaucuccugcuuccuccucugcgucgcccuccucggcuucaucaugugggccugccagaagggcaacauccgcugcaacaucugcaucuga

SEQ ID NO: 109192 - RNA, 1701 nt, Artificial Sequence; identical to SEQ ID NO: 108477
  derived and/or modified CDS sequence (opt2) from hemagglutinin__InfluenzaA__ALE31616

SEQ ID NO: 109193 - RNA, 1701 nt, Artificial Sequence; identical to SEQ ID NO: 108477
  derived and/or modified CDS sequence (opt2) from hemagglutinin__InfluenzaA__ALE31617

SEQ ID NO: 109194 - RNA, 1701 nt, Artificial Sequence; identical to SEQ ID NO: 108477
  derived and/or modified CDS sequence (opt2) from hemagglutinin__InfluenzaA__ALE31618

SEQ ID NO: 109195 - RNA, 1701 nt, Artificial Sequence; identical to SEQ ID NO: 109135
  derived and/or modified CDS sequence (opt2) from hemagglutinin__InfluenzaA__ALE31619

SEQ ID NO: 109196 - RNA, 1701 nt, Artificial Sequence; identical to SEQ ID NO: 108477
  derived and/or modified CDS sequence (opt2) from hemagglutinin__InfluenzaA__ALE31620

SEQ ID NO: 109197 - RNA, 1701 nt, Artificial Sequence
  derived and/or modified CDS sequence (opt2) from hemagglutinin__InfluenzaA__ALE31622
augaagaccaucaucgcccucuccuacauccucugccucgucuucgcccagaagauccccggcaacgacaacuccaccgccacccucugccucggccaccacgccguccccaacggcaccaucgucaagaccaucaccaacgaccgcaucgaggucaccaacgccaccgagcucguccagaacuccuccaucggcgagaucugcgacuccccccaccagauccucgacggcgagaacugcacccucaucgacgcccuccucggcgacccccagugcgacggcuuccagaacaagaagugggaccucuucgucgagcgcuccaaggccuacuccaacugcuaccccuacgacguccccgacuacgccucccuccgcucccucgucgccuccuccggcacccucgaguucaacaacgaguccuucaacuggaccggcgucacccagaacggcaccuccuccgccugcauccgccgcuccuccuccuccuucuucucccgccucaacuggcucacccaccucaacuacaccuaccccgcccucaacgucaccaugcccaacaacgagcaguucgacaagcucuacaucuggggcguccaccaccccggcaccgacaaggaccagaucuuccucuacgcccaguccuccggccgcaucaccgucuccaccaagcgcucccagcaggccgucauccccaacaucggcucccgcccccgcauccgcgacauccccucccgcaucuccaucuacuggaccaucgucaagcccggcgacauccuccucaucaacuccaccggcaaccucaucgccccccgcggcuacuucaagauccgcuccggcaaguccuccaucaugcgcuccgacguccccaucggcaagugcaaguccgagugcaucacccccaacggcuccauccccaacgacaagcccuuccagaacgucaaccgcaucaccuacggcgccugcccccgcuacgucaagcacuccacccucaagcucgccaccggcaugcgcaacguccccgagaagcagacccgcggcaucuucggcgccaucgccggcuucaucgagaacggcugggagggcauggucgacggcugguacggcuuccgccaccagaacuccgagggccgcggccaggccgccgaccucaaguccacccaggccgccaucgaccagaucaacggcaagcucaaccgccucaucggcaagaccaacgagaaguuccaccagaucgagaaggaguucuccgaggucgagggccgcauccaggaccucgagaaguacgucgaggacaccaagaucgaccucugguccuacaacgccgagcuccucgucgcccucgagaaccagcacaccaucgaccucaccgacuccgagaugaacaagcucuucgagaagaccaagaagcagcuccgcgagaacgccgaggacaugggcaacggcugcuucaagaucuaccacaagugcgacaacgccugcaucggcuccauccgcaacggcaccuacgaccacaacgucuaccgcgacgaggcccucaacaaccgcuuccagaucaagggcgucgagcucaaguccggcuacaaggacuggauccucuggaucuccuucgccaucuccugcuuccuccucugcgucgcccuccucggcuucaucaugugggccugccagaagggcaacauccgcugcaacaucugcaucuga

SEQ ID NO: 109198 - RNA, 1701 nt, Artificial Sequence; identical to SEQ ID NO: 108477
  derived and/or modified CDS sequence (opt2) from hemagglutinin__InfluenzaA__ALE31623

SEQ ID NO: 109199 - RNA, 1701 nt, Artificial Sequence; identical to SEQ ID NO: 108477
  derived and/or modified CDS sequence (opt2) from hemagglutinin__InfluenzaA__ALE31625

SEQ ID NO: 109200 - RNA, 1701 nt, Artificial Sequence; identical to SEQ ID NO: 108477
  derived and/or modified CDS sequence (opt2) from hemagglutinin__InfluenzaA__ALE31626

SEQ ID NO: 109201 - RNA, 1701 nt, Artificial Sequence; identical to SEQ ID NO: 108477
  derived and/or modified CDS sequence (opt2) from hemagglutinin__InfluenzaA__ALE31627

SEQ ID NO: 109202 - RNA, 1701 nt, Artificial Sequence; identical to SEQ ID NO: 108477
  derived and/or modified CDS sequence (opt2) from hemagglutinin__InfluenzaA__ALE31628

SEQ ID NO: 109203 - RNA, 1701 nt, Artificial Sequence; identical to SEQ ID NO: 108477
  derived and/or modified CDS sequence (opt2) from hemagglutinin__InfluenzaA__ALE31629

SEQ ID NO: 109204 - RNA, 1701 nt, Artificial Sequence; identical to SEQ ID NO: 108477
  derived and/or modified CDS sequence (opt2) from hemagglutinin__InfluenzaA__ALE31632

SEQ ID NO: 109205 - RNA, 1701 nt, Artificial Sequence
  derived and/or modified CDS sequence (opt2) from hemagglutinin__InfluenzaA__ALE31634
augaagaccaucaucgcccucuccuacauccucugccucguccucgcccagaagauccccggcaacgacaacuccaccgccacccucugccucggccaccacgccguccccaacggcaccaucgucaagaccaucaccaacgaccgcaucgaggucaccaacgccaccgagcucguccagaacuccuccaucggcgagaucugcgacuccccccaccagauccucgacggcgagaacugcacccucaucgacgcccuccucggcgacccccagugcgacggcuuccagaacaagaagugggaccucuucgucgagcgcuccaaggccuacuccaacugcuaccccuacgacguccccgacuacgccucccuccgcucccucgucgccuccuccggcacccucgaguucaacaacgaguccuucaacuggaccggcgucacccagaacggcaccuccuccgccugcauccgccgcuccuccuccuccuucuucucccgccucaacuggcucacccaccucaacuacaccuaccccgcccucaacgucaccaugcccaacaacgagcaguucgacaagcucuacaucuggggcguccaccaccccggcaccgacaaggaccagaucuuccucuacgcccaguccuccggccgcaucaccgucuccaccaagcgcucccagcaggccgucauccccaacaucggcucccgcccccgcauccgcgacauccccucccgcaucuccaucuacuggaccaucgucaagcccggcgacauccuccucaucaacuccaccggcaaccucaucgccccccgcggcuacuucaagauccgcuccggcaaguccuccaucaugcgcuccgacgcccccaucggcaagugcaaguccgagugcaucacccccaacggcuccauccccaacgacaagcccuuccagaacgucaaccgcaucaccuacggcgccugcccccgcuacgucaagcacuccacccucaagcucgccaccggcaugcgcaacguccccgagaagcagacccgcggcaucuucggcgccaucgccggcuucaucgagaacggcugggagggcauggucgacggcugguacggcuuccgccaccagaacuccgagggccgcggccaggccgccgaccucaaguccacccaggccgccaucgaccagaucaacggcaagcucaaccgccucaucggcaagaccaacgagaaguuccaccagaucgagaaggaguucuccgaggucgagggccgcauccaggaccucgagaaguacgucgaggacaccaagaucgaccucugguccuacaacgccgagcuccucgucgcccucgagaaccagcacaccaucgaccucaccgacuccgagaugaacaagcucuucgagaagaccaagaagcagcuccgcgagaacgccgaggacaugggcaacggcugcuucaagaucuaccacaagugcgacaacgccugcaucggcuccauccgcaacggcaccuacgaccacaacgucuaccgcgacgaggcccucaacaaccgcuuccagaucaagggcgucgagcucaaguccggcuacaaggacuggauccucuggaucuccuucgccaucuccugcuuccuccucugcgucgcccuccucggcuucaucaugugggccugccagaagggcaacauccgcugcaacaucugcaucuga

SEQ ID NO: 109206 - RNA, 1701 nt, Artificial Sequence; identical to SEQ ID NO: 108477
  derived and/or modified CDS sequence (opt2) from hemagglutinin__InfluenzaA__ALE31635

SEQ ID NO: 109207 - RNA, 1701 nt, Artificial Sequence; identical to SEQ ID NO: 108477
  derived and/or modified CDS sequence (opt2) from hemagglutinin__InfluenzaA__ALE31636

SEQ ID NO: 109208 - RNA, 1701 nt, Artificial Sequence
  derived and/or modified CDS sequence (opt2) from hemagglutinin__InfluenzaA__ALE31638
augaagaccaucaucgcccucuccuacauccucugccucgucuucgcccagaagauccccggcaacgacaacuccaccgccacccucugccucggccaccacgccguccccaacggcaccaucgucaagaccaucaccaacgaccgcaucgaggucaccaacgccaccgagcucguccagaacuccuccaucggcgagaucugcgacuccccccaccagauccucgacggcgagaacugcacccucaucgacgcccuccucggcgacccccagugcgacggcuuccagaacaagaagugggaccucuucgucgagcgcuccaaggccuacuccaacugcuaccccuacgacguccccgacuacgccucccuccgcucccucgucgccuccuccggcacccucgaguucaacaacgaguccuucaacuggaccggcgucacccagaacggcaccuccuccgccugcauccgccgcuccuccuccuccuucuucucccgccucaacuggcucacccaccucaacuacaccuaccccgcccucaacgucaccaugcccaacaacgagcaguucgacaagcucuacaucuggggcguccaccaccccggcaccgacaaggaccagaucuuccucuacgcccaguccuccggccgcaucaccgucuccaccaagcgcucccagcaggccgucauccccaacaucggcucccgcccccgcauccgcgacauccccucccgcaucuccaucuacuggaccaucgucaagcccggcgacauccuccucaucaacuccaccggcaaccucaucgccccccgcggcuacuucaagauccgcuccggcaaguccuccaucaugcgcuccgacgcccccaucggcaagugcaaguccgagugcaucacccccaacggcuccauccccaacggcaagcccuuccagaacgucaaccgcaucaccuacggcgccugcccccgcuacgucaagcacuccacccucaagcucgccaccggcaugcgcaacguccccgagaagcagacccgcggcaucuucggcgccaucgccggcuucaucgagaacggcugggagggcauggucgacggcugguacggcuuccgccaccagaacuccgagggccgcggccaggccgccgaccucaaguccacccaggccgccaucgaccagaucaacggcaagcucaaccgccucaucggcaagaccaacgagaaguuccaccagaucgagaaggaguucuccgaggucgagggccgcauccaggaccucgagaaguacgucgaggacaccaagaucgaccucugguccuacaacgccgagcuccucgucgcccucgagaaccagcacaccaucgaccucaccgacuccgagaugaacaagcucuucgagaagaccaagaagcagcuccgcgagaacgccgaggacaugggcaacggcugcuucaagaucuaccacaagugcgacaacgccugcaucggcuccauccgcaacggcaccuacgaccacaacgucuaccgcgacgaggcccucaacaaccgcuuccagaucaagggcgucgagcucaaguccggcuacaaggacuggauccucuggaucuccuucgccaucuccugcuuccuccucugcgucgcccuccucggcuucaucaugugggccugccagaagggcaacauccgcugcaacaucugcaucuga

SEQ ID NO: 109209 - RNA, 1701 nt, Artificial Sequence; identical to SEQ ID NO: 108477
  derived and/or modified CDS sequence (opt2) from hemagglutinin__InfluenzaA__ALE31639

SEQ ID NO: 109210 - RNA, 1701 nt, Artificial Sequence; identical to SEQ ID NO: 109028
  derived and/or modified CDS sequence (opt2) from hemagglutinin__InfluenzaA__ALE31640

SEQ ID NO: 109211 - RNA, 1701 nt, Artificial Sequence; identical to SEQ ID NO: 109034
  derived and/or modified CDS sequence (opt2) from hemagglutinin__InfluenzaA__ALE31641

SEQ ID NO: 109212 - RNA, 1701 nt, Artificial Sequence; identical to SEQ ID NO: 109034
  derived and/or modified CDS sequence (opt2) from hemagglutinin__InfluenzaA__ALE31642

SEQ ID NO: 109213 - RNA, 1701 nt, Artificial Sequence
  derived and/or modified CDS sequence (opt2) from hemagglutinin__InfluenzaA__ALE31643
augaagaccaucaucgcccucuccuacauccucugccucgucuucgcccagaagcuccccgagaacgacaacuccaccgccacccucugccucggccaccacgccguccccaacggcaccaucgucaagaccaucaccuccgaccgcaucgaggucaccaacgccaccgagcucguccagaacuccuccaucggcgagaucugcgacuccccccaccagauccucgacggcaagaacugcacccucaucgacgcccuccucggcgacccccagugcgacggcuuccagaacaagaagugggaccucuucgucgagcgcuccaccgccuacuccaacugcuaccccuacgacguccccgacuacgccucccuccgcucccucgucgccuccuccggcacccucgaguucaacgacgaguccuucaacugggccggcgucacccagaacggcaccuccuccgccugcauccgcggcuccaacuccuccuucuucucccgccucaacuggcucacccacuccaacuucaaguaccccgcccucaacgucaccaugcccaacaacgagcaguucgacaagcucuacaucuggggcguccaccaccccggcaccgacaaggaccagaucuuccucuacgcccaguccuccggccgcaucaccgucuccaccaagcgcucccagcaggccgucauccccaacaucggcucccgcccccgcauccgcaacauccccucccgcaucuccaucuacuggaccaucgucaagcccggcgacauccuccucaucaacuccaccggcaaccucaucgccccccgcggcuacuucaagauccgcuccggcaaguccuccaucaugcgcuccgacgcccccaucggcaagugcaaguccgagugcaucacccccaacggcuccauccccaacgacaagcccuuccagaacgucaaccgcaucaccuacggcgccugcccccgcuacgucaagcaguccacccucaagcucgccaccggcaugcgcaacguccccgagaagcagacccgcggcaucuucggcgccaucgccggcuucaucgagaacggcugggagggcaugaaggacggcugguacggcuuccgccaccagaacuccgagggccgcggccaggccgccgaccucaaguccacccaggccgccaucgaccagaucaacggcaagcucaaccgccucaucggcaagaccaacgagaaguuccaccagaucgagaaggaguucuccgaggucgagggccgcauccaggaccucgagaaguacgucgaggacaccaagaucgaccucugguccuacaacgccgagcuccucgucgcccucgagaaccagcacaccaucgaccucaccgacuccgagaugaacaagcucuucgagaagaccaagaagcagcuccgcgagaacgccgaggacaugggcaacggcugcuucaagaucuaccacaagugcgacaacgccugcaucggcuccauccgcaacggcaccuacgaccacgacgucuaccgcgacgaggcccucaacaaccgcuuccagaucaagggcgucgagcucaaguccggcuacaaggacuggauccucuggaucuccuucgccaucuccugcuuccuccucugcgucgcccuccucggcuucaucaugugggccugccagaagggcaacauccgcugcaacaucugcaucuga

SEQ ID NO: 109214 - RNA, 1701 nt, Artificial Sequence; identical to SEQ ID NO: 108477
  derived and/or modified CDS sequence (opt2) from hemagglutinin__InfluenzaA__ALE31644

SEQ ID NO: 109215 - RNA, 1701 nt, Artificial Sequence; identical to SEQ ID NO: 108477
  derived and/or modified CDS sequence (opt2) from hemagglutinin__InfluenzaA__ALE31645

SEQ ID NO: 109216 - RNA, 1701 nt, Artificial Sequence; identical to SEQ ID NO: 108477
  derived and/or modified CDS sequence (opt2) from hemagglutinin__InfluenzaA__ALE31646

SEQ ID NO: 109217 - RNA, 1701 nt, Artificial Sequence; identical to SEQ ID NO: 109034
  derived and/or modified CDS sequence (opt2) from hemagglutinin__InfluenzaA__ALE31647

SEQ ID NO: 109218 - RNA, 1701 nt, Artificial Sequence
  derived and/or modified CDS sequence (opt2) from hemagglutinin__InfluenzaA__ALE31648
augaagaccaucaucgcccucuccuacauccucugccucgucuucgcccagaagauccccggcaacgacaacuccaccgccacccucugccucggccaccacgccguccccaacggcaccaucgucaagaccaucaccaacgaccgcaucgaggucaccaacgccaccgagcucguccagaacuccuccaucggcgagaucugcgacuccccccaccagauccucgacggcgagaacugcacccucaucgacgcccuccucggcgacccccagugcgacggcuuccagaacaagaagugggaccucuucgucgagcgcuccaaggccuacuccaacugcuaccccuacgacguccccgacuacgccucccuccgcucccucgucgccuccuccggcacccucgaguucaacaacgaguccuucaacuggaccggcgucacccagaacggcaccuccuccgccugcauccgccgcuccuccuccuccuucuucucccgccucaacuggcucacccaccucaacuacaccuaccccgcccucaacgucaccaugcccaacaacgagcaguucgacaagcucuacaucuggggcguccaccaccccggcaccgacaaggaccagaucuuccucuacgcccagcccuccggccgcaucaccgucuccaccaagcgcucccagcaggccgucauccccaacaucggcucccgcccccgcauccgcgacauccccucccgcaucuccaucuacuggaccaucgucaagcccggcgacauccuccucaucaacuccaccggcaaccucaucgccccccgcggcuacuucaagauccgcuccggcaaguccuccaucaugcgcuccgacgcccccaucggcaagugcaaguccgagugcaucacccccaacggcuccauccccaacgacaagcccuuccagaacgucaaccgcaucaccuacggcgccugcccccgcuacgucaagcacuccacccucaagcucgccaccggcaugcgcaacguccccgagaagcagacccgcggcaucuucggcgccaucgccggcuucaucgagaacggcugggagggcauggucgacggcugguacggcuuccgccaccagaacuccgagggccgcggccaggccgccgaccucaaguccacccaggccgccaccgaccagaucaacggcaagcucaaccgccucaucggcaagaccaacgagaaguuccaccagaucgagaaggaguucuccgaggucgagggccgcauccaggaccucgagaaguacgucgaggacaccaagaucgaccucugguccuacaacgccgagcuccucgucgcccucgagaaccagcacaccaucgaccucaccgacuccgagaugaacaagcucuucgagaagaccaagaagcagcuccgcgagaacgccgaggacaugggcaacggcugcuucaagaucuaccacaagugcgacaacgccugcaucggcuccauccgcaacggcaccuacgaccacaacgucuaccgcgacgaggcccucaacaaccgcuuccagaucaagggcgucgagcucaaguccggcuacaaggacuggauccucuggaucuccuucgccaucuccugcuuccuccucugcgucgcccuccucggcuucaucaugugggccugccagaagggcaacauccgcugcaacaucugcaucuga

SEQ ID NO: 109219 - RNA, 1701 nt, Artificial Sequence; identical to SEQ ID NO: 108477
  derived and/or modified CDS sequence (opt2) from hemagglutinin__InfluenzaA__ALE31649

SEQ ID NO: 109220 - RNA, 1701 nt, Artificial Sequence; identical to SEQ ID NO: 109034
  derived and/or modified CDS sequence (opt2) from hemagglutinin__InfluenzaA__ALE31650

SEQ ID NO: 109221 - RNA, 1701 nt, Artificial Sequence
  derived and/or modified CDS sequence (opt2) from hemagglutinin__InfluenzaA__ALE31652
augaagaccaucaucgcccucuccuacauccucugccucgucuucgcccagaagauccccggcaacgacaacuccaccgccacccucugccucggccaccacgccguccccaacggcaccaucgucaagaccaucaccaacgaccgcaucgaggucaccaacgccaccgagcucguccagaacuccuccaucggcgagaucugcgacuccccccaccagauccucgacggcgagaacugcacccucaucgacgcccuccucggcgacccccagugcgacggcuuccagaacaagaagugggaccucuucgucgagcgcuccaaggccuacuccaacugcuaccccuacgacguccccgacuacgccucccuccgcucccucgucgccuccuccggcacccucgaguucaacaacgaguccuucaacuggaccggcgucacccagaacggcaccuccuccgccugcauccgccgcuccuccuccuccuucuucucccgccucaacuggcucacccaccucaacuacaaguaccccgcccucaacgucaccaugcccaacaacgagcaguucgacaagcucuacaucuggggcguccaccaccccggcaccgacaaggaccagaucucccucuacgcccaguccuccggccgcaucaccgucuccaccaagcgcucccagcaggccgucauccccaacaucggcucccgcccccgcauccgcgacauccccucccgcaucuccaucuacuggaccaucgucaagcccggcgacauccuccucaucaacuccaccggcaaccucaucgccccccgcggcuacuucaagauccgcuccggcaaguccuccaucaugcgcuccgacgcccccaucggcaagugcaaguccgagugcaucacccccaacggcuccauccccaacgacaagcccuuccagaacgucaaccgcaucaccuacggcgccugcccccgcuacgucaagcacuccacccucaagcucgccaccggcaugcgcaacguccccgagaagcagacccgcggcaucuucggcgccaucgccggcuucaucgagaacggcugggagggcauggucgacggcugguacggcuuccgccaccagaacuccgagggccgcggccaggccgccgaccucaaguccacccaggccgccaucgaccagaucaacggcaagcucaaccgccucaucggcaagaccaacgagaaguuccaccagaucgagaaggaguucuccgaggucgagggccgcauccaggaccucgagaaguacgucgaggacaccaagaucgaccucugguccuacaacgccgagcuccucgucgcccucgagaaccagcacaccaucgaccucaccgacuccgagaugaacaagcucuucgagaagaccaagaagcagcuccgcgagaacgccgaggacaugggcaacggcugcuucaagaucuaccacaagugcgacaacgccugcaucggcuccauccgcaacggcaccuacgaccacaacgucuaccgcgacgaggcccucaacaaccgcuuccagaucaagggcgucgagcucaaguccggcuacaaggacuggauccucuggaucuccuucgccaucuccugcuuccuccucugcgucgcccuccucggcuucaucaugugggccugccagaagggcaacauccgcugcaacaucugcaucuga

SEQ ID NO: 109222 - RNA, 1701 nt, Artificial Sequence; identical to SEQ ID NO: 109128
  derived and/or modified CDS sequence (opt2) from hemagglutinin__InfluenzaA__ALE31653

SEQ ID NO: 109223 - RNA, 1701 nt, Artificial Sequence; identical to SEQ ID NO: 108477
  derived and/or modified CDS sequence (opt2) from hemagglutinin__InfluenzaA__ALE31654

SEQ ID NO: 109224 - RNA, 1701 nt, Artificial Sequence; identical to SEQ ID NO: 108477
  derived and/or modified CDS sequence (opt2) from hemagglutinin__InfluenzaA__ALE31655

SEQ ID NO: 109225 - RNA, 1701 nt, Artificial Sequence
  derived and/or modified CDS sequence (opt2) from hemagglutinin__InfluenzaA__ALE31656
augaagaccaucaucgcccucuccuacauccucugccucgucuucgcccagaagauccccggcaacgacaacuccaccgccacccucugccucggccaccacgccguccccaacggcaccaucgucaagaccaucaccaacgaccgcaucgaggucaccaacgccaccgagcucguccagaacuccuccaucggcgagaucugcgacuccccccaccagauccucgacggcgagaacugcacccucaucgacgcccuccucggcgacccccagugcgacggcuuccagaacaagaagugggacaucuucgucgagcgcuccaaggccuacuccaacugcuaccccuacgacguccccgacuacgccucccuccgcucccucgucgccuccuccggcacccucgaguucaacaacgaguccuucaacuggaccggcgucacccagaacggcaccuccuccgccugcauccgccgcuccuccuccuccuucuucucccgccucaacuggcucacccaccucaacuacaccuaccccgcccucaacgucaccaugcccaacaacgagcaguucgacaagcucuacaucuggggcguccaccaccccggcaccgacaaggaccagaucuuccucuacgcccaguccuccggccgcaucaccgucuccaccaagcgcucccagcaggccgucauccccaacaucggcucccgcccccgcauccgcgacauccccucccgcaucuccaucuacuggaccaucgucaagcccggcgacauccuccucaucaacuccaccggcaaccucaucgccccccgcggcuacuucaagauccgcuccggcaaguccuccaucaugcgcuccgacgcccccaucggcaagugcaaguccgagugcaucacccccaacggcuccauccccaacgacaagcccuuccagaacgucaaccgcaucaccuacggcgccugcccccgcuacgucaagcacuccacccucaagcucgccaccggcaugcgcaacguccccgagaagcagacccgcggcaucuucggcgccaucgccggcuucaucgagaacggcugggagggcaugauggacggcugguacggcuuccgccaccagaacuccgagggccgcggccaggccgccgaccucaaguccacccaggccgccaucgaccagaucaacggcaagcucaaccgccucaucggcaagaccaacgagaaguuccaccagaucgagaaggaguucuccgaggucgagggccgcauccaggaccucgagaaguacgucgaggacaccaagaucgaccucugguccuacaacgccgagcuccucgucgcccucgagaaccagcacaccaucgaccucaccgacuccgagaugaacaagcucuucgagaagaccaagaagcagcuccgcgagaacgccgaggacaugggcaacggcugcuucaagaucuaccacaagugcgacaacgccugcaucggcuccauccgcaacggcaccuacgaccacaacgucuaccgcgacgaggcccucaacaaccgcuuccagaucaagggcgucgagcucaaguccggcuacaaggacuggauccucuggaucuccuucgccaucuccugcuuccuccucugcgucgcccuccucggcuucaucaugugggccugccagaagggcaacauccgcugcaacaucugcaucuga

SEQ ID NO: 109226 - RNA, 1701 nt, Artificial Sequence
  derived and/or modified CDS sequence (opt2) from hemagglutinin__InfluenzaA__ALE31657
augaagaccaucaucgcccucuccuacauccucugccucgucuccgcccagaagauccccggcaacgacaacuccaccgccacccucugccucggccaccacgccguccccaacggcaccaucgucaagaccaucaccaacgaccgcaucgaggucaccaacgccaccgagcucguccagaacuccuccaucggcgagaucugcgacuccccccaccagauccucgacggcgagaacugcacccucaucgacgcccuccucggcgacccccagugcgacggcuuccagaacaagaagugggaccucuucgucgagcgcuccaaggccuacuccaacugcuaccccuacgacguccccgacuacgccucccuccgcucccucgucgccuccuccggcacccucgaguucaacaacgaguccuucaacuggaccggcgucacccagaacggcaccuccuccgccugcauccgccgcuccuccuccuccuucuucucccgccucaacuggcucacccaccucaacuacaccuaccccgcccucaacgucaccaugcccaacaacgagcaguucgacaagcucuacaucuggggcguccaccaccccggcaccgacaaggaccagaucuuccucuacgcccaguccuccggccgcaucaccgucuccaccaagcgcucccagcaggccgucauccccaacaucggcucccgcccccgcauccgcgacauccccucccgcaucuccaucuacuggaccaucgucaagcccggcgacauccuccucaucaacuccaccggcaaccucaucgccccccgcggcuacuucaagauccgcuccggcaaguccuccaucaugcgcuccgacgcccccaucggcaagugcaaguccgagugcaucacccccaacggcuccauccccaacgacaagcccuuccagaacgucaaccgcaucaccuacggcgccugcccccgcuacgucaagcacuccacccucaagcucgccaccggcaugcgcaacguccccgagaagcagacccgcggcaucuucggcgccaucgccggcuucaucgagaacggcugggagggcauggucgacggcugguacggcuuccgccaccagaacuccgagggccgcggccaggccgccgaccucaaguccacccaggccgccaucgaccagaucaacggcaagcucaaccgccucaucggcaagaccaacgagaaguuccaccagaucgagaaggaguucuccgaggucgagggccgcauccaggaccucgagaaguacgucgaggacaccaagaucgaccucugguccuacaacgccgagcuccucgucgcccucgagaaccagcacaccaucgaccucaccgacuccgagaugaacaagcucuucgagaagaccaagaagcagcuccgcgagaacgccgaggacaugggcaacggcugcuucaagaucuaccacaagugcgacaacgccugcaucggcuccauccgcaacggcaccuacgaccacaacgucuaccgcgacgaggcccucaacaaccgcuuccagaucaagggcgucgagcucaaguccggcuacaaggacuggauccucuggaucuccuucgccaucuccugcuuccuccucugcgucgcccuccucggcuucaucaugugggccugccagaagggcaacauccgcugcaacaucugcaucuga

SEQ ID NO: 109227 - RNA, 1701 nt, Artificial Sequence; identical to SEQ ID NO: 108477
  derived and/or modified CDS sequence (opt2) from hemagglutinin__InfluenzaA__ALE31658

SEQ ID NO: 109228 - RNA, 1701 nt, Artificial Sequence; identical to SEQ ID NO: 109092
  derived and/or modified CDS sequence (opt2) from hemagglutinin__InfluenzaA__ALE31659

SEQ ID NO: 109229 - RNA, 1701 nt, Artificial Sequence; identical to SEQ ID NO: 109021
  derived and/or modified CDS sequence (opt2) from hemagglutinin__InfluenzaA__ALE31660

SEQ ID NO: 109230 - RNA, 1701 nt, Artificial Sequence
  derived and/or modified CDS sequence (opt2) from hemagglutinin__InfluenzaA__ALE31661
augaagaccaucaucgcccucuccuacauccucugccucgucuucgcccagaagauccccggcaacgacaacuccaccgccacccucugccucggccaccacgccguccccaacggcaccaucgucaagaccaucaccaacgaccgcaucgaggucaccaacgccaccgagcucguccagaacuccuccaucggcgagaucugcgacuccccccaccagauccucgacggcgagaacugcacccucaucgacgcccuccucggcgacccccagugcgacggcuuccagaacaagaagugggaccucuucgucgagcgcuccaaggccuacuccaacugcuaccccuacgacguccccgacuacgccucccuccgcucccucgucgccuccuccggcacccucgaguucaacaacgaguccuucaacuggaccggcgucacccagaacggcaccuccuccgccugcauccgccgcuccuccuccuccuucuucucccgccucaacuggcucacccaccucaacuacaccuaccccgcccucaacgucaccaugcccaacaacgagcaguucgacaagcucuacaucuggggcguccaccaccccggcaccgacaaggaccagaucuuccucuacgcccaguccuccggccgcaucaccgucuccaccaagaagucccagcaggccgucauccccaacaucggcucccgcccccgcauccgcgacauccccucccgcaucuccaucuacuggaccaucgucaagcccggcgacauccuccucaucaacuccaccggcaaccucaucgccccccgcggcuacuucaagauccgcuccggcaaguccuccaucaugcgcuccgacgcccccaucggcaagugcaaguccgagugcaucacccccaacggcuccauccccaacgacaagcccuuccagaacgucaaccgcaucaccuacggcgccugcccccgcuacgucaagcacuccacccucaagcucgccaccggcaugcgcaacguccccgagaagcagacccgcggcaucuucggcgccaucgccggcuucaucgagaacggcugggagggcauggucgacggcugguacggcuuccgccaccagaacuccgagggccgcggccaggccgccgaccucaaguccacccaggccgccaucgaccagaucaacggcaagcucaaccgccucaucggcaagaccaacgagaaguuccaccagaucgagaaggaguucuccgaggucgagggccgcauccaggaccucgagaaguacgucgaggacaccaagaucgaccucugguccuacaacgccgagcuccucgucgcccucgagaaccagcacaccaucgaccucaccgacuccgagaugaacaagcucuucgagaagaccaagaagcagcuccgcgagaacgccgaggacaugggcaacggcugcuucaagaucuaccacaagugcgacaacgccugcaucggcuccauccgcaacggcaccuacgaccacaacgucuaccgcgacgaggcccucaacaaccgcuuccagaucaagggcgucgagcucaaguccggcuacaaggacuggauccucuggaucuccuucgccaucuccugcuuccuccucugcgucgcccuccucggcuucaucaugugggccugccagaagggcaacauccgcugcaacaucugcaucuga

SEQ ID NO: 109231 - RNA, 1701 nt, Artificial Sequence
  derived and/or modified CDS sequence (opt2) from hemagglutinin__InfluenzaA__ALE31662
augaagaccaucaucgcccucuccuacauccucugccucgucuucgcccagaagauccccggcaacgacaacuccaccgccacccucugccucggccaccacgccguccccaacggcaccaucgucaagaccaucgccaacgaccgcaucgaggucaccaacgccaccgagcucguccagaacuccuccaucggcgagaucugcgacuccccccaccagauccucgacggcgagaacugcacccucaucgacgcccuccucggcgacccccagugcgacggcuuccagaacaagaagugggaccucuucgucgagcgcuccaaggccuacuccaacugcuaccccuacgacguccccgacuacgccucccuccgcucccucgucgccuccuccggcacccucgaguucaacaacgaguccuucaacuggaccggcgucacccagaacggcaccuccuccgccugcauccgccgcuccuccuccuccuucuucucccgccucaacuggcucacccaccucaacuacaccuaccccgcccucaacgucaccaugcccaacaacgagcaguucgacaagcucuacaucuggggcguccaccaccccggcaccgacaaggaccagaucuuccucuacgcccaguccuccggccgcaucaccgucuccaccaagggcucccagcaggccgucauccccaacaucggcucccgcccccgcauccgcgacauccccucccgcaucuccaucuacuggaccaucgucaagcccggcgacauccuccucaucaacuccaccggcaaccucaucgccccccgcggcuacuucaagauccgcuccggcaaguccuccaucaugcgcuccgacgcccccaucggcaagugcaaguccgagugcaucacccccaacggcuccauccccaacgacaagcccuuccagaacgucaaccgcaucaccuacggcgccugcccccgcuacgucaagcacuccacccucaagcucgccaccggcaugcgcaacguccccgagaagcagacccgcggcaucuucggcgccaucgccggcuucaucgagaacggcugggagggcauggucgacggcugguacggcuuccgccaccagaacuccgagggccgcggccaggccgccgaccucaaguccacccaggccgccaucgaccagaucaacggcaagcucaaccgccucaucggcaagaccaacgagaaguuccaccagaucgagaaggaguucuccgaggucgagggccgcauccaggaccucgagaaguacgucgaggacaccaagaucgaccucugguccuacaacgccgagcuccucgucgcccucgagaaccagcacaccaucgaccucaccgacuccgagaugaacaagcucuucgagaagaccaagaagcagcuccgcgagaacgccgaggacaugggcaacggcugcuucaagaucuaccacaagugcgacaacgccugcaucggcuccauccgcaacggcaccuacgaccacaacgucuaccgcgacgaggcccucaacaaccgcuuccagaucaagggcgucgagcucaaguccggcuacaaggacuggauccucuggaucuccuucgccaucuccugccuccuccucugcgucgcccuccucggcuucaucaugugggccugccagaagggcaacauccgcugcaacaucugcaucuga

SEQ ID NO: 109232 - RNA, 1701 nt, Artificial Sequence; identical to SEQ ID NO: 108463
  derived and/or modified CDS sequence (opt2) from hemagglutinin__InfluenzaA__ALE31663

SEQ ID NO: 109233 - RNA, 1701 nt, Artificial Sequence
  derived and/or modified CDS sequence (opt2) from hemagglutinin__InfluenzaA__ALE31666
augaagaccaucaucgcccucuccuacauccucugccucgucuucgcccagaagauccccggcaacgacaacuccaccgccacccucugccucggccaccacgccguccccaacggcaccaucgucaagaccaucaccaacgaccgcaucgaggucaccaacgccaccgagcucguccagaacuccuccaucggcgagaucugcgacuccccccaccagauccucgacggcgagaacugcacccucaucgacgcccuccucggcgacccccagugcgacggcuuccagaacaagaagugggaccucuucgucgagcgcuccaaggccuacuccaacugcuaccccuacgacguccccgacuacgccucccuccgcucccucgucgccuccuccggcacccucgaguucaacaacgaguccuucaacuggaccggcgucacccagaacggcaccuccuccgccugcauccgcaaguccuccuccuccuucuucucccgccucaacuggcucacccaccucaaguacaccuaccccgcccucaacgucaccaugcccaacaacgagcaguucgacaagcucuacaucuggggcguccaccaccccggcaccgacaaggaccagaucuuccucuacgcccgcuccuccggccgcaucaccgucuccaccaagcgcucccagcaggccgucauccccaacaucggcucccgcccccgcauccgcgacauccccucccgcaucuccaucuacuggaccaucgucaagcccggcgacauccuccucaucaacuccaccggcaaccucaucgccccccgcggcuacuucaagauccgcuccggcaaguccuccaucaugcgcuccgacgcccccaucggcaagugcaaguccgagugcaucacccccaacggcuccauccccaacgacaagcccuuccagaacgucaaccgcaucaccuacggcgccugcccccgcuacgucaagcacuccacccucaagcucgccaccggcaugcgcaacguccccgagaagcagacccgcggcaucuucggcgccaucgccggcuucaucgagaacggcugggagggcauggucgacggcugguacggcuuccgccaccagaacuccgagggccgcggccaggccgccgaccucaaguccacccaggccgccaucgaccagaucaacggcaagcucaaccgccucaucggcaagaccaacgagaaguuccaccagaucgagaaggaguucuccgaggucgagggccgcauccaggaccucgagaaguacgucgaggacaccaagaucgaccucugguccuacaacgccgagcuccucgucgcccucgagaaccagcacaccaucgaccucaccgacuccgagaugaacaagcucuucgagaagaccaagaagcagcuccgcgagaacgccgaggacaugggcaacggcugcuucaagaucuaccacaagugcgacaacgccugcaucggcuccauccgcaacggcaccuacgaccacaacgucuaccgcgacgaggcccucaacaaccgcuuccagaucaagggcgucgagcucaaguccggcuacaaggacuggauccucuggaucuccuucgccaucuccugcuuccuccucugcgucgcccuccucggcuucaucaugugggccugccagaagggcaacauccgcugcaacaucugcaucuga

SEQ ID NO: 109234 - RNA, 1701 nt, Artificial Sequence
  derived and/or modified CDS sequence (opt2) from hemagglutinin__InfluenzaA__ALE31667
augaagaccaucaucgcccucuccuacauccucugccucgucuucgcccagaagauccccggcaacgacaacuccaccgccacccucugccucggccaccacgccguccucaacggcaccaucgucaagaccaucaccaacgaccgcaucgaggucaccaacgccaccgagcucguccagaacuccuccaucggcgagaucugcgacuccccccaccagauccucgacggcgagaacugcacccucaucgacgcccuccucggcgacccccagugcgacggcuuccagaacaagaagugggaccucuucgucgagcgcuccaaggccuacuccaacugcuaccccuacgacguccccgacuacgccucccuccgcucccucgucgccuccuccggcacccucgaguucaacaacgaguccuucaacuggaccggcgucacccagaacggcaccuccuccgccugcauccgcaaguccuccuccuccuucuucucccgccucaacuggcucacccaccucaacuacaccuaccccgcccucaacgucaccaugcccaacaacgagcaguucgacaagcucuacaucuggggcguccaccaccccggcaccgacaaggaccagaucuuccucuacgcccgcuccuccggccgcaucaccgucuccaccaagcgcucccagcaggccgucauccccaacaucggcucccgcccccgcauccgcgacauccccucccgcaucuccaucuacuggaccaucgucaagcccggcgacauccuccucaucaacuccaccggcaaccucaucgccccccgcggcuacuucaagauccgcuccggcaaguccuccaucaugcgcuccgacgcccccaucggcaagugcaaguccgagugcaucacccccaacggcuccauccccaacgacaagcccuuccagaacgucaaccgcaucaccuacggcgccugcccccgcuacgucaagcacuccacccucaagcucgccaccggcaugcgcaacguccccgagaagcagacccgcggcaucuucggcgccaucgccggcuucaucgagaacggcugggagggcauggucgacggcugguacggcuuccgccaccagaacuccgagggccgcggccaggccgccgaccucaaguccacccaggccgccaucgaccagaucaacggcaagcucaaccgccucaucggcaagaccaacgagaaguuccaccagaucgagaaggaguucuccgaggucgagggccgcauccaggaccucgagaaguacgucgaggacaccaagaucgaccucugguccuacaacgccgagcuccucgucgcccucgagaaccagcacaccaucgaccucaccgacuccgagaugaacaagcucuucgagaagaccaagaagcagcuccgcgagaacgccgaggacaugggcaacggcugcuucaagaucuaccacaagugcgacaacgccugcaucggcuccauccgcaacggcaccuacgaccacaacgucuaccgcgacgaggcccucaacaaccgcuuccagaucaagggcgucgagcucaaguccggcuacaaggacuggauccucuggaucuccuucgccaucuccugcuuccuccucugcgucgcccuccucggcuucaucaugugggccugccagaagggcaacauccgcugcaacaucugcaucuga

SEQ ID NO: 109235 - RNA, 1701 nt, Artificial Sequence; identical to SEQ ID NO: 108477
  derived and/or modified CDS sequence (opt2) from hemagglutinin__InfluenzaA__ALE31668

SEQ ID NO: 109236 - RNA, 1701 nt, Artificial Sequence; identical to SEQ ID NO: 108477
  derived and/or modified CDS sequence (opt2) from hemagglutinin__InfluenzaA__ALE31669

SEQ ID NO: 109237 - RNA, 1701 nt, Artificial Sequence
  derived and/or modified CDS sequence (opt2) from hemagglutinin__InfluenzaA__ALE31670
augaagaccaucaucgcccucuccuacauccucugccucgucuucgcccagaagcuccccgagaacgacaacuccaccgccacccucugccucggccaccacgccguccccaacggcaccaucgucaagaccaucaccuccgaccgcaucgaggucaccaacgccaccgagcucguccagaacuccuccaucggcgagaucugcgacuccccccaccagauccucgacggcaagaacugcacccucaucgacgcccuccucggcgacccccagugcgacggcuuccagaacaagaagugggaccucuucgucgagcgcuccaaggccuacuccaacugcuaccccuacgacguccccgacuacgccucccuccgcucccucgucgccuccuccggcacccucgaguucaacgacgaguccuucaacugggccggcgucacccagaacggcaccuccuccgccugcauccgcggcuccaacuccuccuucuucucccgccucaacuggcucacccacuccaacuucaaguaccccgcccucaacgucaccaugcccaacaacgagcaguucgacaagcucuacaucuggggcguccaccaccccggcaccgacaaggaccagaucuuccucuacgcccaguccuccggccgcaucaccgucuccaccaagcgcucccagcaggccgucauccccaacaucggcucccgcccccgcauccgcaacauccccucccgcaucuccaucuacuggaccaucgucaagcccggcgacauccuccucaucaacuccaccggcaaccucaucgccccccgcggcuacuucaagauccgcuccggcaaguccuccaucaugcgcuccgacgcccccaucggcaagugcaaguccgagugcaucacccccaacggcuccauccccaacgacaagcccuuccagaacgucaaccgcaucaccuacggcgccugcccccgcuacgucaagcaguccacccucaagcucgccaccggcaugcgcaacguccccgagaagcagacccgcggcaucuucggcgccaucgccggcuucaucgagaacggcugggagggcaugaaggacggcugguacggcuuccgccaccagaacuccgagggccgcggccaggccgccgaccucaaguccacccaggccgccaucgaccagaucaacggcaagcucaaccgccucaucggcaagaccaacgagaaguuccaccagaucgagaaggaguucuccgaggucgagggccgcauccaggaccucgagaaguacgucgaggacaccaagaucgaccucugguccuacaacgccgagcuccucgucgcccucgagaaccagcacaccaucgaccucaccgacuccgagaugaacaagcucuucgagaagaccaagaagcagaugcgcgagaacgccgaggacaugggcaacggcugcuucaagaucuaccacaagugcgacaacgccugcaucggcuccauccgcaacggcaccuacgaccacgacgucuaccgcgacgaggcccucaacaaccgcuuccagaucaagggcgucgagcucaaguccggcuacaaggacuggauccucuggaucuccuucgccaucuccugcuuccuccucugcgucgcccuccucggcuucaucaugugggccugccagaagggcaacauccgcugcaacaucugcaucuga

SEQ ID NO: 109238 - RNA, 1701 nt, Artificial Sequence; identical to SEQ ID NO: 108477
  derived and/or modified CDS sequence (opt2) from hemagglutinin__InfluenzaA__ALE31671

SEQ ID NO: 109239 - RNA, 1701 nt, Artificial Sequence; identical to SEQ ID NO: 108477
  derived and/or modified CDS sequence (opt2) from hemagglutinin__InfluenzaA__ALE31672

SEQ ID NO: 109240 - RNA, 1701 nt, Artificial Sequence; identical to SEQ ID NO: 109034
  derived and/or modified CDS sequence (opt2) from hemagglutinin__InfluenzaA__ALE31673

SEQ ID NO: 109241 - RNA, 1701 nt, Artificial Sequence
  derived and/or modified CDS sequence (opt2) from hemagglutinin__InfluenzaA__ALE31674
augaagaccaucaucgcccucuccuacauccucugccucgucuucgcccagaagauccccggcaacgacaacuccaccgccacccucugccucggccaccacgccguccccaacggcaccaucgucaagaccaucaccaacgaccgcaucgaggucaccaacgccaccgagcucguccagaacuccuccaucggcgagaucugcgacuccccccaccagauccucgacggcgagaacugcacccucaucgacgcccuccucggcgacccccagugcgacggcuuccagaacaagaagugggaccucuucgucgagcgcuccaaggccuacuccaacugcuaccccuacgacguccccgacuacgccucccuccgcucccucgucgccuccuccggcacccucgaguucaacaacgaguccuucaacuggaccggcgucacccagaacggcaccuccuccgccugcauccgccgcuccuccuccuccuucuucucccgccucaacuggcucacccaccucaacuacaccuaccccgcccucaacgucaccaugcccaacaacgagcaguucgacaagcucuacaucuggggcguccaccaccccggcaccgacaaggaccagaucuuccucuacgcccacuccuccggccgcaucaccgucuccaccaagcgcucccagcaggccgucauccccaacaucggcucccgcccccgcauccgcgacauccccucccgcaucuccaucuacuggaccaucgucaagcccggcgacauccuccucaucaacuccaccggcaaccucaucgccccccgcggcuacuucaagauccgcuccggcaaguccuccaucaugcgcuccgacgcccccaucggcaagugcaaguccgagugcaucacccccaacggcuccauccccaacgacaagcccuuccagaacgucaaccgcaucaccuacggcgccugcccccgcuacgucaagcacuccacccucaagcucgccaccggcaugcgcaacguccccgagaagcagacccgcggcaucuucggcgccaucgccggcuucaucgagaacggcugggagggcauggucgacggcugguacggcuuccgccaccagaacuccgagggccgcggccaggccgccgaccucaaguccacccaggccgccaucgaccagaucaacggcaagcucaaccgccucaucggcaagaccaacgagaaguuccaccagaucgagaaggaguucuccgaggucgagggccgcauccaggaccucgagaaguacgucgaggacaccaagaucgaccucugguccuacaacgccgagcuccucgucgcccucgagaaccagcacaccaucgaccucaccgacuccgagaugaacaagcucuucgagaagaccaagaagcagcuccgcgagaacgccgaggacaugggcaacggcugcuucaagaucuaccacaagugcgacaacgccugcaucggcuccauccgcaacggcaccuacgaccacaacgucuaccgcgacgaggcccucaacaaccgcuuccagaucaagggcgucgagcucaaguccggcuacaaggacuggauccucuggaucuccuucgccaucuccugcuuccuccucugcgucgcccuccucggcuucaucaugugggccugccagaagggcaacauccgcugcaacaucugcaucuga

SEQ ID NO: 109242 - RNA, 1701 nt, Artificial Sequence
  derived and/or modified CDS sequence (opt2) from hemagglutinin__InfluenzaA__ALE31675
augaagaccaucaucgcccucuccuacauccucugccucgucuucgcccagaagauccccggcaacgacaacuccaccgccacccucugccucggccaccacgccguccccaacggcaccaucgucaagaccaucaccaacgaccgcaucgaggucaccaacgccaccgagcucguccagaacuccuccaucggcgagaucugcaacuccccccaccagauccucgacggcgagaacugcacccucaucgacgcccuccucggcgacccccagugcgacggcuuccagaacaagaagugggaccucuucgucgagcgcuccaaggccuacuccaacugcuaccccuacgacguccccgacuacgccucccuccgcucccucgucgccuccuccggcacccucgaguucaacaacgaguccuucaacuggaccggcgucacccagaacggcaccuccuccgccugcauccgccgcuccuccuccuccuucuucucccgccucaacuggcucacccaccucaacuacaccuaccccgcccucaacgucaccaugcccaacaacgagcaguucgacaagcucuacaucuggggcguccaccaccccggcaccgacaaggaccagaucuuccucuacgcccaguccuccggccgcaucaccgucuccaccaagggcucccagcaggccgucauccccaacaucggcucccgcccccgcauccgcgacauccccucccgcaucuccaucuacuggaccaucgucaagcccggcgacauccuccucaucaacuccaccggcaaccucaucgccccccgcggcuacuucaagauccgcuccggcaaguccuccaucaugcgcuccgacgcccccaucggcaagugcaaguccgagugcaucacccccaacggcuccauccccaacgacaagcccuuccagaacgucaaccgcaucaccuacggcgccugcccccgcuacgucaagcacuccacccucaagcucgccaccggcaugcgcaacguccccgagaagcagacccgcggcaucuucggcgccaucgccggcuucaucgagaacggcugggagggcauggucgacggcugguacggcuuccgccaccagaacuccgagggccgcggccaggccgccgaccucaaguccacccaggccgccaucgaccagaucaacggcaagcucaaccgccucaucggcaagaccaacgagaaguuccaccagaucgagaaggaguucuccgaggucgagggccgcauccaggaccucgagaaguacgucgaggacaccaagaucgaccucugguccuacaacgccgagcuccucgucgcccucgagaaccagcacaccaucgaccucaccgacuccgagaugaacaagcucuucgagaagaccaagaagcagcuccgcgagaacgccgaggacaugggcaacggcugcuucaagaucuaccacaagugcgacaacgccugcaucggcuccauccgcaacggcaccuacgaccacaacgucuaccgcgacgaggcccucaacaaccgcuuccagaucaagggcgucgagcucaaguccggcuacaaggacuggauccucuggaucuccuucgccaucuccugcuuccuccucugcgucgcccuccucggcuucaucaugugggccugccagaagggcaacauccgcugcaacaucugcaucuga

SEQ ID NO: 109243 - RNA, 1701 nt, Artificial Sequence
  derived and/or modified CDS sequence (opt2) from hemagglutinin__InfluenzaA__ALE31676
augaagaccaucaucgcccucuccuacauccucugccucgucuucgcccagaagauccccggcaacgacaacuccaccgccacccucugccucggccaccacgccguccccaacggcaccaucgucaagaccaucaccaacgaccgcaucgaggucaccaacgccaccgagcucguccagaacuccuccaucggcgagaucugcgacuccccccaccagauccucgacggcgagaacugcacccucaucgacgcccuccucggcgacccccagugcgacggcuuccagaacaagaagugggaccucuucgucgagcgcuccaaggccuacuccaacugcuaccccuacgacguccccgacuacgccucccuccgcucccucgucgccuccuccggcacccucgaguucaacaacgaguccuucaacuggaccggcgucacccagaacggcaccuccuccgccugcauccgccgcuccuccuccuccuucuucucccgccucaacuggcucacccaccucaacuacaccuaccccgcccucaacgucaccaugcccaacaacgagcaguucgacaagcucuacaucuggggcguccaccaccccggcaccgacaaggaccagaucuuccucuacgcccaguccuccggccgcaucaccgucuccaccaagcgcucccagcaggccgucauccccaacaucggcucccgccccaagauccgcgacauccccucccgcaucuccaucuacuggaccaucgucaagcccggcgacauccuccucaucaacuccaccggcaaccucaucgccccccgcggcuacuucaagauccucuccggcaaguccuccaucaugcgcuccgacgcccccaucggcaagugcaaguccgagugcaucacccccaacggcuccauccccaacgacaagcccuuccagaacgucaaccgcaucaccuacggcgccugcccccgcuacgucaagcacuccacccucaagcucgccaccggcaugcgcaacguccccgagaagcagacccgcggcaucuucggcgccaucgccggcuucaucgagaacggcugggagggcauggucgacggcugguacggcuuccgccaccagaacuccgagggccgcggccaggccgccgaccucaaguccacccaggccgccaucgaccagaucaacggcaagcucaaccgccucaucggcaagaccaacgagaaguuccaccagaucgagaaggaguucuccgaggucgagggccgcauccaggaccucgagaaguacgucgaggacuccaagaucgaccucugguccuacaacgccgagcuccucgucgcccucgagaaccagcacaccaucgaccucaccgacuccgagaugaacaagcucuucgagaagaccaagaagcagcuccgcgagaacgccgaggacaugggcaacggcugcuucaagaucuaccacaagugcgacaacgccugcaucggcuccauccgcaacggcaccuacgaccacaacgucuaccgcgacgaggcccucaacaaccgcuuccagaucaagggcgucgagcucaaguccggcuacaaggacuggauccucuggaucuccuucgccaucuccugcuuccuccucugcgucgcccuccucggcuucaucaugugggccugccagaagggcaacauccgcugcaacaucugcaucuga

SEQ ID NO: 109244 - RNA, 1701 nt, Artificial Sequence; identical to SEQ ID NO: 109135
  derived and/or modified CDS sequence (opt2) from hemagglutinin__InfluenzaA__ALE31677

SEQ ID NO: 109245 - RNA, 1701 nt, Artificial Sequence; identical to SEQ ID NO: 108477
  derived and/or modified CDS sequence (opt2) from hemagglutinin__InfluenzaA__ALE31678

SEQ ID NO: 109246 - RNA, 1701 nt, Artificial Sequence; identical to SEQ ID NO: 108477
  derived and/or modified CDS sequence (opt2) from hemagglutinin__InfluenzaA__ALE31679

SEQ ID NO: 109247 - RNA, 1701 nt, Artificial Sequence; identical to SEQ ID NO: 109093
  derived and/or modified CDS sequence (opt2) from hemagglutinin__InfluenzaA__ALE31680

SEQ ID NO: 109248 - RNA, 1701 nt, Artificial Sequence; identical to SEQ ID NO: 109092
  derived and/or modified CDS sequence (opt2) from hemagglutinin__InfluenzaA__ALE31681

SEQ ID NO: 109249 - RNA, 1701 nt, Artificial Sequence; identical to SEQ ID NO: 108477
  derived and/or modified CDS sequence (opt2) from hemagglutinin__InfluenzaA__ALE31682

SEQ ID NO: 109250 - RNA, 1701 nt, Artificial Sequence; identical to SEQ ID NO: 108477
  derived and/or modified CDS sequence (opt2) from hemagglutinin__InfluenzaA__ALE31683

SEQ ID NO: 109251 - RNA, 1701 nt, Artificial Sequence; identical to SEQ ID NO: 108477
  derived and/or modified CDS sequence (opt2) from hemagglutinin__InfluenzaA__ALE31684

SEQ ID NO: 109252 - RNA, 1701 nt, Artificial Sequence; identical to SEQ ID NO: 108477
  derived and/or modified CDS sequence (opt2) from hemagglutinin__InfluenzaA__ALE31685

SEQ ID NO: 109253 - RNA, 1701 nt, Artificial Sequence; identical to SEQ ID NO: 108477
  derived and/or modified CDS sequence (opt2) from hemagglutinin__InfluenzaA__ALE31686

SEQ ID NO: 109254 - RNA, 1701 nt, Artificial Sequence
  derived and/or modified CDS sequence (opt2) from hemagglutinin__InfluenzaA__ALE31687
augaagaccaucaucgcccucuccuacauccucugccucgucuucgcccagaagauccccggcaacgacaacuccaccgccacccucugccucggccaccacgccguccccaacggcaccaucgucaagaccaucaccaacgaccgcaucgaggucaccaacgccaccgagcucguccagaacuccuccaucggcgagaucugcgacuccccccaccagauccucgacggcgagaacugcacccucaucgacgcccuccucggcgacccccagugcgacggcuuccagaacaagaagugggaccucuucgucgagcgcuccaaggccuacuccaacugcuaccccuacgacguccccgacuacgccucccuccgcucccucgucgccuccuccggcacccucgaguucaacaacgaguccuucaacuggaccggcgucacccagaacggcaccuccuccgccugcauccgccgcuccuccuccuccuucuucucccgccucaacuggcucacccaccucaacuacaccuaccccgcccucaacgucaccaugcccaacaacgagcaguucgacaagcucuacaucuggggcguccaccaccccggcaccgacaaggaccagaucuuccucuacgcccaguccuccggccgcaucaccgucuccaccaagcgcucccagcaggccgucauccccaacaucggcucccgcccccgcauccgcgacauccccucccgcaucuccaucuacuggaccaucgucaagcccggcgacauccuccucaucaacuccaccggcaaccucaucgccccccgcggcuacuucaagauccgcuccggcaaguccuccaucaugcgcuccgacgcccccaucggcaagugcaaguccgagugcaucacccccaacggcuccauccccaacgacaagcccuuccagaacgucaaccgcaucaccuacggcgccugcccccgcuacgucaagcacuccacccucaagcucgccaccggcaugcgcaacguccccgagaagcagacccgcggcaucuucggcgccaucgccggcuucaucgagaacggcugggagggcauggucgacggcugguacggcuuccgccaccagaacuccgagggccgcggccaggccgccgaccucaaguccacccaggccgccaucgaccagaucaacggcaagcucaaccgccucaucggcaagaccaacgagaaguuccaccagaucgagaaggaguucuccgaggucgagggccgcauccaggaccucgagaaguacgucgaggacaccaagaucgaccucugguccuacaacgccgagcuccucgucgcccucgagaaccagcacaccaucgaccucaccgacuccgagaugaacaagcucuucgagaagaccaagaagcagcuccgcgagaacgccgaggacaugggcaacggcugcuucaagaucuaccacaagugcgacaacgccugcaucgaguccauccgcaacggcaccuacgaccacaacgucuaccgcgacgaggcccucaacaaccgcuuccagaucaagggcgucgagcucaaguccggcuacaaggacuggauccucuggaucuccuucgccaucuccugcuuccuccucugcgucgcccuccucggcuucaucaugugggccugccagaagggcaacauccgcugcaacaucugcaucuga

SEQ ID NO: 109255 - RNA, 1701 nt, Artificial Sequence
  derived and/or modified CDS sequence (opt2) from hemagglutinin__InfluenzaA__ALE31688
augaagaccaccaucgcccucuccuacauccucugccucgucuucgcccagaagcuccccgagaacgacaacuccaccgccacccucugccucggccaccacgccguccccaacggcaccaucgucaagaccaucaccuccgaccgcaucgaggucaccaacgccaccgagcucguccagaacuccuccaucggcgagaucugcgacuccccccaccagauccucgacggcaagaacugcacccucaucgacgcccuccucggcgacccccagugcgacggcuuccagaacaagaagugggaccucuucgucgagcgcuccaaggccuacuccaacugcuaccccuacgacguccccgacuacgccucccuccgcucccucgucgccuccuccggcacccucgaguucaacgacgaguccuucaacugggccggcgucacccagaacggcaccuccuccgccugcauccgcggcuccaacuccuccuucuucucccgccucaacuggcucacccacuccaacuucaaguaccccgcccucaacgucaccaugcccaacaacgagcaguucgacaagcucuacaucuggggcguccaccaccccggcaccgacaaggaccagaucuuccucuacgcccaguccuccggccgcaucaccgucuccaccaagcgcucccagcaggccgucauccccaacaucggcucccgcccccgcauccgcaacauccccucccgcaucuccaucuacuggaccaucgucaagcccggcgacauccuccucaucaacuccaccggcaaccucaucgccccccgcggcuacuucaagauccgcuccggcaaguccuccaucaugcgcuccgacgcccccaucggcaagugcaaguccgagugcaucacccccaacggcuccauccccaacgacaagcccuuccagaacgucaaccgcaucaccuacggcgccugcccccgcuacgucaagcaguccacccucaagcucgccaccggcaugcgcaacguccccgagaagcagacccgcggcaucuucggcgccaucgccggcuucaucgagaacggcugggagggcaugaaggacggcugguacggcuuccgccaccagaacuccgagggccgcggccaggccgccgaccucaaguccacccaggccgccaucgaccagaucaacggcaagcucaaccgccucaucggcaagaccaacgagaaguuccaccagaucgagaaggaguucuccgaggucgagggccgcauccaggaccucgagaaguacgucgaggacaccaagaucgaccucugguccuacaacgccgagcuccucgucgcccucgagaaccagcacaccaucgaccucaccgacuccgagaugaacaagcucuucgagaagaccaagaagcagcuccgcgagaacgccgaggacaugggcaacggcugcuucaagaucuaccacaagugcgacaacgccugcaucggcuccauccgcaacggcaccuacgaccacgacgucuaccgcgacgaggcccucaacaaccgcuuccagaucaagggcgucgagcucaaguccggcuacaaggacuggauccucuggaucuccuucgccaucuccugcuuccuccucugcgucgcccuccucggcuucaucaugugggccugccagaagggcaacauccgcugcaacaucugcaucuga

SEQ ID NO: 109256 - RNA, 1701 nt, Artificial Sequence; identical to SEQ ID NO: 108477
  derived and/or modified CDS sequence (opt2) from hemagglutinin__InfluenzaA__ALE31689

SEQ ID NO: 109257 - RNA, 1701 nt, Artificial Sequence
  derived and/or modified CDS sequence (opt2) from hemagglutinin__InfluenzaA__ALE31690
augaagaccaucaucgcccucuccugcauccucugccucgucuucgcccagaagcuccccggcaacgacaacuccaccgccacccucugccucggccaccacgccguccccaacggcaccaucgucaagaccaucaccaacgaccgcaucgaggucaccaacgccaccgagcucguccagaacuccuccaucggcgagaucugcgacuccccccaccagauccucgacggcgagaacugcacccucaucgacgcccuccucggcgacccccagugcgacggcuuccagaacaagaagugggaccucuucgucgagcgcuccaaggccuacuccaacugcuaccccuacgacguccccgacuacgccucccuccgcucccucgucgccuccuccggcacccucgaguucaacaacgaguccuucaacugggccggcgucacccagaacggcaccuccuccuccugcauccgcggcuccaacuccuccuucuucucccgccucaacuggcucacccaccucaacuccaaguaccccgcccucaacgucaccaugcccaacaacgagcaguucgacaagcucuacaucuggggcguccaccaccccggcaccgacaaggaccagaucuuccucuacgcccaguccuccggccgcaucaccgucuccaccaagcgcucccagcaggccgucauccccaacaucggcucccgcccccgcauccgcgacauccccucccgcaucuccaucuacuggaccaucgucaagcccggcgacauccuccucaucaacuccaccggcaaccucaucgccccccgcggcuacuucaagauccgcuccggcaaguccuccaucaugcgcuccgacgcccccaucggcaagugcaaguccgagugcaucacccccaacggcuccauccccaacgacaagcccuuccagaacgucaaccgcaucaccuacggcgccugcccccgcuacgucaagcaguccacccucaagcucgccaccggcaugcgcaacguccccgagcgccagacccgcggcaucuucggcgccaucgccggcuucaucgagaacggcugggagggcauggucgacggcugguacggcuuccgccaccagaacuccgagggccgcggccaggccgccgaccucaaguccacccaggccgccaucgaccagaucaacggcaagcucaaccgccucaucggcaagaccaacgagaaguuccaccagaucgagaaggaguucuccgaggucgagggccgcauccaggaccucgagaaguacgucgaggacaccaagaucgaccucugguccuacaacgccgagcuccucgucgcccucgagaaccagcacaccaucgaccucaccgacuccgagaugaacaagcucuucgagaagaccaagaagcagcuccgcgagaacgccgaggacaugggcaacggcugcuucaagaucuaccacaagugcgacaacgccugcaucggcuccauccgcaacggcaccuacgaccacaacgucuaccgcgacgaggcccucaacaaccgcuuccagaucaagggcgucgagcucaaguccggcuacaaggacuggauccucuggaucuccuucgccaucuccugcuuccuccucugcgucgcccuccucggcuucaucaugugggccugccagaagggcaacauccgcugcaacaucugcaucuga

SEQ ID NO: 109258 - RNA, 1701 nt, Artificial Sequence; identical to SEQ ID NO: 106030
  derived and/or modified CDS sequence (opt2) from hemagglutinin__InfluenzaA__ALE31691

SEQ ID NO: 109259 - RNA, 1701 nt, Artificial Sequence
  derived and/or modified CDS sequence (opt2) from hemagglutinin__InfluenzaA__ALE31692
augaagaccaucaucgcccucuccuacauccucugccucgucuucgcccagaagauccccggcaacgacaacuccaccgccacccucugccucggccaccacgccguccccaacggcaccaucgucaagaccaucaccaacgaccgcaucgaggucaccaacgccaccgagcucguccagaacuccuccaucggcgagaucugcgacuccccccaccagauccucgacggcgagaacugcacccucaucgacgcccuccucggcgacccccagugcgacggcuuccagaacaagaagugggaccucuucgucgagcgcuccaaggccuacuccaacugcuaccccuacgacguccccgacuacgccucccuccgcucccucgucgccuccuccggcacccucgaguucaacaacgaguccuucaacuggaccggcgucacccagaacggcaccuccuccgccugcauccgcaaguccuccuccuccuucuucucccgccucaacuggcucacccaccucaacuacaccuaccccgcccucaacgucaccaugcccaacaacgagcaguucgacaagcucuacaucuggggcguccaccaccccggcaccgacaaggaccagaucuuccucuacgcccgcuccuccggccgcaucaccgucuccaccaagcgcucccagcaggccgucauccccaacaucggcuaccgcccccgcauccgcgacauccccucccgcaucuccaucuacuggaccaucgucaagcccggcgacauccuccucaucaacuccaccggcaaccucaucgccccccgcggcuacuucaagauccgcuccggcaaguccuccaucaugcgcuccgacgcccccaucggcaagugcaaguccgagugcaucacccccaacggcuccauccccaacgacaagcccuuccagaacgucaaccgcaucaccuacggcgccugcccccgcuacgucaagcacuccacccucaagcucgccaccggcaugcgcaacguccccgagaagcagacccgcggcaucuucggcgccaucgccggcuucaucgagaacggcugggagggcauggucgacggcugguacggcuuccgccaccagaacuccgagggccgcggccaggccgccgaccucaaguccacccaggccgccaucgaccagaucaacggcaagcucaaccgccucaucggcaagaccaacgagaaguuccaccagaucgagaaggaguucuccgaggucgagggccgcauccaggaccucgagaaguacgucgaggacaccaagaucgaccucugguccuacaacgccgagcuccucgucgcccucgagaaccagcacaccaucgaccucaccgacuccgagaugaacaagcucuucgagaagaccaagaagcagcuccgcgagaacgccgaggacaugggcaacggcugcuucaagaucuaccacaagugcgacaacgccugcaucggcuccauccgcaacggcaccuacgaccacaacgucuaccgcgacgaggcccucaacaaccgcuuccagaucaagggcgucgagcucaaguccggcuacaaggacuggauccucuggaucuccuucgccaucuccugcuuccuccucugcgucgcccuccucggcuucaucaugugggccugccagaagggcaacauccgcugcaacaucugcaucuga

SEQ ID NO: 109260 - RNA, 1701 nt, Artificial Sequence; identical to SEQ ID NO: 109259
  derived and/or modified CDS sequence (opt2) from hemagglutinin__InfluenzaA__ALE31693

SEQ ID NO: 109261 - RNA, 1701 nt, Artificial Sequence; identical to SEQ ID NO: 108477
  derived and/or modified CDS sequence (opt2) from hemagglutinin__InfluenzaA__ALE31694

SEQ ID NO: 109262 - RNA, 1701 nt, Artificial Sequence; identical to SEQ ID NO: 109259
  derived and/or modified CDS sequence (opt2) from hemagglutinin__InfluenzaA__ALE31695

SEQ ID NO: 109263 - RNA, 1701 nt, Artificial Sequence; identical to SEQ ID NO: 109135
  derived and/or modified CDS sequence (opt2) from hemagglutinin__InfluenzaA__ALE31696

SEQ ID NO: 109264 - RNA, 1701 nt, Artificial Sequence; identical to SEQ ID NO: 109259
  derived and/or modified CDS sequence (opt2) from hemagglutinin__InfluenzaA__ALE31697

SEQ ID NO: 109265 - RNA, 1701 nt, Artificial Sequence
  derived and/or modified CDS sequence (opt2) from hemagglutinin__InfluenzaA__ALE31698
augaagaccaucaucgcccucuccuacauccucugcauggucuucgcccagaagauccccggcaacgacaacuccaccgccacccucugccucggccaccacgccguccccaacggcaccaucgucaagaccaucaccaacgaccgcaucgaggucaccaacgccaccgagcucguccagaacuccuccaucggcgagaucugcgacuccccccaccagauccucgacggcgagaacugcacccucaucgacgcccuccucggcgacccccagugcgacggcuuccagaacaagaagugggaccucuucgucgagcgcuccaaggccuacuccaacugcuaccccuacgacguccccgacuacgccucccuccgcucccucgucgccuccuccggcacccucgaguucaacaacgaguccuucaacuggaccggcgucacccagaacggcaccuccuccgccugcauccgccgcuccuccuccuccuucuucucccgccucaacuggcucacccaccucaacuacaccuaccccgcccucaacgucaccaugcccaacaacgagcaguucgacaagcucuacaucuggggcguccaccaccccggcaccgacaaggaccagaucuuccucuacgcccaguccuccggccgcaucaccgucuccaccaagcgcucccagcaggccgucauccccaacaucggcucccgcccccgcauccgcgacauccccucccgcaucuccaucuacuggaccaucgucaagcccggcgacauccuccucaucaacuccaccggcaaccucaucgccccccgcggcuacuucaagauccgcuccggcaaguccuccaucaugcgcuccgacgcccccaucggcaagugcaaguccgagugcaucacccccaacggcuccauccccaacgacaagcccuuccagaacgucaaccgcaucaccuacggcgccugcccccgcuacgucaagcacuccacccucaagcucgccaccggcaugcgcaacguccccgagaagcagacccgcggcaucuucggcgccaucgccggcuucaucgagaacggcugggagggcauggucgacggcugguacggcuuccgccaccagaacuccgagggccgcggccaggccgccgaccucaaguccacccaggccgccaucgaccagaucaacggcaagcucaaccgccucaucggcaagaccaacgagaaguuccaccagaucgagaaggaguucuccgaggucgagggccgcauccaggaccucgagaaguacgucgaggacaccaagaucgaccucugguccuacaacgccgagcuccucgucgcccucgagaaccagcacaccaucgaccucaccgacuccgagaugaacaagcucuucgagaagaccaagaagcagcuccgcgagaacgccgaggacaugggcaacggcugcuucaagaucuaccacaagugcgacaacgccugcaucggcuccauccgcaacggcaccuacgaccacaacgucuaccgcgacgaggcccucaacaaccgcuuccagaucaagggcgucgagcucaaguccggcuacaaggacuggauccucuggaucuccuucgccaucuccugcuuccuccucugcgucgcccuccucggcuucaucaugugggccugccagaagggcaacauccgcugcaacaucugcaucuga

SEQ ID NO: 109266 - RNA, 1701 nt, Artificial Sequence
  derived and/or modified CDS sequence (opt2) from hemagglutinin__InfluenzaA__ALE31699
augaagaccaucaucgcccucuccuacauccucugccucgucuucgcccagaagauccccggcaacgacaacuccaccgccacccucugccucggccaccacgccguccccaacggcaccaucgucaagaccaucaccaacgaccgcaucgaggucaccaacgccaccgagcucguccagaacuccuccaucggcgagaucugcgacuccccccaccagauccucgacggcgagaacugcacccucaucgacgcccuccucggcgacccccagugcgacggcuuccagaacaagaagugggaccucuucgucgagcgcuccaaggccuacuccaacugcuaccccuacgacguccccaacuacgccucccuccgcucccucgucgccuccuccggcacccucgaguucaacaacgaguccuucaacuggaccggcgucacccagaacggcaccuccuccgccugcauccgccgcuccuccuccuccuucuucucccgccucaacuggcucacccaccucaacuacgccuaccccgcccucaacgucaccaugcccaacaacgagcaguucgacaagcucuacaucuggggcguccaccaccccggcaccgacaaggaccagaucuuccucuacgcccaguccuccggccgcaucaccgucuccaccaagcgcucccagcaggccgucauccccaacaucggcucccgcccccgcauccgcgacauccccucccgcaucuccaucuacuggaccaucgucaagcccggcgacauccuccucaucaacuccaccggcaaccucaucgccccccgcggcuacuucaagauccgcuccggcaaguccuccaucaugcgcuccgacgcccccaucggcaagugcaaguccgagugcaucacccccaacggcuccauccccaacgacaagcccuuccagaacgucaaccgcaucaccuacggcgccugcccccgcuacgucaagcacuccacccucaagcucgccaccggcaugcgcaacguccccgagaagcagacccgcggcaucuucggcgccaucgccggcuucaucgagaacggcugggagggcauggucgacggcugguacggcuuccgccaccagaacuccgagggccgcggccaggccgccgaccucaaguccacccaggccgccaucgaccagaucaacggcaagcucaaccgccucaucggcaagaccaacgagaaguuccaccagaucgagaaggaguucuccgaggucgagggccgcauccaggaccucgagaaguacgucgaggacaccaagaucgaccucugguccuacaacgccgagcuccucgucgcccucgagaaccagcacaccaucgaccucaccgacuccgagaugaacaagcucuucgagaagaccaagaagcagcuccgcgagaacgccgaggacaugggcaacggcugcuucaagaucuaccacaagugcgacaacgccugcaucggcuccauccgcaacggcaccuacgaccacaacgucuaccgcgacgaggcccucaacaaccgcuuccagaucaagggcgucgagcucaaguccggcuacaaggacuggauccucuggaucuccuucgccaucuccugcuuccuccucugcgucgcccuccucggcuucaucaugugggccugccagaagggcaacauccgcugcaacaucugcaucuga

SEQ ID NO: 109267 - RNA, 1701 nt, Artificial Sequence; identical to SEQ ID NO: 108477
  derived and/or modified CDS sequence (opt2) from hemagglutinin__InfluenzaA__ALE31700

SEQ ID NO: 109268 - RNA, 1701 nt, Artificial Sequence; identical to SEQ ID NO: 108477
  derived and/or modified CDS sequence (opt2) from hemagglutinin__InfluenzaA__ALE31701

SEQ ID NO: 109269 - RNA, 1701 nt, Artificial Sequence; identical to SEQ ID NO: 109034
  derived and/or modified CDS sequence (opt2) from hemagglutinin__InfluenzaA__ALE31702

SEQ ID NO: 109270 - RNA, 1701 nt, Artificial Sequence; identical to SEQ ID NO: 108477
  derived and/or modified CDS sequence (opt2) from hemagglutinin__InfluenzaA__ALE31703

SEQ ID NO: 109271 - RNA, 1701 nt, Artificial Sequence; identical to SEQ ID NO: 108477
  derived and/or modified CDS sequence (opt2) from hemagglutinin__InfluenzaA__ALE31704

SEQ ID NO: 109272 - RNA, 1701 nt, Artificial Sequence; identical to SEQ ID NO: 109034
  derived and/or modified CDS sequence (opt2) from hemagglutinin__InfluenzaA__ALE31705

SEQ ID NO: 109273 - RNA, 1701 nt, Artificial Sequence
  derived and/or modified CDS sequence (opt2) from hemagglutinin__InfluenzaA__ALE31706
augaagaccaucaucgcccucuccuacauccucugccucgucuucgcccagaagauccccggcaacgacaacuccaccgccacccucugccucggccaccacgccguccccaacggcaccaucgucaagaccaucaccaacgaccgcaucgaggucaccaacgccaccgagcucguccagaacuccuccaucggcgagaucugcgacuccccccaccagauccucgacggcgagaacugcacccucaucgacgcccuccucggcgacccccagugcgacggcuuccagaacaagaagugggaccucuucgucgagcgcuccaaggccuacuccaacugcuaccccuacgacguccccgacuacgccucccuccgcucccucgucgccuccuccggcacccucgaguucaacaacgaguccuucaacuggaccggcgucacccagaacggcaccuccuccgccugcauccgccgcuccuccuccuccuucuucucccgccucaacuggcucacccaccucaacuacaccuaccccgcccucaacgucaccaugcccaacaacgagcaguucgacaagcucuacaucuggggcguccaccaccccggcaccgacaaggaccagaucuuccucuacgcccaguccuccggccgcaucaccgucuccaccaagggcucccagcaggccgucauccccaacaucggcucccgcccccgcauccgcgacauccccucccgcaucuccaucuacuggaccaucgucaagcccggcgacauccuccucaucaacuccaccggcaaccucaucgccccccgcggcuacuucaagauccgcuccggcaaguccuccaucaugcgcuccgacgcccccaucggcaagugcaaguccgagugcaucacccccaacggcuccauccccaacgacaagcccuuccagaacgucaaccgcaucaccuacggcgccugcccccgcuacgucaagcacuccacccucaagcucgccaccggcaugcgcaacguccccgagaagcagacccgcggcaucuucggcgccaucgccggcuucaucgagaacggcugggagggcauggucgacggcugguacggcuuccgccaccagaacuccgagggccgcggccaggccgccgaccucaaguccacccaggccgccaucgaccagaucaacggcaagcucaaccgccucaucggcaagaccaacgagaaguuccaccagaucgagaaggaguucuccgaggucgagggccgcauccaggaccucgagaaguacgucgaggacaccaagaucgaccucugguccuacaacgccgagcuccucgucgcccucgagaaccagcacaccaucgaccucaccgacuccgagaugaacaagcucuucgagaagaccaagaagcagcuccgcgagaacgccgaggacaugggcaacggcugcuucaagaucuaccacaagugcgacaacgccugcaucggcuccauccgcaacggcaccuacgaccacaacgucuaccgcgacgaggcccucaacaaccgcuuccagaucaagggcgucgagcucaaguccggcuacaaggacuggauccucuggaucuccuucgccaucuccugccuccuccucugcgucgcccuccucggcuucaucaugugggccugccagaagggcaacauccgcugcaacaucugcaucuga

SEQ ID NO: 109274 - RNA, 1701 nt, Artificial Sequence; identical to SEQ ID NO: 109163
  derived and/or modified CDS sequence (opt2) from hemagglutinin__InfluenzaA__ALE31707

SEQ ID NO: 109275 - RNA, 1701 nt, Artificial Sequence; identical to SEQ ID NO: 109163
  derived and/or modified CDS sequence (opt2) from hemagglutinin__InfluenzaA__ALE31708

SEQ ID NO: 109276 - RNA, 1701 nt, Artificial Sequence; identical to SEQ ID NO: 108463
  derived and/or modified CDS sequence (opt2) from hemagglutinin__InfluenzaA__ALE31709

SEQ ID NO: 109277 - RNA, 1701 nt, Artificial Sequence
  derived and/or modified CDS sequence (opt2) from hemagglutinin__InfluenzaA__ALE31710
augaagaccaucaucgcccucuccuacauccucugccucgucuucgcccagaagauccccggcaacgacaacuccaccgccacccucugccucggccaccacgccguccccaacggcaccaucgucaagaccaucaccaacgaccgcaucgaggucaccaacgccaccgagcucguccagaacuccuccaucggcgagaucugcgacuccccccaccagauccucgacggcgagaacugcacccucaucgacgcccuccucggcgacccccagugcgacggcuuccagaacaagaagugggaccucuucgucgagcgcuccaaggccuacuccaacugcuaccccuacgacguccccgacuacgccucccuccgcucccucgucgccuccuccggcacccucgaguucaacaacgaguccuucaacuggaccggcgucacccagaacggcaccuccuccgccugcauccgccgcuccuccuccuccuucuucucccgccucaacuggcucacccaccucaacuacaccuaccccgcccucaacgucaccaugcccaacaacgagcaguucgacaagcucuacaucuggggcguccaccaccccggcaccgacaaggaccagaucuuccucuacgcccaguccuccggccgcaucaccgucuccaccaagcgcucccagcaggccgucauccccaacaucggcucccgccuccgcauccgcgacauccccucccgcaucuccaucuacuggaccaucgucaagcccggcgacauccuccucaucaacuccaccggcaaccucaucgccccccgcggcuacuucaagauccucuccggcaaguccuccaucaugcgcuccgacgcccccaucggcaagugcaaguccgagugcaucacccccaacggcuccauccccaacgacaagcccuuccagaacgucaaccgcaucaccuacggcgccugcccccgcuacgucaagcacuccacccucaagcucgccaccggcaugcgcaacguccccgagaagcagacccgcggcaucuucggcgccaucgccggcuucaucgagaacggcugggagggcauggucgacggcugguacggcuuccgccaccagaacuccgagggccgcggccaggccgccgaccucaaguccacccaggccgccaucgaccagaucaacggcaagcucaaccgccucaucggcaagaccaacgagaaguuccaccagaucgagaaggaguucuccgaggucgagggccgcauccaggaccucgagaaguacgucgaggacuccaagaucgaccucugguccuacaacgccgagcuccucgucgcccucgagaaccagcacaccaucgaccucaccgacuccgagaugaacaagcucuucgagaagaccaagaagcagcuccgcgagaacgccgaggacaugggcaacggcugcuucaagaucuaccacaagugcgacaacgccugcaucggcuccauccgcaacggcaccuacgaccacaacgucuaccgcgacgaggcccucaacaaccgcuuccagaucaagggcgucgagcucaaguccggcuacaaggacuggauccucuggaucuccuucgccaucuccugcuuccuccucugcgucgcccuccucggcuucaucaugugggccugccagaagggcaacauccgcugcaacaucugcaucuga

SEQ ID NO: 109278 - RNA, 1701 nt, Artificial Sequence; identical to SEQ ID NO: 109163
  derived and/or modified CDS sequence (opt2) from hemagglutinin__InfluenzaA__ALE31711

SEQ ID NO: 109279 - RNA, 1701 nt, Artificial Sequence; identical to SEQ ID NO: 109021
  derived and/or modified CDS sequence (opt2) from hemagglutinin__InfluenzaA__ALE31712

SEQ ID NO: 109280 - RNA, 1701 nt, Artificial Sequence
  derived and/or modified CDS sequence (opt2) from hemagglutinin__InfluenzaA__ALE31713
augaagaccaucaucgcccucuccuacauccucugccucgucuucgcccagaagauccccggcaacgacaacuccaccgccacccucugccucggccaccacgccguccccaacggcaccaucgucaagaccaucaccaacgaccgcaucgaggucaccaacgccaccgagcucguccagaacuccuccaucggcgagaucugcgacuccccccaccagauccucgacggcgagaacugcacccucaucgacgcccuccucggcgacccccagugcgacggcuuccagaacaagaagugggaccucuucgucgagcgcuccaaggccuacuccaacugcuaccccuacgacguccccgacuacgccucccuccgcucccucgucgccuccuccggcacccucgaguucaacaacgaguccuucaacuggaccggcgucacccagaacggcaccuccuccgccugcauccgcaaguccuccuccuccuucuucucccgccucaacuggcucacccaccucaacuacaccuaccccgcccucaacgucaccaugcccaacaacgagcaguucgacaagcucuacaucuggggcauccaccaccccggcaccgacaaggaccagaucuuccucuacgcccgcuccuccggccgcaucaccgucuccaccaagcgcucccagcaggccgucauccccaacaucggcucccgcccccgcauccgcgacauccccucccgcaucuccaucuacuggaccaucgucaagcccggcgacauccuccucaucaacuccaccggcaaccucaucgccccccgcggcuacuucaagauccgcuccggcaaguccuccaucaugcgcuccgacgcccccaucggcaagugcaaguccgagugcaucacccccaacggcuccauccccaacgacaagcccuuccagaacgucaaccgcaucaccuacggcgccugcccccgcuacgucaagcacuccacccucaagcucgccaccggcaugcgcaacauccccgagaagcagaccaagggcaucuucggcgccaucgccggcuucaucgagaacggcugggagggcauggucgacggcugguacggcuuccgccaccagaacuccgagggccgcggccaggccgccgaccucaaguccacccaggccgccaucgaccagaucaacggcaagcucaaccgccucaucggcaagaccaacgagaaguuccaccagaucgagaaggaguucuccgaggucgagggccgcauccaggaccucgagaaguacgucgaggacaccaagaucgaccucugguccuacaacgccgagcuccucgucgcccucgagaaccagcacaccaucgaccucaccgacuccgagaugaacaagcucuucgagaagaccaagaagcagcuccgcgagaacgccgaggacaugggcaacggcugcuucaagaucuaccacaagugcgacaacgccugcaucggcuccauccgcaacggcaccuacgaccacaacgucuaccgcgacgaggcccucaacaaccgcuuccagaucaagggcgucgagcucaaguccggcuacaaggacuggauccucuggaucuccuucgccaccuccugcuuccuccucugcgucgcccuccucggcuucaucaugugggccugccagaagggcaacauccgcugcaacaucugcaucuga

SEQ ID NO: 109281 - RNA, 1701 nt, Artificial Sequence; identical to SEQ ID NO: 109135
  derived and/or modified CDS sequence (opt2) from hemagglutinin__InfluenzaA__ALE31714

SEQ ID NO: 109282 - RNA, 1701 nt, Artificial Sequence; identical to SEQ ID NO: 109135
  derived and/or modified CDS sequence (opt2) from hemagglutinin__InfluenzaA__ALE31715

SEQ ID NO: 109283 - RNA, 1701 nt, Artificial Sequence; identical to SEQ ID NO: 109163
  derived and/or modified CDS sequence (opt2) from hemagglutinin__InfluenzaA__ALE31716

SEQ ID NO: 109284 - RNA, 1701 nt, Artificial Sequence
  derived and/or modified CDS sequence (opt2) from hemagglutinin__InfluenzaA__ALE31717
augaagaccaucaucgcccucuccuacauccucugccucgucuucgcccagaagauccccggcaacgacaacuccaccgccacccucugccucggccaccacgccguccccaacggcaccaucgucaagaccaucaccaacgaccgcaucgaggucaccaacgccaccgagcucguccagaacuccuccaucggcgagaucugcgacuccccccaccagauccucgacggcgagaacugcacccucaucgacgcccuccucggcgacccccagugcgacggcuuccagaacaagaagugggaccucuucgucgagcgcuccaaggccuacuccaacugcuaccccuacgacguccccgacuacgccucccuccgcucccucgucgccuccuccggcacccucgaguucaacaacgaguccuucaacuggaccggcgucacccagaacggcaccuccuccgccugcauccgcaaguccuccuccuccuucuucucccgccucaacuggcucacccaccucaacuacaaguaccccgcccucaacgucaccaugcccaacaacgagcaguucgacaagcucuacaucuggggcguccaccaccccggcaccgacaaggaccagaucuuccucuacgcccgcuccuccggccgcaucaccgucuccaccaagaccucccagcaggccgucauccccaacaucggcucccgcccccgcauccgcgacauccccucccgcaucuccaucuacuggaccaucgucaagcccggcgacauccuccucaucaacuccaccggcaaccucaucgccccccgcggcuacuucaagauccgcuccggcaaguccuccaucaugcgcuccgacgcccccaucggcaagugcaaguccgagugcaucacccccaacggcuccauccccaacgacaagcccuuccagaacgucaaccgcaccaccuacggcgccugcccccgcuacgucaagcacuccacccucaagcucgccaccggcaugcgcaacguccccgagaagcagacccgcggcaucuucggcgccaucgccggcuucaucgagaacggcugggagggcauggucgacggcugguacggcuuccgccaccagaacuccgagggccgcggccaggccgccgaccucaaguccacccaggccgccaucgaccagaucaacggcaagcucaaccgccucaucggcaagaccaacgagaaguuccaccagaucgagaaggaguucuccgaggucgagggccgcauccaggaccucgagaaguacgucgaggacaccaagaucgaccucugguccuacaacgccgagcuccucgucgcccucgagaaccagcacaccaucgaccucaccgacuccgagaugaacaagcucuucgagaagaccaagaagcagcuccgcgagaacgccgaggacaugggcaacggcugcuucaagaucuaccacaagugcgacaacgccugcaucggcuccauccgcaacggcaccuacgaccacaacgucuaccgcgacgaggcccucaacaaccgcuuccagaucaagggcgucgagcucaaguccggcuacaaggacuggauccucuggaucuccuucgccaucuccugcuuccuccucugcgucgcccuccucggcuucaucaugugggccugccagaagggcaacauccgcugcaacaucugcaucuga

SEQ ID NO: 109285 - RNA, 1701 nt, Artificial Sequence; identical to SEQ ID NO: 109135
  derived and/or modified CDS sequence (opt2) from hemagglutinin__InfluenzaA__ALE31718

SEQ ID NO: 109286 - RNA, 1701 nt, Artificial Sequence
  derived and/or modified CDS sequence (opt2) from hemagglutinin__InfluenzaA__ALE31719
augaagaccaucaucgcccucuccuacauccucugccucgucuucgcccagaagauccccggcaacgacaacuccaccgccacccucugccucggccaccacgccguccccaacggcaccaucgucaagaccaucaccaacgaccgcaucgaggucaccaacgccaccgagcucguccagaacuccuccaucggcgagaucugcgacuccccccaccagauccucgacggcgagaacugcacccucaucgacgcccuccucggcgacccccagugcgacggcuuccagaacaagaagugggaccucuucgucgagcgcuccaaggccuacuccaacugcuaccccuacgacguccccgacuacgccucccuccgcucccucgucgccuccuccggcacccucgaguucaacaacgaguccuucaacuggaccggcgucacccagaacggcaccuccuccgccugcauccgcaaguccuccuccuccuucuucucccgccucaacuggcucacccaccucaacuacaccuaccccgcccucaacgucaccaugcccaacaacgagcaguucgacaagcucuacaucuggggcguccaccaccccggcaccgacaaggaccagaucuuccucuacgcccgcuccuccggccgcaucaccgucuccaccaagcgcucccagcaggccgucauccccaacaucggcucccgcccccgcauccgcgacauccccucccgcaucuccaucuacuggaccaucgucaagcccggcgacauccuccucaucaacuccaccggcaaccucaucgccccccgcggcuacuucaagauccgcuccggcaaguccuccaucaugcgcuccgacgcccccaucggcaagugcaaguccgagugcaucacccccaacggcuccauccccaacgacaagcccuuccagaacgucaaccgcaucaccuacggcgccugcccccgcuacgucaagcacuccacccucaagcucgccaccggcaugcgcaacauccccgagaagcagacccgcggcaucuucggcgccaucgccggcuucaucgagaacggcugggagggcauggucgacggcugguacggcuuccgccaccagaacuccgagggccgcggccaggccgccgaccucaaguccacccaggccgccaucgaccagaucaacggcaagcucaaccgccucaucggcaagaccaacgagaaguuccaccagaucgagaaggaguucuccgaggucgagggccgcauccaggaccucgagaaguacgucgaggacaccaagaucgaccucugguccuacaacgccgagcuccucgucgcccucgagaaccagcacaccaucgaccucaccgacuccgagaugaacaagcucuucgagaagaccaagaagcagcuccgcgagaacgccgaggacaugggcaacggcugcuucaagaucuaccacaagugcgacaacgccugcaucggcuccauccgcaacggcaccuacgaccacaacgucuaccgcgacgaggcccucaacaaccgcuuccagaucaagggcgucgagcucaaguccggcuacaaggacuggauccucuggaucuccuucgccaucuccugcuuccuccucugcgucgcccuccucggcuucaucaugugggccugccagaagggcaacauccgcugcaacaucugcaucuga

SEQ ID NO: 109287 - RNA, 1701 nt, Artificial Sequence; identical to SEQ ID NO: 109021
  derived and/or modified CDS sequence (opt2) from hemagglutinin__InfluenzaA__ALE31720

SEQ ID NO: 109288 - RNA, 1701 nt, Artificial Sequence; identical to SEQ ID NO: 109034
  derived and/or modified CDS sequence (opt2) from hemagglutinin__InfluenzaA__ALE31721

SEQ ID NO: 109289 - RNA, 1701 nt, Artificial Sequence; identical to SEQ ID NO: 109257
  derived and/or modified CDS sequence (opt2) from hemagglutinin__InfluenzaA__ALE31722

SEQ ID NO: 109290 - RNA, 1701 nt, Artificial Sequence
  derived and/or modified CDS sequence (opt2) from hemagglutinin__InfluenzaA__ALE31723
augaagaccaucaucgcccucuccuacauccucugccucgucuucgcccagaagauccccggcaacgacaacuccaccgccacccucugccucggccaccacgccguccccaacggcaccaucgucaagaccaucaccaacgaccgcaucgaggucaccaacgccaccgagcucguccagaacuccuccaucggcgagaucugcgacuccccccaccagauccucgacggcgagaacugcacccucaucgacgcccuccucggcgacccccagugcgacggcuuccagaacaagaagugggaccucuucgucgagcgcuccaaggccuacuccaacugcuaccccuacgacguccccgacuacgccucccuccgcucccucgucgccuccuccggcacccucgaguucaacaacgaguccuucaacuggaccggcgucacccagaacggcaccuccuccgccugcauccgcaaguccuccuccuccuucuucucccgccucaacuggcucacccaccucaacuacaccuaccccgcccucaacgucaccaugcccaacaacgagcaguucgacaagcucuacaucuggggcguccaccaccccggcaccgacaaggaccagaucuuccucuacgcccgcuccuccggccgcaucaccgucuccaccaagcgcucccagcaggccgucauccccaacaucggcucccgcccccgcauccgcgacauccccucccgcaucuccaucuacuggaccaucgucaagcccggcgacauccuccucaucaacuccaccggcaaccucaucgccccccgcggcuacuucaagauccgcuccggcaaguccuccaucaugcgcuccgacgcccccaucggcaagugcaaguccgagugcaccacccccaacggcuccauccccaacgacaagcccuuccagaacgucaaccgcaucaccuacggcgccugcccccgcuacgucaagcacuccacccucaagcucgccaccggcaugcgcaacguccccgagaagcagacccgcggcaucuucggcgccaucgccggcuucaucgagaacggcugggagggcauggucgacggcugguacggcuuccgccaccagaacuccgagggccgcggccaggccgccgaccucaaguccacccaggccgccaucgaccagaucaacggcaagcucaaccgccucaucggcaagaccaacgagaaguuccaccagaucgagaaggaguucuccgaggucgagggccgcauccaggaccucgagaaguacgucgaggacaccaagaucgaccucugguccuacaacgccgagcuccucgucgcccucgagaaccagcacaccaucgaccucaccgacuccgagaugaacaagcucuucgagaagaccaagaagcagcuccgcgagaacgccgaggacaugggcaacggcugcuucaagaucuaccacaagugcgacaacgccugcaucggcuccauccgcaacggcaccuacgaccacaacgucuaccgcgacgaggcccucaacaaccgcuuccagaucaagggcgucgagcucaaguccggcuacaaggacuggauccucuggaucuccuucgccaucuccugcuuccuccucugcgucgcccuccucggcuucaucaugugggccugccagaagggcaacauccgcugcaacaucugcaucuga

SEQ ID NO: 109291 - RNA, 1701 nt, Artificial Sequence; identical to SEQ ID NO: 108477
  derived and/or modified CDS sequence (opt2) from hemagglutinin__InfluenzaA__ALE31724

SEQ ID NO: 109292 - RNA, 1701 nt, Artificial Sequence; identical to SEQ ID NO: 108477
  derived and/or modified CDS sequence (opt2) from hemagglutinin__InfluenzaA__ALE31725

SEQ ID NO: 109293 - RNA, 1701 nt, Artificial Sequence; identical to SEQ ID NO: 108477
  derived and/or modified CDS sequence (opt2) from hemagglutinin__InfluenzaA__ALE31726

SEQ ID NO: 109294 - RNA, 1701 nt, Artificial Sequence; identical to SEQ ID NO: 108477
  derived and/or modified CDS sequence (opt2) from hemagglutinin__InfluenzaA__ALE31727

SEQ ID NO: 109295 - RNA, 1701 nt, Artificial Sequence
  derived and/or modified CDS sequence (opt2) from hemagglutinin__InfluenzaA__ALE31728
augaagaccaucaucgcccucuccuacauccucugccucgucuucgcccagaagauccccggcaacgacaacuccaccgccacccucugccucggccaccacgccguccccaacggcaccaucgucaagaccaucaccaacgaccgcaucgaggucaccaacgccaccgagcucguccagaacuccuccaucggcgagaucugcgacuccccccaccagauccucgacggcgagaacugcacccucaucgacgcccuccucggcgacccccagugcgacggcuuccagaacaagaagugggaccucuucgucgagcgcuccaaggccuacuccaacugcuaccccuacgacguccccgacuacgccucccuccgcucccucgucgccuccuccggcacccucgaguucaacaacgaguccuucaacuggaccggcgucacccagaacggcaccuccuccgccugcauccgccgcuccuccuccuccuucuucucccgccucaacuggcucacccaccucaacuacaccuaccccgcccucaacgucaccauccccaacaacgagcaguucgacaagcucuacaucuggggcguccaccaccccggcaccgacaaggaccagaucuuccucuacgcccaguccuccggccgcaucaccgucuccaccaagcgcucccagcaggccgucauccccaacaucggcucccgcccccgcauccgcgacauccccucccgcaucuccaucuacuggaccaucgucaagcccggcgacauccuccucaucaacuccaccggcaaccucaucgccccccgcggcuacuucaagauccgcuccggcaaguccuccaucaugcgcuccgacgcccccaucggcaagugcaaguccgagugcaucacccccaacggcuccauccccaacgacaagcccuuccagaacgucaaccgcaucaccuacggcgccugcccccgcuacgucaagcacuccacccucaagcucgccaccggcaugcgcaacguccccgagaagcagacccgcggcaucuucggcgccaucgccggcuucaucgagaacggcugggagggcauggucgacggcugguacggcuuccgccaccagaacuccgagggccgcggccaggccgccgaccucaaguccacccaggccgccaucgaccagaucaacggcaagcucaaccgccucaucggcaagaccaacgagaaguuccaccagaucgagaaggaguucuccgaggucgagggccgcauccaggaccucgagaaguacgucgaggacaccaagaucgaccucugguccuacaacgccgagcuccucgucgcccucgagaaccagcacaccaucgaccucaccgacuccgagaugaacaagcucuucgagaagaccaagaagcagcuccgcgagaacgccgaggacaugggcaacggcugcuucaagaucuaccacaagugcgacaacgccugcaucggcuccauccgcaacggcaccuacgaccacaacgucuaccgcgacgaggcccucaacaaccgcuuccagaucaagggcgucgagcucaaguccggcuacaaggacuggauccucuggaucuccuucgccaucuccugcuuccuccucugcgucgcccuccucggcuucaucaugugggccugccagaagggcaacauccgcugcaacaucugcaucuga

SEQ ID NO: 109296 - RNA, 1701 nt, Artificial Sequence
  derived and/or modified CDS sequence (opt2) from hemagglutinin__InfluenzaA__ALE31729
augaagaccaucaucgcccucuccuacauccucugccucgucuucgcccagaagauccccggcaacgacaacuccaccgccacccucugccucggccaccacgccguccccaacggcaccaucgucaagaccaucaccaacgaccgcaucgaggucaccaacgccaccgagcucguccagaacuccuccaucggcgagaucugcgacuccccccaccagaucaucgacggcgagaacugcacccucaucgacgcccuccucggcgacccccagugcgacggcuuccagaacaagaagugggaccucuucgucgagcgcuccaaggccuacuccaacugcuaccccuacgacguccccgacuacgccucccuccgcucccucgucgccuccuccggcacccucgaguucaacaacgaguccuucaacuggaccggcgucacccagaacggcaccuccuccgccugcauccgccgcuccuccuccuccuucuucucccgccucaacuggcucacccaccucaacuacaccuaccccgcccucaacgucaccaugcccaacaacgagcaguucgacaagcucuacaucuggggcguccaccaccccggcaccgacaaggaccagaucuuccucuacgcccaguccuccggccgcaucaccgucuccaccaagcgcucccagcaggccgucauccccaacaucggcucccgcccccgcauccgcgacauccccucccgcaucuccaucuacuggaccaucgucaagcccggcgacauccuccucaucaacuccaccggcaaccucaucgccccccgcggcuacuucaagauccgcuccggcaaguccuccaucaugcgcuccgacgcccccaucggcaagugcaaguccgagugcaucacccccaacggcuccauccccaacgacaagcccuuccagaacgucaaccgcaucaccuacggcgccugcccccgcuacgucaagcacuccacccucaagcucgccaccggcaugcgcaacguccccgagaagcagacccgcggcaucuucggcgccaucgccggcuucaucgagaacggcugggagggcauggucgacggcugguacggcuuccgccaccagaacuccgagggccgcggccaggccgccgaccucaaguccacccaggccgccaucgaccagaucaacggcaagcucaaccgccucaucggcaagaccaacgagaaguuccaccagaucgagaaggaguucuccgaggucgagggccgcauccaggaccucgagaaguacgucgaggacaccaagaucgaccucugguccuacaacgccgagcuccucgucgcccucgagaaccagcacaccaucgaccucaccgacuccgagaugaacaagcucuucgagaagaccaagaagcagcuccgcgagaacgccgaggacaugggcaacggcugcuucaagaucuaccacaagugcgacaacgccugcaucggcuccauccgcaacggcaccuacgaccacaacgucuaccgcgacgaggcccucaacaaccgcuuccagaucaagggcgucgagcucaaguccggcuacaaggacuggauccucuggaucuccuucgccaucuccugcuuccuccucugcgucgcccuccucggcuucaucaugugggccugccagaagggcaacauccgcugcaacaucugcaucuga

SEQ ID NO: 109297 - RNA, 1701 nt, Artificial Sequence; identical to SEQ ID NO: 108477
  derived and/or modified CDS sequence (opt2) from hemagglutinin__InfluenzaA__ALE31730

SEQ ID NO: 109298 - RNA, 1701 nt, Artificial Sequence
  derived and/or modified CDS sequence (opt2) from hemagglutinin__InfluenzaA__ALE31731
augaagaccaucaucgcccucuccuacauccucugccaggucuucgcccagaagauccccggcaacgacaacuccaccgccacccucugccucggccaccacgccguccccaacggcaccaucgucaagaccaucaccaacgaccgcaucgaggucaccaacgccaccgagcucguccagaacuccuccaucggcgagaucugcgacuccccccaccagauccucgacggcgagaacugcacccucaucgacgcccuccucggcgacccccagugcgacggcuuccagaacaagaagugggaccucuucgucgagcgcuccaaggccuacuccaacugcuaccccuacgacguccccgacuacgccucccuccgcucccucgucgccuccuccggcacccucgaguucaacaacgaguccuucaacuggaccggcgucacccagaacggcaccuccuccgccugcauccgcaaguccuccuccuccuucuucucccgccucaacuggcucacccaccucaacuacaccuaccccgcccucaacgucaccaugcccaacaacgagcaguucgacaagcucuacaucuggggcguccaccaccccggcaccgacaaggaccagaucuuccucuacgcccgcuccuccggccgcaucaccgucuccaccaagcgcucccagcaggccgucauccccaacaucggcucccgcccccgcauccgcgacauccccucccgcaucuccaucuacuggaccaucgucaagcccggcgacauccuccucaucaacuccaccggcaaccucaucgccccccgcggcuacuucaagauccgcuccggcaaguccuccaucaugcgcuccgacgcccccaucggcaagugcaaguccgagugcaucacccccaacggcuccauccccaacgacaagcccuuccagaacgucaaccgcaucaccuacggcgccugcccccgcuacgucaagcacuccacccucaagcucgccaccggcaugcgcaacguccccgagaagcagacccgcggcaucuucggcgccaucgccggcuucaucgagaacggcugggagggcauggucgacggcugguacggcuuccgccaccagaacuccgagggccgcggccaggccgccgaccucaaguccacccaggccgccaucgaccagaucaacggcaagcucaaccgccucaucggcaagaccaacgagaaguuccaccagaucgagaaggaguucuccgaggucgagggccgcauccaggaccucgagaaguacgucgaggacaccaagaucgaccucugguccuacaacgccgagcuccucgucgcccucgagaaccagcacaccaucgaccucaccgacuccgagaugaacaagcucuucgagaagaccaagaagcagcuccgcgagaacgccgaggacaugggcaacggcugcuucaagaucuaccacaagugcgacaacgccugcaucggcuccauccgcaacggcaccuacgaccacaacgucuaccgcgacgaggcccucaacaaccgcuuccagaucaagggcgucgagcucaaguccggcuacaaggacuggauccucuggaucuccuucgccaucuccugcuuccuccucugcgucgcccuccucggcuucaucaugugggccugccagaagggcaacauccgcugcaacaucugcaucuga

SEQ ID NO: 109299 - RNA, 1701 nt, Artificial Sequence; identical to SEQ ID NO: 109135
  derived and/or modified CDS sequence (opt2) from hemagglutinin__InfluenzaA__ALE31732

SEQ ID NO: 109300 - RNA, 1701 nt, Artificial Sequence; identical to SEQ ID NO: 109135
  derived and/or modified CDS sequence (opt2) from hemagglutinin__InfluenzaA__ALE31733

SEQ ID NO: 109301 - RNA, 1701 nt, Artificial Sequence
  derived and/or modified CDS sequence (opt2) from hemagglutinin__InfluenzaA__ALE31734
augaagaccaucaucgcccucuccuacauccucugccucgucuucgcccagaagauccccggcaacgacaacuccaccgccacccucugccucggccaccacgccguccccaacggcaccaucgucaagaccaucaccaacgaccgcaucgaggucaccaacgccaccgagcucguccagaacuccuccaucggcgagaucugcgacuccccccaccagauccucgacggcgagaacugcacccucaucgacgcccuccucggcgacccccagugcgacggcuuccagaacaagaagugggaccucuucgucgagcgcuccaaggccuacuccaacugcuaccccuacgacguccccgacuacgccucccuccgcucccucgucgccuccuccggcacccucgaguucaacaacgaguccuucaacuggaccggcgucacccagaacggcaccuccuccgccugcauccgcaaguccuccuccuccuucuucucccgccucaacuggcucacccaccucaaguacaccuaccccgcccucaacgucaccaugcccaacaacgagcaguucgacaagcucuacaucuggggcguccaccaccccggcaccgacaaggaccagaucuuccucuacgcccgcuccuccggccgcaucaccgucuccaccaagcgcucccagcaggccgucauccccaacaucggcuuccgcccccgcauccgcgacauccccucccgcaucuccaucuacuggaccaucgucaagcccggcgacauccuccucaucaacuccaccggcaaccucaucgccccccgcggcuacuucaagauccgcuccggcaaguccuccaucaugcgcuccgacgcccccaucggcaagugcaaguccgagugcaucacccccaacggcuccauccccaacgacaagcccuuccagaacgucaaccgcaucaccuacggcgccugcccccgcuacgucaagcacuccacccucaagcucgccaccggcaugcgcaacguccccgagaagcagacccgcggcaucuucggcgccaucgccggcuucaucgagaacggcugggagggcauggucgacggcugguacggcuuccgccaccagaacuccgagggccgcggccaggccgccgaccucaaguccacccaggccgccaucgaccagaucaacggcaagcucaaccgccucaucggcaagaccaacgagaaguuccaccagaucgagaaggaguucuccgaggucgagggccgcauccaggaccucgagaaguacgucgaggacaccaagaucgaccucugguccuacaacgccgagcuccucgucgcccucgagaaccagcacaccaucgaccucaccgacuccgagaugaacaagcucuucgagaagaccaagaagcagcuccgcgagaacgccgaggacaugggcaacggcugcuucaagaucuaccacaagugcgacaacgccugcaucggcuccauccgcaacggcaccuacgaccacaacgucuaccgcgacgaggcccucaacaaccgcuuccagaucaagggcgucgagcucaaguccggcuacaaggacuggauccucuggaucuccuucgccaucuccugcuuccuccucugcgucgcccuccucggcuucaucaugugggccugccagaagggcaacauccgcugcaacaucugcaucuga

SEQ ID NO: 109302 - RNA, 1701 nt, Artificial Sequence; identical to SEQ ID NO: 109135
  derived and/or modified CDS sequence (opt2) from hemagglutinin__InfluenzaA__ALE31735

SEQ ID NO: 109303 - RNA, 1701 nt, Artificial Sequence; identical to SEQ ID NO: 109034
  derived and/or modified CDS sequence (opt2) from hemagglutinin__InfluenzaA__ALE31736

SEQ ID NO: 109304 - RNA, 1701 nt, Artificial Sequence; identical to SEQ ID NO: 109034
  derived and/or modified CDS sequence (opt2) from hemagglutinin__InfluenzaA__ALE31737

SEQ ID NO: 109305 - RNA, 1701 nt, Artificial Sequence
  derived and/or modified CDS sequence (opt2) from hemagglutinin__InfluenzaA__ALE31738
augaagaccaucaucgcccucuccuacauccucugccucgucuucgcccagaagauccccggcaacgacaacuccaccgccacccucugccucggccaccacgccguccccaacggcaccaucgucaagaccaucaccaacgaccgcaucgaggucaccaacgccaccgagcucguccagaacuccuccaucggcgagaucugcgacuccccccaccagauccucgacggcgagaacugcacccucaucgacgcccuccucggcgacccccagugcgacggcuuccagaacaagaagugggaccucuucgucgagcgcuccaaggccuacuccaacugcuaccccuacgacguccccgacuacgccucccuccgcucccucgucgccuccuccggcacccucgaguucaacaacgaguccuucaacuggaccggcgucacccagaacggcaccuccuccgccugcauccgccgcuccuccuccuccuucuucucccgccucaacuggcucacccaccucaacuacaaguaccccgcccucaacgucaccaugcccaacaacgagcaguucgacaagcucuacaucuggggcguccaccaccccggcaccgacaaggaccagaucuuccucuacgcccaguccuccggccgcaucaccgucuccaccaagggcucccagcaggccgucauccccaacaucggcucccgcccccgcauccgcgacauccccucccgcaucuccaucuacuggaccaucgucaagcccggcgacauccuccucaucaacuccaccggcaaccucaucgccccccgcggcuacuucaagauccgcuccggcaaguccuccaucaugcgcuccgacgcccccaucggcaagugcaaguccgagugcaucacccccaacggcuccauccccaacgacaagcccuuccagaacgucaaccgcaucaccuacggcgccugcccccgcuacgucaagcacuccacccucaagcucgccaccggcaugcgcaacguccccgagaagcagacccgcggcaucuucggcgccaucgccggcuucaucgagaacggcugggagggcauggucgacggcugguacggcuuccgccaccagaacuccgagggccgcggccaggccgccgaccucaaguccacccaggccgccaucgaccagaucaacggcaagcucaaccgccucaucggcaagaccaacgagaaguuccaccagaucgagaaggaguucuccgaggucgagggccgcauccaggaccucgagaaguacgucgaggacaccaagaucgaccucugguccuacaacgccgagcuccucgucgcccucgagaaccagcacaccaucgaccucaccgacuccgagaugaacaagcucuucgagaagaccaagaagcagcuccgcgagaacgccgaggacaugggcaacggcugcuucaagaucuaccacaagugcgacaacgccugcaucggcuccauccgcaacggcaccuacgaccacaacgucuaccgcgacgaggcccucaacaaccgcuuccagaucaagggcgucgagcucaaguccggcuacaaggacuggauccucuggaucuccuucgccaucuccugcuuccuccucugcgucgcccuccucggcuucaucaugugggccugccagaagggcaacauccgcugcaacaucugcaucuga

SEQ ID NO: 109306 - RNA, 1701 nt, Artificial Sequence; identical to SEQ ID NO: 108477
  derived and/or modified CDS sequence (opt2) from hemagglutinin__InfluenzaA__ALE31739

SEQ ID NO: 109307 - RNA, 1701 nt, Artificial Sequence
  derived and/or modified CDS sequence (opt2) from hemagglutinin__InfluenzaA__ALE31741
augaagaccaucaucgcccucuccuacauccucugccucgucuucgcccagaagcuccccgagaacgacaacuccaccgccacccucugccucggccaccacgccguccccaacggcaccaucgucaagaccaucaccuccgaccgcaucgaggucaccaacgccaccgagcucguccagaacuccuccaucuccgagaucugcgacuccccccaccagauccucgacggcaagaacugcacccucaucgacgcccuccucggcgacccccagugcgacggcuuccagaacaagaagugggaccucuucgucgagcgcuccaaggccuacuccaacugcuaccccuacgacguccccgacuacgccucccuccgcucccucgucgccuccuccggcacccucgaguucaacgacgaguccuucaacugggccggcgucacccagaacggcaccuccuccgccugcauccgcggcuccaacuccuccuucuucucccgccucaacuggcucacccacuccaacuucaaguaccccgcccucaacgucaccaugcccaacaacgagcaguucgacaagcucuacaucuggggcguccaccaccccggcaccgacaaggaccagaucuuccucuacgcccaguccuccggccgcaucaccgucuccaccaagcgcucccagcaggccgucauccccaacaucggcucccgcccccgcauccgcaacauccccucccgcaucuccaucuacuggaccaucgucaagcccggcgacauccuccucaucaacuccaccggcaaccucaucgccccccgcggcuacuucaagauccgcuccggcaaguccuccaucaugcgcuccgacgcccccaucggcaagugcaaguccgagugcaucacccccaacggcuccauccccaacgacaagcccuuccagaacgucaaccgcaucaccuacggcgccugcccccgcuacgucaagcaguccacccucaagcucgccaccggcaugcgcaacguccccgagaagcagacccgcggcaucuucggcgccaucgccggcuucaucgagaacggcugggagggcaugaaggacggcugguacggcuuccgccaccagaacuccgagggccgcggccaggccgccgaccucaaguccacccaggccgccaucgaccagaucaacggcaagcucaaccgccucaucggcaagaccaacgagaaguuccaccagaucgagaaggaguucuccgaggucgagggccgcauccaggaccucgagaaguacgucgaggacaccaagaucgaccucugguccuacaacgccgagcuccucgucgcccucgagaaccagcacaccaucgaccucaccgacuccgagaugaacaagcucuucgagaagaccaagaagcagcuccgcgagaacgccgaggacaugggcaacggcugcuucaagaucuaccacaagugcgacaacgccugcaucggcuccauccgcaacggcaccuacgaccacgacgucuaccgcgacgaggcccucaacaaccgcuuccagaucaagggcgucgagcucaaguccggcuacaaggacuggauccucuggaucuccuucgccaucuccugcuuccuccucugcgucgcccuccucggcuucaucaugugggccugccagaagggcaacauccgcugcaacaucugcaucuga

SEQ ID NO: 109308 - RNA, 1701 nt, Artificial Sequence
  derived and/or modified CDS sequence (opt2) from hemagglutinin__InfluenzaA__ALE31742
augaagaccaucaucgcccucuccuacauccucugccucggcuucgcccagaagauccccggcaacgacaacuccaccgccacccucugccucggccaccacgccguccccaacggcaccaucgucaagaccaucaccaacgaccgcaucgaggucaccaacgccaccgagcucguccagaacuccuccaucggcgagaucugcgacuccccccaccagauccucgacggcgagaacugcacccucaucgacgcccuccucggcgacccccagugcgacggcuuccagaacaagaagugggaccucuucgucgagcgcuccaaggccuacuccaacugcuaccccuacgacguccccgacuacgccucccuccgcucccucgucgccuccuccggcacccucgaguucaacaacgaguccuucaacuggaccggcgucacccagaacggcaccuccuccgccugcauccgccgcuccuccuccuccuucuucucccgccucaacuggcucacccaccucaacuacaccuaccccgcccucaacgucaccaugcccaacaacgagcaguucgacaagcucuacaucuggggcguccaccaccccggcaccgacaaggaccagaucuuccucuacgcccaguccuccggccgcaucaccgucuccaccaagcgcucccagcaggccgucauccccaacaucggcucccgcccccgcauccgcgacauccccucccgcaucuccaucuacuggaccaucgucaagcccggcgacauccuccucaucaacuccaccggcaaccucaucgccccccgcggcuacuucaagauccgcuccggcaaguccuccaucaugcgcuccgacgcccccaucggcaagugcaaguccgagugcaucacccccaacggcuccauccccaacgacaagcccuuccagaacgucaaccgcgucaccuacggcgccugcccccgcuacgucaagcacuccacccucaagcucgccaccggcaugcgcaacguccccgagaagcagacccgcggcaucuucggcgccaucgccggcuucaucgagaacggcugggagggcauggucgacggcugguacggcuuccgccaccagaacuccgagggccgcggccaggccgccgaccucaaguccacccaggccgccaucgaccagaucaacggcaagcucaaccgccucaucggcaagaccaacgagaaguuccaccagaucgagaaggaguucuccgaggucgagggccgcauccaggaccucgagaaguacgucgaggacaccaagaucgaccucugguccuacaacgccgagcuccucgucgcccucgagaaccagcacaccaucgaccucaccgacuccgagaugaacaagcucuucgagaagaccaagaagcagcuccgcgagaacgccgaggacaugggcaacggcugcuucaagaucuaccacaagugcgacaacgccugcaucggcuccauccgcaacggcaccuacgaccacaacgucuaccgcgacgaggcccucaacaaccgcuuccagaucaagggcgucgagcucaaguccggcuacaaggacuggauccucuggaucuccuucgccaucuccugcuuccuccucugcgucgcccuccucggcuucaucaugugggccugccagaagggcaacauccgcugcaacaucugcaucuga

SEQ ID NO: 109309 - RNA, 1701 nt, Artificial Sequence; identical to SEQ ID NO: 109034
  derived and/or modified CDS sequence (opt2) from hemagglutinin__InfluenzaA__ALE31743

SEQ ID NO: 109310 - RNA, 1701 nt, Artificial Sequence; identical to SEQ ID NO: 108477
  derived and/or modified CDS sequence (opt2) from hemagglutinin__InfluenzaA__ALE31744

SEQ ID NO: 109311 - RNA, 1701 nt, Artificial Sequence
  derived and/or modified CDS sequence (opt2) from hemagglutinin__InfluenzaA__ALE31745
augaagaccaucaucgcccucuccuacauccucugccucgucuucgcccagaagcuccccggcaacgacaacuccaccgccacccucugccucggccaccacgccguccccaacggcaccaucgucaagaccaucaccaacgaccgcaucgaggucaccaacgccaccgagcucguccagaacuccuccaucggcgagaucugcgacuccccccaccagauccucgacggcaagaacugcacccucaucgacgcccuccucggcgacccccagugcgacggcuuccagaacaagcgcugggaccucuucgucgagcgcuccaaggccuacuccaacugcuaccccuacgacguccccgacuacgccucccuccgcucccucgucgccuccuccggcacccucgaguucaacgacgaguccuucaacugggccggcgucacccagaacggcaccuccuccgccugcauccgcggcuccaacuccuccuucuucucccgccucaacuggcucacccacuccaacuucaaguaccccgcccucaacgucaccaugcccaacaacgagcaguucgacaagcucuacaucuggggcguccaccaccccggcaccgacaaggaccagaucuuccucuacgcccaguccuccggccgcaucaccgucuccaccaagcgcucccagcaggccgucauccccaacaucggcucccgccuccgcauccgcaacauccccucccgcaucuccaucuacuggaccaucgucaagcccggcgacauccuccucaucaacuccaccggcaaccucaucgccccccgcggcuacuucaagauccaguccggcaaguccuccaucaugcgcuccgacgcccccaucggcaagugcaaguccgagugcaucacccccaacggcuccauccccaacgacaagcccuuccagaacgucaacaagaucaccuacggcgccugcccccgcuacgucaagcaguccacccucaagcucgccaccggcaugcgcaacguccccgagaagcagacccgcggcaucuucggcgccaucgccggcuucaucgagaacggcugggagggcaugaaggacggcugguacggcuuccgccaccagaacuccgagggccgcggccaggccgccgaccucaaguccacccaggccgccaucgaccagaucaacggcaagcucaaccgccucaucggcaagaccaacgagaaguuccaccagaucgagaaggaguucuccgaggucgagggccgcauccaggaccucgagaaguacgucgaggacaccaagaucgaccucugguccuacaacgccgagcuccucgucgcccucgagaaccagcacaccaucgaccucaccgacuccgagaugaacaagcucuucgagaagaccaagaagcagcuccgcgagaacgccgaggacaugggcaacggcugcuucaagaucuaccacaagugcgacaacgccugcaucggcuccauccgcaacggcaccuacgaccacgacgucuaccgcgacgaggcccucaacaaccgcuuccagaucaagggcgucgagcucaaguccggcuacaaggacuggauccucuggaucuccuucgccaucuccugcuuccuccucugcgucgcccuccucggcuucaucaugugggccugccagaagggcaacauccgcugcaacaucugcaucuga

SEQ ID NO: 109312 - RNA, 1701 nt, Artificial Sequence
  derived and/or modified CDS sequence (opt2) from hemagglutinin__InfluenzaA__ALE31747
augaagaccaucaucgcccucuccuacauccucugccucgucuucgcccagaagcuccccggcaacgacaacuccaccgccacccucugccucggccaccacgccguccccaacggcaccaucgucaagaccaucaccaacgaccgcaucgaggucaccaacgccaccgagcucguccagaacuccuccaucggcgagaucugcgacuccccccaccagauccucgacggcaagaacugcacccucaucgacgcccuccucggcgacccccagugcgacggcuuccagaacaagcgcugggaccucuucgucgagcgcuccaaggccuacuccaacugcuaccccuacgacguccccgacuacgccucccuccgcucccucgucgccuccuccggcacccucgaguucaacgacgaguccuucaacugggccggcgucacccagaacggcaccuccuccgccugcauccgcggcuccaacuccuccuucuucucccgccucaacuggcucacccacuccaacuucaaguaccccgcccucaacgucaccaugcccaacaacgagcaguucgacaagcucuacaucuggggcguccaccaccccggcaccgacaaggaccagaucuuccucuacgcccaguccuccggccgcaucaccgucuccaccaagcgcucccagcaggccgucauccccaacaucggcucccgcccccgcauccgcaacauccccucccgcaucuccaucuacuggaccaucgucaagcccggcgacauccuccucaucaacuccaccggcaaccucaucgccccccgcggcuacuucaagauccaguccggcaaguccuccaucaugcgcuccgacgcccccaucggcaagugcaaguccgagugcaucacccccaacggcuccauccccaacgacaagcccuuccagaacgucaaccgcaucaccuacggcgccugcccccgcuacgucaagcaguccacccucaagcucgccaccggcaugcgcaacguccccgagaagcagacccgcggcaucuucggcgccaucgccggcuucaucgagaacggcugggagggcaugaaggacggcugguacggcuuccgccaccagaacuccgagggccgcggccaggccgccgaccucaaguccacccaggccgccaucgaccagaucaacggcaagcucaaccgccucaucggcaagaccaacgagaaguuccaccagaucgagaaggaguucuccgaggucgagggccgcguccaggaccucgagaaguacgucgaggacaccaagaucgaccucugguccuacaacgccgagcuccucgucgcccucgagaaccagcacaccaucgaccucaccgacuccgagaugaacaagcucuucgagaagaccaagaagcagcuccgcgagaacgccgaggacaugggcaacggcugcuucaagaucuaccacaagugcgacaacgccugcaucggcuccauccgcaacggcaccuacgaccacgacgucuaccgcgacgaggcccucaacaaccgcuuccagaucaagggcgucgagcucaaguccggcuacaaggacuggauccucuggaucuccuucgccaucuccugcuuccuccucugcgucgcccuccucggcuucaucaugugggccugccagaagggcaacauccgcugcaacaucugcaucuga

SEQ ID NO: 109313 - RNA, 1701 nt, Artificial Sequence; identical to SEQ ID NO: 109034
  derived and/or modified CDS sequence (opt2) from hemagglutinin__InfluenzaA__ALE31748

SEQ ID NO: 109314 - RNA, 1701 nt, Artificial Sequence; identical to SEQ ID NO: 108477
  derived and/or modified CDS sequence (opt2) from hemagglutinin__InfluenzaA__ALE31749

SEQ ID NO: 109315 - RNA, 1701 nt, Artificial Sequence; identical to SEQ ID NO: 109021
  derived and/or modified CDS sequence (opt2) from hemagglutinin__InfluenzaA__ALE31750

SEQ ID NO: 109316 - RNA, 1701 nt, Artificial Sequence
  derived and/or modified CDS sequence (opt2) from hemagglutinin__InfluenzaA__ALE31751
augaagaccaucaucgcccucuccuacauccucugccucgucuucgcccagaagauccccggcaacgacaacuccaccgccacccucugccucggccaccacgccguccccaacggcaccaucgucaagaccaucaccaacgaccgcaucgaggucaccaacgccaccgagcucguccagaacuccuccaucggcgagaucugcgacuccccccaccagauccucgacggcgagaacugcacccucaucgacgcccuccucggcgacccccagugcgacggcuuccagaacaagaagugggaccucuucgucgagcgcuccaaggccuacuccaacugcuaccccuacgacguccccgacuacgccucccuccgcucccucgucgccuccuccggcacccucgaguucaacaacgaguccuucaacuggaccggcgucacccagaacggcaccuccuccgccugcauccgccgcuccuccuccuccuucuucucccgccucaacuggcucacccaccucgacuacaccuaccccgcccucaacgucaccaugcccaacaacgagcaguucgacaagcucuacaucuggggcguccaccaccccggcaccgacaaggaccagaucuuccucuacgcccaguccuccggccgcaucaccgucuccaccaagcgcucccagcaggccgucauccccaacaucggcucccgcccccgcauccgcgacauccccucccgcaucuccaucuacuggaccaucgucaagcccggcgacauccuccucaucaacuccaccggcaaccucaucgccccccgcggcuacuucaagauccgcuccggcaaguccuccaucaugcgcuccgacgcccccaucggcaagugcaaguccgagugcaucacccccaacggcuccauccccaacgacaagcccuuccagaacgucaaccgcaucaccuacggcgccugcccccgcuacgucaagcacuccacccucaagcucgccaccggcaugcgcaacguccccgagaagcagacccgcggcaucuucggcgccaucgccggcuucaucgagaacggcugggagggcauggucgacggcugguacggcuuccgccaccagaacuccgagggccgcggccaggccgccgaccucaaguccacccaggccgccaucgaccagaucaacggcaagcucaaccgccucaucggcaagaccaacgagaaguuccaccagaucgagaaggaguucuccgaggucgagggccgcauccaggaccucgagaaguacgucgaggacaccaagaucgaccucugguccuacaacgccgagcuccucgucgcccucgagaaccagcacaccaucgaccucaccgacuccgagaugaacaagcucuucgagaagaccaagaagcagcuccgcgagaacgccgaggacaugggcaacggcugcuucaagaucuaccacaagugcgacaacgccugcaucggcuccauccgcaacggcaccuacgaccacaacgucuaccgcgacgaggcccucaacaaccgcuuccagaucaagggcgucgagcucaaguccggcuacaaggacuggauccucuggaucuccuucgccaucuccugcuuccuccucugcgucgcccuccucggcuucaucaugugggccugccagaagggcaacauccgcugcaacaucugcaucuga

SEQ ID NO: 109317 - RNA, 1701 nt, Artificial Sequence; identical to SEQ ID NO: 108477
  derived and/or modified CDS sequence (opt2) from hemagglutinin__InfluenzaA__ALE31752

SEQ ID NO: 109318 - RNA, 1701 nt, Artificial Sequence; identical to SEQ ID NO: 109021
  derived and/or modified CDS sequence (opt2) from hemagglutinin__InfluenzaA__ALE31753

SEQ ID NO: 109319 - RNA, 1701 nt, Artificial Sequence; identical to SEQ ID NO: 108477
  derived and/or modified CDS sequence (opt2) from hemagglutinin__InfluenzaA__ALE31754

SEQ ID NO: 109320 - RNA, 1701 nt, Artificial Sequence
  derived and/or modified CDS sequence (opt2) from hemagglutinin__InfluenzaA__ALE31755
augaagaccaucaucgcccucuccuacauccucugccucgucuucgcccagaagcuccccgagaacgacaacuccaccgccacccucugccucggccaccacgccguccccaacggcaccaucgucaagaccaucaccuccgaccagaucgaggucaccaacgccaccgagcucguccagaacuccuccaucggcgagaucugcgacuccccccaccagauccucgacggcaagaacugcacccucaucgacgcccuccucggcgacccccagugcgacggcuuccagaacaagaagugggaccucuucgucgagcgcuccaaggccuacuccaacugcuaccccuacgacguccccgacuacgccucccuccgcucccucgucgccuccuccggcacccucgaguucaacgacgaguccuucaacugggccggcgucacccagaacggcaccuccuccgccugcauccgcggcuccaacuccuccuucuucucccgccucaacuggcucacccacuccaacuucaaguaccccgcccucaacgucaccaugcccaacaacgagcaguucgacaagcucuacaucuggggcguccaccaccccggcaccgacaaggaccagaucuuccucuacgcccaguccuccggccgcaucaccgucuccaccaagcgcucccagcaggccgucauccccaacaucggcucccgcccccgcauccgcaacauccccucccgcaucuccaucuacuggaccaucgucaagcccggcgacauccuccucaucaacuccaccggcaaccucaucgccccccgcggcuacuucaagauccgcuccggcaaguccuccaucaugcgcuccgacgcccccaucggcaagugcaaguccgagugcaucacccccaacggcuccauccccaacgacaagcccuuccagaacgucaaccgcaucaccuacggcgccugcccccgcuacgucaagcaguccacccucaagcucgccaccggcaugcgcaacguccccgagaagcagacccgcggcaucuucggcgccaucgccggcuucaucgagaacggcugggagggcaugaaggacggcugguacggcuuccgccaccagaacuccgagggccgcggccaggccgccgaccucaaguccacccaggccgccaucgaccagaucaacggcaagcucaaccgccucaucggcaagaccaacgagaaguuccaccagaucgagaaggaguucuccgaggucgagggccgcauccaggaccucgagaaguacgucgaggacaccaagaucgaccucugguccuacaacgccgagcuccucgucgcccucgagaaccagcacaccaucgaccucaccgacuccgagaugaacaagcucuucgagaagaccaagaagcagcuccgcgagaacgccgaggacaugggcaacggcugcuucaagaucuaccacaagugcgacaacgccugcaucggcuccauccgcaacggcaccuacgaccacaacgucuaccgcgacgaggcccucaacaaccgcuuccagaucaagggcgucgagcucaaguccggcuacaaggacuggauccucuggaucuccuucgccaucuccugcuuccuccucugcgucgcccuccucggcuucaucaugugggccugccagaagggcaacauccgcugcaacaucugcaucuga

SEQ ID NO: 109321 - RNA, 1701 nt, Artificial Sequence; identical to SEQ ID NO: 109021
  derived and/or modified CDS sequence (opt2) from hemagglutinin__InfluenzaA__ALE31756

SEQ ID NO: 109322 - RNA, 1701 nt, Artificial Sequence; identical to SEQ ID NO: 108477
  derived and/or modified CDS sequence (opt2) from hemagglutinin__InfluenzaA__ALE31757

SEQ ID NO: 109323 - RNA, 1701 nt, Artificial Sequence
  derived and/or modified CDS sequence (opt2) from hemagglutinin__InfluenzaA__ALE31758
augaagaccaucaucgcccucuccuacauccucugccucgucuucgcccagaagauccccggcaacgacaacuccaccgccacccucugccucggccaccacgccguccccaacggcaccaucgucaagaccaucaccaacgaccgcaucgaggucaccaacgccaccgagcucguccagaacuccuccaucggcgagaucugcgacuccccccaccagauccucgacggcgagaacugcacccucaucgacgcccuccucggcgacccccagugcgacggcuuccagaacaagaagugggaccucuucgucgagcgcuccaaggccuacuccaacugcuaccccuacgacguccccgacuacgccucccuccgcucccucgucgccuccuccggcacccucgaguucaacaacgaguccuucaacuggaccggcgucacccagaacggcaccuccuccgccugcauccgccgcuccuccuccuccuucuucucccgccucaacuggcucacccaccucaacuacaccuaccccgcccucaacgucaccaugcccaacaacgagcaguucgacaagcucuacaucuggggcguccaccaccccggcaccgacaaggaccagaucuuccucuacgcccaguccuccggccgcaucaccgucuccaccaagcgcucccagcaggccgucauccccaacaucggcucccgcccccgcauccgcgacauccccucccgcaucuccaucuacuggaccaucgucaagcccggcgacauccuccucaucaacuccaccggcaaccucgucgccccccgcggcuacuucaagauccgcuccggcaaguccuccaucaugcgcuccgacgcccccaucggcaagugcaaguccgagugcaucacccccaacggcuccauccccaacgacaagcccuuccagaacgucaaccgcaucaccuacggcgccugcccccgcuacgucaagcacuccacccucaagcucgccaccggcaugcgcaacguccccgagaagcagacccgcggcaucuucggcgccaucgccggcuucaucgagaacggcugggagggcauggucgacggcugguacggcuuccgccaccagaacuccgagggccgcggccaggccgccgaccucaaguccacccaggccgccaucgaccagaucaacggcaagcucaaccgccucaucggcaagaccaacgagaaguuccaccagaucgagaaggaguucuccgaggucgagggccgcauccaggaccucgagaaguacgucgaggacaccaagaucgaccucugguccuacaacgccgagcuccucgucgcccucgagaaccagcacaccaucgaccucaccgacuccgagaugaacaagcucuucgagaagaccaagaagcagcuccgcgagaacgccgaggacaugggcaacggcugcuucaagaucuaccacaagugcgacaacgccugcaucggcuccauccgcaacggcaccuacgaccacaacgucuaccgcgacgaggcccucaacaaccgcuuccagaucaagggcgucgagcucaaguccggcuacaaggacuggauccucuggaucuccuucgccaucuccugcuuccuccucugcgucgcccuccucggcuucaucaugugggccugccagaagggcaacauccgcugcaacaucugcaucuga

SEQ ID NO: 109324 - RNA, 1701 nt, Artificial Sequence
  derived and/or modified CDS sequence (opt2) from hemagglutinin__InfluenzaA__ALE31759
augaagaccaucaucgcccucuccuacauccucugccucgucuucgcccagaagcuccccggcaacgacaacuccaccgccacccucugccucggccaccacgccguccccaacggcaccaucgucaagaccaucaccaacgaccgcaucgaggucaccaacgccaccgagcucguccagaacuccuccaucggcgagaucugcgacuccccccaccagauccucgacggcaagaacugcacccucaucgacgcccuccucggcgacccccagugcgacggcuuccagaacaagcgcugggaccucuucgucgagcgcuccaaggccuacuccaacugcuaccccuacgacguccccgacuacgccucccuccgcucccucgucgccuccuccggcacccucgaguucaacgacgaguccuucaacugggccggcgucacccagaacggcaccuccuccgccugcauccgcggcuccaacuccuccuucuucucccgccucaacuggcucacccacuccaacuucaaguaccccgcccucaacgucaccaugcccaacaacgagcaguucgacaagcucuacaucuggggcguccaccaccccggcaccgacaaggaccagaucuuccucuacgcccaguccuccggccgcgucaccgucuccaccaagcgcucccagcaggccgucauccccaacaucggcucccgcccccgcauccgcaacauccccucccgcaucuccaucuacuggaccaucgucaagcccggcgacauccuccucaucaacuccaccggcaaccucaucgccccccgcggcuacuucaagauccaguccggcaaguccuccaucaugcgcuccgacgcccccaucggcaagugcaaguccgagugcaucacccccaacggcuccauccccaacaacaagcccuuccagaacgucaaccgcaucaccuacggcgccugcccccgcuacgucaagcaguccacccucaagcucgccaccggcaugcgcaacguccccgagaagcagacccgcggcaucuucggcgccaucgccggcuucaucgagaacggcugggagggcaugaaggacggcugguacggcuuccgccaccagaacuccgagggccgcggccaggccgccgaccucaaguccacccaggccgccaucgaccagaucaacggcaagcucaaccgccucaucggcaagaccaacgagaaguuccaccagaucgagaaggaguucuccgaggucgagggccgcauccaggaccucgagaaguacgucgaggacaccaagaucgaccucugguccuacaacgccgagcuccucgucgcccucgagaaccagcacaccaucgaccucaccgacuccgagaugaacaagcucuucgagaagaccaagaagcagcuccgcgagaacgccgaggacaugggcaacggcugcuucaagaucuaccacaagugcgacaacgccugcaucggcuccauccgcaacggcaccuacgaccacgacgucuaccgcgacgaggcccucaacaaccgcuuccagaucaagggcgucgagcucaaguccggcuacaaggacuggauccucuggaucuccuucgccaucuccugcuuccuccucugcgucgcccuccucggcuucaucaugugggccugccagaagggcaacauccgcugcaacaucugcaucuga

SEQ ID NO: 109325 - RNA, 1701 nt, Artificial Sequence
  derived and/or modified CDS sequence (opt2) from hemagglutinin__InfluenzaA__ALE31760
augaagaccaucaucgcccucuccuacauccucugccucgucuucgcccagaagauccccggcaacgacaacuccaccgccacccucugccucggccaccacgccguccccaacggcaccaucgucaagaccaucaccaacgaccgcaucgaggucaccaacgccaccgagcucguccagaacuccuccaucggcgagaucugcgacuccccccaccagauccucgacggcgagaacugcacccucaucgacgcccuccucggcgacccccagugcgacggcuuccagaacaagaagugggaccucuucgucgagcgcuccaaggccuacuccaacugcuaccccuacgacguccccgacuacgccucccuccgcucccucgucgccuccuccggcacccucgaguucaacaacgaguccuucaacuggaccggcgucacccagaacggcaccuccuccgccugcauccgccgcuccuccuccuccuucuucucccgccucaacuggcucacccaccucaacuacaccuaccccgcccucaacgucaccaugcccaacaacgagcaguucgacaagcucuacaucuggggcguccaccaccccggcaccgacaaggaccagaucuuccucuacgcccaguccuccggccgcaucaccgucuccaccaagcgcucccagcaggccgucauccccaacaucggcuaccgcccccgcauccgcgacauccccucccgcaucuccaucuacuggaccaucgucaagcccggcgacauccuccucaucaacuccaccggcaaccucaucgccccccgcggcuacuucaagauccgcuccggcaaguccuccaucaugcgcuccgacgcccccaucggcaagugcaaguccgagugcaucacccccaacggcuccauccccaacgacaagcccuuccagaacgucaaccgcaucaccuacggcgccugcccccgcuacgucaagcacuccacccucaagcucgccaccggcaugcgcaacguccccgagaagcagacccgcggcaucuucggcgccaucgccggcuucaucgagaacggcugggagggcauggucgacggcugguacggcuuccgccaccagaacuccgagggccgcggccaggccgccgaccucaaguccacccaggccgccaucgaccagaucaacggcaagcucaaccgccucaucggcaagaccaacgagaaguuccaccagaucgagaaggaguucuccgaggucgagggccgcauccaggaccucgagaaguacgucgaggacgccaagaucgaccucugguccuacaacgccgagcuccucgucgcccucgagaaccagcacaccaucgaccucaccgacuccgagaugaacaagcucuucgagaagaccaagaagcagcuccgcgagaacgccgaggacaugggcaacggcugcuucaagaucuaccacaagugcgacaacgccugcaucggcuccauccgcaacggcaccuacgaccacaacgucuaccgcgacgaggcccucaacaaccgcuuccagaucaagggcgucgagcucaaguccggcuacaaggacuggauccucuggaucuccuucgccaucuccugcuuccuccucugcgucgcccuccucggcuucaucaugugggccugccagaagggcaacauccgcugcaacaucugcaucuga

SEQ ID NO: 109326 - RNA, 1701 nt, Artificial Sequence; identical to SEQ ID NO: 109021
  derived and/or modified CDS sequence (opt2) from hemagglutinin__InfluenzaA__ALE31761

SEQ ID NO: 109327 - RNA, 1701 nt, Artificial Sequence; identical to SEQ ID NO: 108477
  derived and/or modified CDS sequence (opt2) from hemagglutinin__InfluenzaA__ALE31762

SEQ ID NO: 109328 - RNA, 1701 nt, Artificial Sequence; identical to SEQ ID NO: 109083
  derived and/or modified CDS sequence (opt2) from hemagglutinin__InfluenzaA__ALE31763

SEQ ID NO: 109329 - RNA, 1701 nt, Artificial Sequence; identical to SEQ ID NO: 109135
  derived and/or modified CDS sequence (opt2) from hemagglutinin__InfluenzaA__ALE31764

SEQ ID NO: 109330 - RNA, 1701 nt, Artificial Sequence; identical to SEQ ID NO: 108477
  derived and/or modified CDS sequence (opt2) from hemagglutinin__InfluenzaA__ALE31765

SEQ ID NO: 109331 - RNA, 1701 nt, Artificial Sequence
  derived and/or modified CDS sequence (opt2) from hemagglutinin__InfluenzaA__ALE31774
augaagaccaucaucgcccucuccuacauccucugccucgucuucgcccagaagauccccggcaacgacaacuccaccgccacccucugccucggccaccacgccguccccaacggcaccaucgucaagaccaucaccaacgaccgcaucgaggucaccaacgccaccgagcucguccagaacuccuccaucggcgagaucugcgacuccccccaccagauccucgacggcgagaacugcacccucaucgacgcccuccucggcgacccccagugcgacggcuuccagaacaagaagugggaccucuucgucgagcgcuccaaggccuacuccaacugcuaccccuacgacguccccgacuacgccucccuccgcucccucgucgccuccuccggcacccucgaguucaacaacgaguccuucaacuggaccggcgucacccagaacggcaccuccuccgccugcauccgccgcuccuccuccuccuucuucucccgccucaacuggcucacccaccucaacuacaccuaccccgcccucaacgucaccaugcccaacaacgagcaguucgacaagcucuacaucuggggcguccaccaccccggcaccgacaaggaccaggucuuccucuacgcccaguccuccggccgcaucaccgucuccaccaagcgcucccagcaggccgucauccccaacaucggcucccgcccccgcauccgcgacauccccucccgcaucuccaucuacuggaccaucgucaagcccggcgacauccuccucaucaacuccaccggcaaccucaucgccccccgcggcuacuucaagauccgcuccggcaaguccuccaucaugcgcuccgacgcccccaucggcaagugcaaguccgagugcaucacccccaacggcuccauccccaacgacaagcccuuccagaacgucaaccgcaucaccuacggcgccugcccccgcuacgucaagcacuccacccucaagcucgccaccggcaugcgcaacguccccgagaagcagacccgcggcaucuucggcgccaucgccggcuucaucgagaacggcugggagggcauggucgacggcugguacggcuuccgccaccagaacuccgagggccgcggccaggccgccgaccucaaguccacccaggccgccaucgaccagaucaacggcaagcucaaccgccucaucggcaagaccaacgagaaguuccaccagaucgagaaggaguucuccgaggucgagggccgcauccaggaccucgagaaguacgucgaggacaccaagaucgaccucugguccuacaacgccgagcuccucgucgcccucgagaaccagcacaccaucgaccucaccgacuccgagaugaacaagcucuucgagaagaccaagaagcagcuccgcgagaacgccgaggacaugggcaacggcugcuucaagaucuaccacaagugcgacaacgccugcaucggcuccauccgcaacggcaccuacgaccacaacgucuaccgcgacgaggcccucaacaaccgcuuccagaucaagggcgucgagcucaaguccggcuacaaggacuggauccucuggaucuccuucgccaucuccugcuuccuccucugcgucgcccuccucggcuucaucaugugggccugccagaagggcaacauccgcugcaacaucugcaucuga

SEQ ID NO: 109332 - RNA, 1701 nt, Artificial Sequence
  derived and/or modified CDS sequence (opt2) from hemagglutinin__InfluenzaA__ALE31775
augaagaccaucaucgcccucuccuacauccucugccucgucuucgcccagaagauccccggcaacgacaacuccaccgccacccucugccucggccaccacgccguccccaacggcaccaucgucaagaccaucaccaacgaccgcaucgaggucaccaacgccaccgagcucguccagaacuccuccaucggcgagaucugcgacuccccccaccagauccucgacggcgagaacugcacccucaucgacgcccuccucggcgacccccagugcgacggcuuccagaacaagaagugggaccucuucgucgagcgcuccaaggccuacuccaacugcuaccccuacgacguccccgacuacgccucccuccgcucccucgucgccuccuccggcacccucgaguucaacaacgaguccuucaacuggaccggcgucacccagaacggcaccuccuccgccugcauccgcaaguccuccuccuccuucuucucccgccucaacuggcucacccaccucaacuacaccuaccccgcccucaacgucaccaugcccaacaacgagcaguucgacaagcucuacaucuggggcguccaccaccccggcaccgacaaggaccagaucuuccucuacgcccgcuccuccggccgcaucaccgucuccaccaagcgcucccagcaggccgucauccccaacaucggcucccgcccccgcauccgcgacauccccucccgcaucuccaucuacuggaccaucgucaagcccggcgacauccuccucaucaacuccaccggcaaccucaucgccccccgcggcuacuucaagauccgcuccggcaaguccuccaucaugcgcuccgacgcccccaucggcaagugcaaguccgagugcaucacccccaacggcuccauccccaacgacaagcccuuccagaacgucaaccgcaucaccuacggcgccugcccccgcuacgucaagcacuccacccucaagcucgccaccggcaugcgcaacguccccgagaagcagacccgcggcaucuucggcgccaucgccggcuucaucgagaacggcugggagggcauggucgacggcugguacggcuuccgccaccagaacuccgagggccgcggccaggccgccgaccucaaguccacccaggccgccaucgaccagaucaacggcaagcucaaccgccucaucggcaagaccaacgagaaguuccaccagaucgagaaggaguucuccgaggucgagggccgcauccaggaccucgagaaguacgucgaggacaccaagaucgaccucugguccuacaacgccgaguuccucgucgcccucgagaaccagcacaccaucgaccucaccgacuccgagaugaacaagcucuucgagaagaccaagaagcagcuccgcgagaacgccgaggacaugggcaacggcugcuucaagaucuaccacaagugcgacaacgccugcaucggcuccauccgcaacggcaccuacgaccacaacgucuaccgcgacgaggcccucaacaaccgcuuccagaucaagggcgucgagcucaaguccggcuacaaggacuggauccucuggaucuccuucgccaucuccugcuuccuccucugcgucgcccuccucggcuucaucaugugggccugccagaagggcaacauccgcugcaacaucugcaucuga

SEQ ID NO: 109333 - RNA, 1701 nt, Artificial Sequence
  derived and/or modified CDS sequence (opt2) from hemagglutinin__InfluenzaA__ALE31776
augaagaccaucaucgcccucuccuacauccucugccucgucuucgcccagaagcuccccgagaacgacaacuccaccgccacccucugccucggccaccacgccguccccaacggcaccaucgucaagaccaucaccuccgaccgcaucgaggucaccaacgccaccgagcucguccagaacuccuccaucggcgagaucugcgacuccccccaccagauccucgacggcaagaacugcacccucaucgacgcccuccucggcgacccccagugcgacggcuuccagaacaagaagugggaccucuucgucgagcgcuccaaggccuacuccaacugcuaccccuacgacguccccgacuacgccucccuccgcucccucgucgccuccuccggcacccucgaguucaacgacgaguccuucaacugggccggcgucacccagaacggcaccuccuccgccugcauccgcggcuccaacuccuccuucuucucccgccucaacuggcucacccacuccaacuucaaguaccccgcccucaacgucaccaugcccaacaacgagcaguucgacaagcucuacaucuggggcguccaccaccccggcaccgacaaggaccagaucuuccucuacgcccaguccuccggccgcaucaccgucuccaccaagcgcucccagcaggccgucauccccaacaucggcucccgcccccgcauccgcaacauccccucccgcaucuccaucuacuggaccaucgucaagcccggcgacauccuccucaucaacuccaccggcaaccucaucgccccccgcggcuacuucaagauccgcuccggcaaguccuccaucaugcgcuccgacgccuccaucggcaagugcaaguccgagugcaucacccccaacggcuccauccccaacgacaagcccuuccagaacgucaaccgcaucaccuacggcgccugcccccgcuacgucaagcaguccacccucaagcucgccaccggcaugcgcaacguccccgagaagcagacccgcggcaucuucggcgccaucgccggcuucaucgagaacggcugggagggcaugaaggacggcugguacggcuuccgccaccagaacuccgagggccgcggccaggccgccgaccucaaguccacccaggccgccaucgaccagaucaacggcaagcucaaccgccucaucggcaagaccaacgagaaguuccaccagaucgagaaggaguucuccgaggucgagggccgcauccaggaccucgagaaguacgucgaggacaccaagaucgaccucugguccuacaacgccgagcuccucgucgcccucgagaaccagcacaccaucgaccucaccgacuccgagaugaacaagcucuucgagaagaccaagaagcagcuccgcgagaacgccgaggacaugggcaacggcugcuucaagaucuaccacaagugcgacaacgccugcaucggcuccauccgcaacggcaccuacgaccacgacgucuaccgcgacgaggcccucaacaaccgcuuccagaucaagggcgucgagcucaaguccggcuacaaggacuggauccucuggaucuccuucgccaucuccugcuuccuccucugcgucgcccuccucggcuucaucaugugggccugccagaagggcaacauccgcugcaacaucugcaucuga

SEQ ID NO: 109334 - RNA, 1701 nt, Artificial Sequence
  derived and/or modified CDS sequence (opt2) from hemagglutinin__InfluenzaA__ALE31777
augaagaccaucaucgcccucuccuacauccucugccucgucuucgcccagaagauccccggcaacgacaacuccaccgccacccucugccucggccaccacgccguccccaacggcaccaucgucaagaccaucaccaacgaccgcaucgaggucaccaacgccaccgagcucguccagaacuccuccaucggcgagaucugcgacuccccccaccagauccucgacggcgagaacugcacccucaucgacgcccuccucggcgacccccagugcgacggcuuccagaacaagaagugggaccucuucgucgagcgcuccaaggccuacuccaacugcuaccccuacgacguccccgacuacgccucccuccgcucccucgucgccuccuccggcacccucgaguucaacaacgaguccuucaacuggaccggcgucacccagaacggcaccuccuccgccugcauccgccgcuccuccuccuccuucuucucccgccucaacuggcucacccaccucaacuacaccuaccccgcccucaacgucaccaugcccaacaacgagcaguucgacaagcucuacaucuggggcguccaccaccccggcaccgacaaggaccagaucuuccucuacgcccaguccuccggccgcaucaccgucuccaccaagcgcucccagcaggccgucguccccaacaucggcucccgcccccgcauccgcgacauccccucccgcaucuccaucuacuggaccaucgucaagcccggcgacauccuccucaucaacuccaccggcaaccucaucgccccccgcggcuacuucaagauccgcuccggcaaguccuccaucaugcgcuccgacgcccccaucggcaagugcaaguccgagugcaucacccccaacggcuccauccccaacgacaagcccuuccagaacgucaaccgcaucaccuacggcgccugcccccgcuacgucaagcacuccacccucaagcucgccaccggcaugcgcaacguccccgagaagcagacccgcggcaucuucggcgccaucgccggcuucaucgagaacggcugggagggcauggucgacggcugguacggcuuccgccaccagaacuccgagggccgcggccaggccgccgaccucaaguccacccaggccgccaucgaccagaucaacggcaagcucaaccgccucaucggcaagaccaacgagaaguuccaccagaucgagaaggaguucuccgaggucgagggccgcauccaggaccucgagaaguacgucgaggacaccaagaucgaccucugguccuacaacgccgagcuccucgucgcccucgagaaccagcacaccaucgaccucaccgacuccgagaugaacaagcucuucgagaagaccaagaagcagcuccgcgagaacgccgaggacaugggcaacggcugcuucaagaucuaccacaagugcgacaacgccugcaucggcuccauccgcaacggcaccuacgaccacaacgucuaccgcgacgaggcccucaacaaccgcuuccagaucaagggcgucgagcucaaguccggcuacaaggacuggauccucuggaucuccuucgccaucuccugcuuccuccucugcgucgcccuccucggcuucaucaugugggccugccagaagggcaacauccgcugcaacaucugcaucuga

SEQ ID NO: 109335 - RNA, 1701 nt, Artificial Sequence; identical to SEQ ID NO: 109083
  derived and/or modified CDS sequence (opt2) from hemagglutinin__InfluenzaA__ALE31778

SEQ ID NO: 109336 - RNA, 1701 nt, Artificial Sequence; identical to SEQ ID NO: 108477
  derived and/or modified CDS sequence (opt2) from hemagglutinin__InfluenzaA__ALE31779

SEQ ID NO: 109337 - RNA, 1701 nt, Artificial Sequence
  derived and/or modified CDS sequence (opt2) from hemagglutinin__InfluenzaA__ALE31780
augaagaccaucaucgcccucuccuacauccucugccucgucuucgcccagaagauccccggcaacgacaacuccaccgccacccucugccucggccaccacgccguccccaacggcaccaucgucaagaccaucaccaacgaccgcaucgaggucaccaacgccaccgagcucguccagaacuccuccaucggcgagaucugcgacuccccccaccagauccucgacggcgagaacugcacccucaucgacgcccuccucggcgacccccagugcgacggcuuccagaacaagaagugggaccucuucgucgagcgcuccaaggcccacuccaacugcuaccccuacgacguccccgacuacgccucccuccgcucccucgucgccuccuccggcacccucgaguucaacaacgaguccuucaacuggaccggcgucacccagaacggcaccuccuccgccugcauccgccgcuccuccuccuccuucuucucccgccucaacuggcucacccaccucaacuacaccuaccccgcccucaacgucaccaugcccaacaacgagcaguucgacaagcucuacaucuggggcguccaccaccccggcaccgacaaggaccagaucuuccucuacgcccaguccuccggccgcaucaccgucuccaccaagcgcucccagcaggccgucauccccaacaucggcucccgcccccgcauccgcgacauccccucccgcaucuccaucuacuggaccaucgucaagcccggcgacauccuccucaucaacuccaccggcaaccucaucgccccccgcggcuacuucaagauccgcuccggcaaguccuccaucaugcgcaccgacgcccccaucggcaagugcaaguccgagugcaucacccccaacggcuccauccccaacgacaagcccuuccagaacgucaaccgcaucaccuacggcgccugcccccgcuacgucaagcacuccacccucaagcucgccaccggcaugcgcaacguccccgagaagcagacccgcggcaucuucggcgccaucgccggcuucaucgagaacggcugggagggcauggucgacggcugguacggcuuccgccaccagaacuccgagggccgcggccaggccgccgaccucaaguccacccaggccgccaucgaccagaucaacggcaagcucaaccgccucaucggcaagaccaacgagaaguuccaccagaucgagaaggaguucuccgaggucgagggccgcauccaggaccucgagaaguacgucgaggacaccaagaucgaccucugguccuacaacgccgagcuccucgucgcccucgagaaccagcacaccaucgaccucaccgacuccgagaugaacaagcucuucgagaagaccaagaagcagcuccgcgagaacgccgaggacaugggcaacggcugcuucaagaucuaccacaagugcgacaacgccugcaucggcuccauccgcaacggcaccuacgaccacaacgucuaccgcgacgaggcccucaacaaccgcuuccagaucaagggcgucgagcucaaguccggcuacaaggacuggauccucuggaucuccuucgccaucuccugcuuccuccucugcgucgcccuccucggcuucaucaugugggccugccagaagggcaacauccgcugcaacaucugcaucuga

SEQ ID NO: 109338 - RNA, 1701 nt, Artificial Sequence
  derived and/or modified CDS sequence (opt2) from hemagglutinin__InfluenzaA__ALE31781
augaagaccaucaucgcccucuccuacauccucugccucgucuucgcccagaagauccccggcaacgacaacuccaccgccacccucugccucggccaccacgccguccccaacggcaccaucgucaagaccaucaccaacgaccgcaucgaggucaccaacgccaccgagcucguccagaacuccuccaucggcgagaucugcggcuccccccaccagauccucgacggcgagaacugcacccucaucgacgcccuccucggcgacccccagugcgacggcuuccagaacaagaagugggaccucuucgucgagcgcuccaaggccuacuccaacugcuaccccuacgacguccccgacuacgccucccuccgcucccucgucgccuccuccggcacccucgaguucaacaacgaguccuucaacuggaccggcgucacccagaacggcaccuccuccgccugcauccgcaaguccuccuccuccuucuucuccaagcucaacuggcucacccaccucaacuacaccuaccccgcccucaacgucaccaugcccaacaacgagcaguucgacaagcucuacaucuggggcguccaccaccccggcaccgacaaggaccagaucuuccucuacgcccgcuccuccggccgcaucaccgucuccaccaagcgcucccagcaggccgucauccccaacaucggcucccgcccccgcauccgcgacauccccucccgcaucuccaucuacuggaccaucgucaagcccggcgacauccuccucaucaacuccaccggcaaccucaucgccccccgcggcuacuucaagauccgcuccggcaaguccuccaucaugcgcuccgacgcccccaucggcaagugcaaguccgagugcaucacccccaacggcuccauccccaacgacaagcccuuccagaacgucaaccgcaucaccuacggcgccugcccccgcuacgucaagcacuccacccucaagcucgccaccggcaugcgcaacguccccgagaagcagacccgcggcaucuucggcgccaucgccggcuucaucgagaacggcugggagggcauggucgacggcugguacggcuuccgccaccagaacuccgagggccgcggccaggccgccgaccucaaguccacccaggccgccaucgaccagaucaacggcaagcucaaccgccucaucggcaagaccaacgagaaguuccaccagaucgagaaggaguucuccgaggucgagggccgcauccaggaccucgagaaguacgucgaggacaccaagaucgaccucugguccuacaacgccgagcuccucgucgcccucgagaaccagcacaccaucgaccucaccgacuccgagaugaacaagcucuucgagaagaccaagaagcagcuccgcgagaacgccgaggacaugggcaacggcugcuucaagaucuaccacaagugcgacaacgccugcaucggcuccauccgcaacggcaccuacgaccacaacgucuaccgcgacgaggcccucaacaaccgcuuccagaucaagggcgucgagcucaaguccggcuacaaggacuggauccucuggaucuccuucgccaucuccugcuuccuccucugcgucgcccuccucggcuucaucaugugggccugccagaagggcaacauccgcugcaacaucugcaucuga

SEQ ID NO: 109339 - RNA, 1701 nt, Artificial Sequence
  derived and/or modified CDS sequence (opt2) from hemagglutinin__InfluenzaA__ALE31782
augaagaccaucaucgcccucuccuacauccucugccucgucuucgcccagaagauccccggcaacgacaacuccaccgccacccucugccucggccaccacgccguccccaacggcaccaucgucaagaccaucaccaacgaccgcaucgaggucaccaacgccaccgagcucguccagaacuccuccaucggcgagaucugcgacuccccccaccagauccucgacggcgagaacugcacccucaucgacgcccuccucggcgacccccagugcgacggcuuccagaacaagaagugggaccucuucgucgagcgcuccaaggccuacuccaacugcuaccccuacgacguccccgacuacgucucccuccgcucccucgucgccuccuccggcacccucgaguucaacaacgaguccuucaacuggaccggcgucacccagaacggcaccuccuccgccugcauccgccgcuccuccuccuccuucuucucccgccucaacuggcucacccaccucaacuacaccuaccccgcccucaacgucaccaugcccaacaacgagcaguucgacaagcucuacaucuggggcguccaccaccccggcaccgacaaggaccagaucuuccucuacgcccaguccuccggccgcaucaccgucuccaccaagcgcucccagcaggccgucauccccaacaucggcucccgcccccgcauccgcgacauccccucccgcaucuccaucuacuggaccaucgucaagcccggcgacauccuccucaucaacuccaccggcaaccucaucgccccccgcggcuacuucaagauccgcuccggcaaguccuccaucaugcgcuccgacgcccccaucggcaagugcaaguccgagugcaucacccccaacggcuccauccccaacgacaagcccuuccagaacgucaaccgcaucaccuacggcgccugcccccgcuacgucaagcaguccacccucaagcucgccaccggcaugcgcaacguccccgagaagcagacccgcggcaucuucggcgccaucgccggcuucaucgagaacggcugggagggcauggucgacggcugguacggcuuccgccaccagaacuccgagggccgcggccaggccgccgaccucaaguccacccaggccgccaucgaccagaucaacggcaagcucaaccgccucaucggcaagaccaacgagaaguuccaccagaucgagaaggaguucuccgaggucgagggccgcauccaggaccucgagaaguacgucgaggacaccaagaucgaccucugguccuacaacgccgagcuccucgucgcccucgagaaccagcacaccaucgaccucaccgacuccgagaugaacaagcucuucgagaagaccaagaagcagcuccgcgagaacgccgaggacaugggcaacggcugcuucaagaucuaccacaagugcgacaacgccugcaucggcuccauccgcaacggcaccuacgaccacaacgucuaccgcgacgaggcccucaacaaccgcuuccagaucaagggcgucgagcucaaguccggcuacaaggacuggauccucuggaucuccuucgccaucuccugcuuccuccucugcgucgcccuccucggcuucaucaugugggccugccagaagggcaacauccgcugcaacaucugcaucuga

SEQ ID NO: 109340 - RNA, 1701 nt, Artificial Sequence
  derived and/or modified CDS sequence (opt2) from hemagglutinin__InfluenzaA__ALE31783
augaagaccaucaucgcccucuccuacauccucugccucgucuucgcccagaagauccccggcaacgacaacuccaccgccacccucugccucggccaccacgccguccccaacggcaccaucgucaagaccaucaccaacgaccgcaucgaggucaccaacgccaccgagcucguccagaacuccuccaucggcgagaucugcgacuccccccaccagauccucgacggcgagaacugcacccucaucgacgcccuccucggcgacccccagugcgacggcuuccagaacaagaagugggaccucuucgucgagcgcuccaaggccuacuccaacugcuaccccuacgacguccccgacuacgccucccuccgcucccucgucgccuccuccggcacccucgaguucaacaacgaguccuucaacuggaccggcgucacccagaacggcaccuccuccgccugcauccgccgcuccuccuccuccuucuucucccgccucaacuggcucacccaccucaacuacaccuaccccgcccucaacgucaccguccccaacaacgagcaguucgacaagcucuacaucuggggcguccaccaccccggcaccgacaaggaccagaucuuccucuacgcccaguccuccggccgcaucaccgucuccaccaagcgcucccagcaggccgucauccccaacaucggcucccgcccccgcauccgcgacauccccucccgcaucuccaucuacuggaccaucgucaagcccggcgacauccuccucaucaacuccaccggcaaccucaucgccccccgcggcuacuucaagauccgcuccggcaaguccuccaucaugcgcuccgacgcccccaucggcaagugcaaguccgagugcaucacccccaacggcuccauccccaacgacaagcccuuccagaacgucaaccgcaucaccuacggcgccugcccccgcuacgucaagcacuccacccucaagcucgccaccggcaugcgcaacguccccgagaagcagacccgcggcaucuucggcgccaucgccggcuucaucgagaacggcugggagggcauggucgacggcugguacggcuuccgccaccagaacuccgagggccgcggccaggccgccgaccucaaguccacccaggccgccaucgaccagaucaacggcaagcucaaccgccucaucggcaagaccaacgagaaguuccaccagaucgagaaggaguucuccgaggucgagggccgcauccaggaccucgagaaguacgucgaggacaccaagaucgaccucugguccuacaacgccgagcuccucgucgcccucgagaaccagcacaccaucgaccucaccgacuccgagaugaacaagcucuucgagaagaccaagaagcagcuccgcgagaacgccgaggacaugggcaacggcugcuucaagaucuaccacaagugcgacaacgccugcaucggcuccauccgcaacggcaccuacgaccacaacgucuaccgcgacgaggcccucaacaaccgcuuccagaucaagggcgucgagcucaaguccggcuacaaggacuggauccucuggaucuccuucgccaucuccugcuuccuccucugcgucgcccuccucggcuucaucaugugggccugccagaagggcaacauccgcugcaacaucugcaucuga

SEQ ID NO: 109341 - RNA, 1701 nt, Artificial Sequence; identical to SEQ ID NO: 109093
  derived and/or modified CDS sequence (opt2) from hemagglutinin__InfluenzaA__ALE31784

SEQ ID NO: 109342 - RNA, 1701 nt, Artificial Sequence; identical to SEQ ID NO: 108477
  derived and/or modified CDS sequence (opt2) from hemagglutinin__InfluenzaA__ALE31785

SEQ ID NO: 109343 - RNA, 1701 nt, Artificial Sequence; identical to SEQ ID NO: 109083
  derived and/or modified CDS sequence (opt2) from hemagglutinin__InfluenzaA__ALE31786

SEQ ID NO: 109344 - RNA, 1701 nt, Artificial Sequence; identical to SEQ ID NO: 109135
  derived and/or modified CDS sequence (opt2) from hemagglutinin__InfluenzaA__ALE31787

SEQ ID NO: 109345 - RNA, 1701 nt, Artificial Sequence; identical to SEQ ID NO: 108577
  derived and/or modified CDS sequence (opt2) from hemagglutinin__InfluenzaA__ALE31788

SEQ ID NO: 109346 - RNA, 1701 nt, Artificial Sequence; identical to SEQ ID NO: 108477
  derived and/or modified CDS sequence (opt2) from hemagglutinin__InfluenzaA__ALE31789

SEQ ID NO: 109347 - RNA, 1701 nt, Artificial Sequence; identical to SEQ ID NO: 109092
  derived and/or modified CDS sequence (opt2) from hemagglutinin__InfluenzaA__ALE31790

SEQ ID NO: 109348 - RNA, 1701 nt, Artificial Sequence; identical to SEQ ID NO: 109213
  derived and/or modified CDS sequence (opt2) from hemagglutinin__InfluenzaA__ALE31791

SEQ ID NO: 109349 - RNA, 1701 nt, Artificial Sequence; identical to SEQ ID NO: 109113
  derived and/or modified CDS sequence (opt2) from hemagglutinin__InfluenzaA__ALE31792

SEQ ID NO: 109350 - RNA, 1701 nt, Artificial Sequence
  derived and/or modified CDS sequence (opt2) from hemagglutinin__InfluenzaA__ALE31793
augaagaccaucaucgcccucuccuacauccucugccucgucuucgcccagaagauccccggcaacgacaacuccaccgccacccucugccucggccaccacgccguccccaacggcaccaucgucaagaccaucaccaacgaccgcaucgaggucaccaacgccaccgagcucguccagaacuccuccaucggcgagaucugcgacuccccccaccagauccucgacggcgagaacugcacccucaucgacgcccuccucggcgacccccagugcgacggcuuccagaacaagaagugggaccucuucgucgagcgcuccaaggccuacuccaacugcuaccccuacgacguccccgacuacgccucccuccgcucccucgucgccuccuccggcacccucgaguucaacaacgaguccuucaacuggaccggcgucacccagaacggcaccuccuccgccugcauccgccgcuccuccuccuccuucuucucccgccucaacuggcucacccaccucaacuacaccuaccccgcccucaacgucaccaugcccaacaacgagcaguucgacaagcucuacaucuggggcguccaccaccccggcaccgacaaggaccagaucucccucuacgcccaguccuccggccgcaucaccgucuccaccaagcgcucccagcaggccgucauccccaacaucggcucccgcccccgcauccgcgacauccccucccgcaucuccaucuacuggaccaucgucaagcccggcgacauccuccucaucaacuccaccggcaaccucaucgccccccgcggcuacuucaagauccgcuccggcaaguccuccaucaugcgcuccgacgcccccaucggcaagugcaaguccgagugcaucacccccaacggcuccauccccaacgacaagcccuuccagaacgucaaccgcaucaccuacggcgccugcccccgcuacgucaagcacuccacccucaagcucgccaccggcaugcgcaacguccccgagaagcagacccgcggcaucuucggcgccaucgccggcuucaucgagaacggcugggagggcauggucgacggcugguacggcuuccgccaccagaacuccgagggccgcggccaggccgccgaccucaaguccacccaggccgccaucgaccagaucaacggcaagcucaaccgccucaucggcaagaccaacgagaaguuccaccagaucgagaaggaguucuccgaggucgagggccgcauccaggaccucgagaaguacgucgaggacaccaagaucgaccucugguccuacaacgccgagcuccucgucgcccucgagaaccagcacaccaucgaccucaccgacuccgagaugaacaagcucuucgagaagaccaagaagcagcuccgcgagaacgccgaggacaugggcaacggcugcuucaagaucuaccacaagugcgacaacgccugcaucggcuccauccgcaacggcaccuacgaccacaacgucuaccgcgacgaggcccucaacaaccgcuuccagaucaagggcgucgagcucaaguccggcuacaaggacuggauccucuggaucuccuucgccaucuccugcuuccuccucugcgucgcccuccucggcuucaucaugugggccugccagaagggcaacauccgcugcaacaucugcaucuga

SEQ ID NO: 109351 - RNA, 1701 nt, Artificial Sequence; identical to SEQ ID NO: 108477
  derived and/or modified CDS sequence (opt2) from hemagglutinin__InfluenzaA__ALE31794

SEQ ID NO: 109352 - RNA, 1701 nt, Artificial Sequence; identical to SEQ ID NO: 108477
  derived and/or modified CDS sequence (opt2) from hemagglutinin__InfluenzaA__ALE31795

SEQ ID NO: 109353 - RNA, 1701 nt, Artificial Sequence; identical to SEQ ID NO: 108477
  derived and/or modified CDS sequence (opt2) from hemagglutinin__InfluenzaA__ALE31796

SEQ ID NO: 109354 - RNA, 1701 nt, Artificial Sequence; identical to SEQ ID NO: 109135
  derived and/or modified CDS sequence (opt2) from hemagglutinin__InfluenzaA__ALE31797

SEQ ID NO: 109355 - RNA, 1701 nt, Artificial Sequence; identical to SEQ ID NO: 109135
  derived and/or modified CDS sequence (opt2) from hemagglutinin__InfluenzaA__ALE31798

SEQ ID NO: 109356 - RNA, 1701 nt, Artificial Sequence; identical to SEQ ID NO: 108477
  derived and/or modified CDS sequence (opt2) from hemagglutinin__InfluenzaA__ALE31799

SEQ ID NO: 109357 - RNA, 1701 nt, Artificial Sequence; identical to SEQ ID NO: 109083
  derived and/or modified CDS sequence (opt2) from hemagglutinin__InfluenzaA__ALE31800

SEQ ID NO: 109358 - RNA, 1701 nt, Artificial Sequence; identical to SEQ ID NO: 108477
  derived and/or modified CDS sequence (opt2) from hemagglutinin__InfluenzaA__ALE31801

SEQ ID NO: 109359 - RNA, 1701 nt, Artificial Sequence; identical to SEQ ID NO: 108477
  derived and/or modified CDS sequence (opt2) from hemagglutinin__InfluenzaA__ALE31802

SEQ ID NO: 109360 - RNA, 1701 nt, Artificial Sequence; identical to SEQ ID NO: 109083
  derived and/or modified CDS sequence (opt2) from hemagglutinin__InfluenzaA__ALE31803

SEQ ID NO: 109361 - RNA, 1701 nt, Artificial Sequence; identical to SEQ ID NO: 109034
  derived and/or modified CDS sequence (opt2) from hemagglutinin__InfluenzaA__ALE31805

SEQ ID NO: 109362 - RNA, 1701 nt, Artificial Sequence
  derived and/or modified CDS sequence (opt2) from hemagglutinin__InfluenzaA__ALE31806
augaagaccaucaucgcccucuccuacauccucugccucgucuucgcccagaagauccccggcaacgacaacuccaccgccacccucugccucggccaccacgccguccccaacggcaccaucgucaagaccaucaccaacgaccgcaucgaggucaccaacgccaccgagcucguccagaacuccuccaucggcgagaucugcgacuccccccaccagauccucgacggcgagaacugcacccucaucgacgcccuccucggcgacccccagugcgacggcuuccagaacaagaagugggaccucuucgucgagcgcuccaaggccuacuccaacugcuaccccuacgacguccccgacuacgccucccuccgcucccucgucgccuccuccggcacccucgaguucaacaacgaguccuucaacuggaccggcgucacccagaacggcaccuccuccgccugcauccgccgcuccuccuccuccuucuucucccgccucaacuggcucacccaccucaacuacaccuaccccgcccucaacgucaccaugcccaacaacgagcaguucgacaagcucuacaucuggggcguccaccaccccggcaccgacaaggaccagaucuuccucuacgcccaguccuccggccgcaucaccgucuccaccaagcgcucccagcaggccgucauccccaacaucggcucccgcccccgcauccgcgacauccccucccgcaucuccaucuacuggaccaucgucaagcccggcgacacccuccucaucaacuccaccggcaaccucaucgccccccgcggcuacuucaagauccgcuccggcaaguccuccaucaugcgcuccgacgcccccaucggcaagugcaaguccgagugcaucacccccaacggcuccauccccaacgacaagcccuuccagaacgucaaccgcaucaccuacggcgccugcccccgcuacgucaagcacuccacccucaagcucgccaccggcaugcgcaacguccccgagaagcagacccgcggcaucuucggcgccaucgccggcuucaucgagaacggcugggagggcauggucgacggcugguacggcuuccgccaccagaacuccgagggccgcggccaggccgccgaccucaaguccacccaggccgccaucgaccagaucaacggcaagcucaaccgccucaucggcaagaccaacgagaaguuccaccagaucgagaaggaguucuccgaggucgagggccgcauccaggaccucgagaaguacgucgaggacaccaagaucgaccucugguccuacaacgccgagcuccucgucgcccucgagaaccagcacaccaucgaccucaccgacuccgagaugaacaagcucuucgagaagaccaagaagcagcuccgcgagaacgccgaggacaugggcaacggcugcuucaagaucuaccacaagugcgacaacgccugcaucggcuccauccgcaacggcaccuacgaccacaacgucuaccgcgacgaggcccucaacaaccgcuuccagaucaagggcgucgagcucaaguccggcuacaaggacuggauccucuggaucuccuucgccaucuccugcuuccuccucugcgucgcccuccucggcuucaucaugugggccugccagaagggcaacauccgcugcaacaucugcaucuga

SEQ ID NO: 109363 - RNA, 1701 nt, Artificial Sequence
  derived and/or modified CDS sequence (opt2) from hemagglutinin__InfluenzaA__ALE31807
augaagaccaucaucgcccucuccuacauccucugccucgucuucgcccagaagcuccccggcaacgacaacuccaccgccacccucugccucggccaccacgccguccccaacggcaccaucgucaagaccaucaccaacgaccgcaucgaggucaccaacgccaccgagcucguccagaacuccuccaucggcgagaucugcgacuccccccaccagauccucgacggcgagaacugcacccucaucgacgcccuccucggcgacccccagugcgacggcuuccagaacaagaagugggaccucuucgucgagcgcuccaaggccuacuccaacugcuaccccuacgacguccccgacuacgccucccuccgcucccucgucgccuccuccggcacccucgaguucaacaacgaguccuucaacuggaccggcgucacccagaacggcaccuccuccgccugcauccgccgcuccuccuccuccuucuucucccgccucaacuggcucacccaccucaacuucaccuaccccgcccucaacgucaccaugcccaacaacgagcaguucgacaagcucuacgucuggggcguccaccaccccggcaccgacaaggaccagaucuuccucuacgcccaguccuccggccgcaucaccgucuccaccaagcgcucccagcaggccgucauccccaacaucggcucccgcccccgcauccgcaacauccccucccgcaucuccaucuacuggaccaucgucaagcccggcgacauccuccucaucaacuccaccggcaaccucaucgccccccgcggcuacuucaagauccgcuccggcaaguccuccaucaugcgcuccgacgcccccaucggcaagugcaaguccgagugcaucacccccaacggcuccauccccaacgacaagcccuuccagaacgucaaccgcaucaccuacggcgccugcccccgcuacgucaagcacuccacccucaagcucgccaccggcaugcgcaacguccccgagaagcagacccgcggcaucuucggcgccaucgccggcuucaucgagaacggcugggagggcauggucgacggcugguacggcuuccgccaccagaacuccgagggccgcggccaggccgccgaccucaaguccacccaggccgccaucgaccagaucaacggcaagcucaaccgccucaucggcaagaccaacgagaaguuccaccagaucgagaaggaguucuccgaggucgagggccgcauccaggaccucgagaaguacgucgaggacaccaagaucgaccucugguccuacaacgccgagcuccucgucgcccucgagaaccagcacaccaucgaccucaccgacuccgagaugaacaagcucuucgagaagaccaagaagcagcuccgcgagaacgccgaggacaugggcaacggcugcuucaagaucuaccacaagugcgacaacgccugcaucggcuccauccgcaacggcaccuacgaccacaacgucuaccgcgacgaggcccucaacaaccgcuuccagaucaagggcgucgagcucaaguccggcuacaaggacuggauccucuggaucuccuucgccaucuccugcuuccuccucugcgucgcccuccucggcuucaucaugugggccugccagaagggcaacauccgcugcaacaucugcaucuga

SEQ ID NO: 109364 - RNA, 1701 nt, Artificial Sequence
  derived and/or modified CDS sequence (opt2) from hemagglutinin__InfluenzaA__ALE31808
augaagaccaucaucgcccucggcuacauccucugccucgucuucgcccagaagauccccggcaacgacaacuccaccgccacccucugccucggccaccacgccguccccaacggcaccaucgucaagaccaucaccaacgaccgcaucgaggucaccaacgccaccgagcucguccagaacuccuccaucggcgagaucugcgacuccccccacaagauccucgacggcgagaacugcacccucaucgacgcccuccucggcgacccccagugcgacggcuuccagaacaagaagugggaccucuucgucgagcgcuccaaggccuacuccaacugcuaccccuacgacguccccgacuacgccucccuccgcucccucgucgccuccuccggcacccucgaguucaacaacgaguccuucaacuggaccggcgucacccagaacggcaccuccuccgccugcauccgccgcuccuccuccuccuucuucucccgccucaacuggcucacccaccucaacuacaccuaccccgcccucaacgucaccaugcccaacaacgagcaguucgacaagcucuacaucuggggcguccaccaccccggcaccgacaaggaccagaucuuccucuacgcccaguccuccggccgcaucaccgucuccaccaagcgcucccagcaggccgucauccccaacaucggcucccgcccccgcauccgcgacauccccucccgcaucuccaucuacuggaccaucgucaagcccggcgacauccuccucaucaacuccaccggcaaccucaucgccccccgcggcuacuucaagauccgcuccggcaaguccuccaucaugcgcuccgacgcccccaucggcaagugcaaguccgagugcaucacccccaacggcuccauccccaacgacaagcccuuccagaacgucaaccgcaucaccuacggcgccugcccccgcuacgucaagcacuccacccucaagcucgccaccggcaugcgcaacguccccgagaagcagacccgcggcaucuucggcgccaucgccggcuucaucgagaacggcugggagggcauggucgacggcugguacggcuuccgccaccagaacuccgagggccgcggccaggccgccgaccucaaguccacccaggccgccaucgaccagaucaacggcaagcucaaccgccucaucggcaagaccaacgagaaguuccaccagaucgagaaggaguucuccgaggucgagggccgcauccaggaccucgagaaguacgucgaggacaccaagaucgaccucugguccuacaacgccgagcuccucgucgcccucgagaaccagcacaccaucgaccucaccgacuccgagaugaacaagcucuucgagaagaccaagaagcagcuccgcgagaacgccgaggacaugggcaacggcugcuucaagaucuaccacaagugcgacaacgccugcaucggcuccauccgcaacggcaccuacgaccacaacgucuaccgcgacgaggcccucaacaaccgcuuccagaucaagggcgucgagcucaaguccggcuacaaggacuggauccucuggaucuccuucgccaucuccugcuuccuccucugcgucgcccuccucggcuucaucaugugggccugccagaagggcaacauccgcugcaacaucugcaucuga

SEQ ID NO: 109365 - RNA, 1701 nt, Artificial Sequence; identical to SEQ ID NO: 108477
  derived and/or modified CDS sequence (opt2) from hemagglutinin__InfluenzaA__ALE31810

SEQ ID NO: 109366 - RNA, 1701 nt, Artificial Sequence; identical to SEQ ID NO: 108477
  derived and/or modified CDS sequence (opt2) from hemagglutinin__InfluenzaA__ALE31812

SEQ ID NO: 109367 - RNA, 1701 nt, Artificial Sequence
  derived and/or modified CDS sequence (opt2) from hemagglutinin__InfluenzaA__ALE31814
augaagaccaucaucgcccucuccuacauccucugccucgucuucgcccagaagcuccccggcaacgacaacuccaccgccacccucugccucggccaccacgccguccccaacggcaccaucgucaagaccaucaccaacgaccgcaucgaggucaccaacgccaccgagcucguccagaacuccuccaucggcgagaucugcgacuccccccaccagauccucgacggcaagaacugcacccucaucgacgcccuccucggcgacccccagugcgacggcuuccagaacaagaagugggaccucuucgucgagcgcuccaaggcccacuccaacugcuaccccuacgacguccccgacuacgccucccuccgcucccucgucgccuccuccggcacccucgaguucaacaacgaguccuucaacugggccggcgucacccagaacggcaccuccuccuccugcauccgcggcuccaacuccuccuucuucucccgccucaacuggcucacccaccucaacuccaaguaccccgcccucaacgucaccaugcccaacaacgagcaguucgacaagcucuacaucuggggcguccaccaccccggcaccgacaaggaccagaucuuccucuacgcccagcccuccggccgcaucaccgucuccaccaagcgcucccagcaggccgucauccccaacaucggcucccgcccccgcauccgcgacauccccucccgcaucuccaucuacuggaccaucgucaagcccggcgacauccuccucaucaacuccaccggcaaccucaucgccccccgcggcuacuucaagauccgcuccggcaaguccuccaucaugcgcuccgacgcccccaucggcaagugcaaguccgagugcaucacccccaacggcuccauccccaacgacaagcccuuccagaacgucaaccgcaucaccuacggcgccugcccccgcuacgucaagcaguccacccucaagcucgccaccggcaugcgcaacguccccgagcgccagacccgcggcaucuucggcgccaucgccggcuucaucgagaacggcugggagggcauggucgacggcugguacggcuuccgccaccagaacuccgagggccgcggccaggccgccgaccucaaguccacccaggccgccaucgaccagaucaacggcaagcucaaccgccucaucggcaagaccaacgagaaguuccaccagaucgagaaggaguucuccgaggucgagggccgcauccaggaccucgagaaguacgucgaggacaccaagaucgaccucugguccuacaacgccgagcuccucgucgcccucgagaaccagcacaccaucgaccucaccgacuccgagaugaacaagcucuucgagaagaccaagaagcagcuccgcgagaacgccgaggacaugggcaacggcugcuucaagaucuaccacaagugcgacaacgccugcaucggcuccauccgcaacggcaccuacgaccacgacgucuaccgcgacgaggcccucaacaaccgcuuccagaucaagggcgucgagcucaaguccggcuacaaggacuggauccucuggaucuccuucgccaucuccugcuuccuccucugcgucgcccuccucggcuucaucaugugggccugccagaagggcaacauccgcugcaacaucugcaucuga

SEQ ID NO: 109368 - RNA, 1701 nt, Artificial Sequence; identical to SEQ ID NO: 109367
  derived and/or modified CDS sequence (opt2) from hemagglutinin__InfluenzaA__ALE31815

SEQ ID NO: 109369 - RNA, 1701 nt, Artificial Sequence; identical to SEQ ID NO: 108477
  derived and/or modified CDS sequence (opt2) from hemagglutinin__InfluenzaA__ALE31818

SEQ ID NO: 109370 - RNA, 1701 nt, Artificial Sequence
  derived and/or modified CDS sequence (opt2) from hemagglutinin__InfluenzaA__ALE31819
augaagaccaucaucgcccucuccuacauccucugccucgucuucgcccagaagauccccggcaacgacaacuccaccgccacccucugccucggccaccacgccguccccaacggcaccaucgucaagaccaucaccaacgaccgcaucgaggucaccaacgccaccgagcucguccagaacuccuccaucggcgagaucugcgacuccccccaccagauccucgacggcgagaacugcacccucaucgacgcccuccucggcgacccccagugcgacggcuuccagaacaagaagugggaccucuucgucgagcgcuccaaggccuacuccaacugcuaccccuacgacguccccgacuacgccucccuccgcucccucgucgccuccuccggcacccucgaguucaacaacgaguccuucaacuggaccggcgucacccagaacggcaccuccuccgccugcauccgcggcuccuccuccuccuucuucucccgccucaacuggcucacccaccucaacuacaccuaccccgcccucaacgucaccaugcccaacaaggagcaguucgacaagcucuacaucuggggcguccaccaccccggcaccgacaaggaccagaucuuccucuacgcccaguccuccggccgcaucaccgucuccaccaagcgcucccagcaggccgucauccccaacaucggcucccgcccccgcauccgcgacauccccucccgcaucuccaucuacuggaccaucgucaagcccggcgacauccuccucaucaacuccaccggcaaccucaucgccccccgcggcuacuucaagauccgcuccggcaaguccuccaucaugcgcuccgacgcccccaucggcaagugcaaguccgagugcaucacccccaacggcuccauccccaacgacaagcccuuccagaacgucaaccgcaucaccuacggcgccugcccccgcuacgucaagcacuccacccucaagcucgccaccggcaugcgcaacguccccgagaagcagacccgcggcaucuucggcgccaucgccggcuucaucgagaacggcugggagggcauggucgacggcugguacggcuuccgccaccagaacuccgagggccgcggccaggccgccgaccucaaguccacccaggccgccaucgaccagaucaacggcaagcucaaccgccucaucggcaagaccaacgagaaguuccaccagaucgagaaggaguucuccgaggucgagggccgcauccaggaccucgagaaguacgucgaggacaccaagaucgaccucugguccuacaacgccgagcuccucgucgcccucgagaaccagcacaccaucgaccucaccgacuccgagaugaacaagcucuucgagaagaccaagaagcagcuccgcgagaacgccgaggacaugggcaacggcugcuucaagaucuaccacaagugcgacaacgccugcaucggcuccauccgcaacggcaccuacgaccacaacgucuaccgcgacgaggcccucaacaaccgcuuccagaucaagggcgucgagcucaaguccggcuacaaggacuggauccucuggaucuccuucgccaucuccugcuuccuccucugcgucgcccuccucggcuucaucaugugggccugccagaagggcaacauccgcugcaacaucugcaucuga

SEQ ID NO: 109371 - RNA, 1701 nt, Artificial Sequence; identical to SEQ ID NO: 109021
  derived and/or modified CDS sequence (opt2) from hemagglutinin__InfluenzaA__ALE31820

SEQ ID NO: 109372 - RNA, 1701 nt, Artificial Sequence
  derived and/or modified CDS sequence (opt2) from hemagglutinin__InfluenzaA__ALE31821
augaagaccaucaucgcccucuccuacacccucugccucgucuucgcccagaagauccccggcaacgacaacuccaccgccacccucugccucggccaccacgccguccccaacggcaccaucgucaagaccaucaccaacgaccgcaucgaggucaccaacgccaccgagcucguccagaacuccuccaucggcgagaucugcgacuccccccaccagauccucgacggcgagaacugcacccucaucgacgcccuccucggcgacccccagugcgacggcuuccagaacaagaagugggaccucuucgucgagcgcuccaaggcccacuccaacugcuaccccuacgacguccccgacuacgccucccuccgcucccucgucgccuccuccggcacccucgaguucaacaacgaguccuucaacuggaccggcgucacccagaacggcaccuccuccgccugcauccgccgcuccuccuccuccuucuucucccgccucaacuggcucacccaccucaacuacaccuaccccgcccucaacgucaccaugcccaacaacgagcaguucgacaagcucuacaucuggggcguccaccaccccggcaccgacaaggaccagaucuuccucuacgcccaguccuccggccgcaucaccgucuccaccaagcgcucccagcaggccgucauccccaacaucggcucccgcccccgcauccgcgacauccccucccgcaucuccaucuacuggaccaucgucaagcccggcgacauccuccucaucaacuccaccggcaaccucaucgccccccgcggcuacuucaagauccgcuccggcaaguccuccaucaugcgcuccgacgcccccaucggcaagugcaaguccgagugcaucacccccaacggcuccauccccaacgacaagcccuuccagaacgucaaccgcaucaccuacggcgccugcccccgcuacgucaagcacuccacccucaagcucgccaccggcaugcgcaacguccccgagaagcagacccgcggcaucuucggcgccaucgccggcuucaucgagaacggcugggagggcauggucgacggcugguacggcuuccgccaccagaacuccgagggccgcggccaggccgccgaccucaaguccacccaggccgccaucgaccagaucaacggcaagcucaaccgccucaucggcaagaccaacgagaaguuccaccagaucgagaaggaguucuccgaggucgagggccgcauccaggaccucgagaaguacgucgaggacaccaagaucgaccucugguccuacaacgccgagcuccucgucgcccucgagaaccagcacaccaucgaccucaccgacuccgagaugaacaagcucuucgagaagaccaagaagcagcuccgcgagaacgccgaggacaugggcaacggcugcuucaagaucuaccacaagugcgacaacgccugcaucggcuccauccgcaacggcaccuacgaccacaacgucuaccgcgacgaggcccucaacaaccgcuuccagaucaagggcgucgagcucaaguccggcuacaaggacuggauccucuggaucuccuucgccaucuccugcuuccuccucugcgucgcccuccucggcuucaucaugugggccugccagaagggcaacauccgcugcaacaucugcaucuga

SEQ ID NO: 109373 - RNA, 1701 nt, Artificial Sequence; identical to SEQ ID NO: 109113
  derived and/or modified CDS sequence (opt2) from hemagglutinin__InfluenzaA__ALE31822

SEQ ID NO: 109374 - RNA, 1701 nt, Artificial Sequence; identical to SEQ ID NO: 109021
  derived and/or modified CDS sequence (opt2) from hemagglutinin__InfluenzaA__ALE31823

SEQ ID NO: 109375 - RNA, 1701 nt, Artificial Sequence; identical to SEQ ID NO: 108477
  derived and/or modified CDS sequence (opt2) from hemagglutinin__InfluenzaA__ALE31824

SEQ ID NO: 109376 - RNA, 1701 nt, Artificial Sequence
  derived and/or modified CDS sequence (opt2) from hemagglutinin__InfluenzaA__ALE31825
augaagaccaucaucgcccucuccuacauccucugccucgucuucgcccagaagauccccggcaacgacaacuccaccgccacccucugccucggccaccacgccguccccaacggcaccaucgucaagaccaucaccaacgaccgcaucgaggucaccaacgccaccgagcucguccagaacuccuccaucggcgagaucugcgacuccccccaccagauccucgacggcgagaacugcacccucaucgacgcccuccucggcgacccccagugcgacggcuuccagaacaagaagugggaccucuucgucgagcgcuccaaggccuacuccaacugcuaccccuacgacguccccgacuacgccucccuccgcucccucgucgccuccuccggcacccucgaguucaacaacgaguccuucaacuggaccggcgucacccagaacggcaccuccuccgccugcauccgccgcuccuccuccuccuucuucucccgccucaacuggcucacccaccucaacuaccgcuaccccgcccucaacgucaccaugcccaacaacgagcaguucgacaagcucuacaucuggggcguccaccaccccggcaccgacaaggaccagaucuuccucuacgcccaguccuccggccgcaucaccgucuccaccaagcgcucccagcaggccgucauccccaacaucggcucccgcccccgcauccgcgacauccccucccgcaucuccaucuacuggaccaucgucaagcccggcgacauccuccucaucaacuccaccggcaaccucaucgccccccgcggcuacuucaagauccgcuccggcaaguccuccaucaugcgcuccgacgcccccaucggcaagugcaaguccgagugcaucacccccaacggcuccauccccaacgacaagcccuuccagaacgucaaccgcaucaccuacggcgccugcccccgcuacgucaagcacuccacccucaagcucgccaccggcaugcgcaacguccccgagaagcagacccgcggcaucuucggcgccaucgccggcuucaucgagaacggcugggagggcauggucgacggcugguacggcuuccgccaccagaacuccgagggccgcggccaggccgccgaccucaaguccacccaggccgccaucgaccagaucaacggcaagcucaaccgccucaucggcaagaccaacgagaaguuccaccagaucgagaaggaguucuccgaggucgagggccgcauccaggaccucgagaaguacgucgaggacaccaagaucgaccucugguccuacaacgccgagcuccucgucgcccucgagaaccagcacaccaucgaccucaccgacuccgagaugaacaagcucuucgagaagaccaagaagcagcuccgcgagaacgccgaggacaugggcaacggcugcuucaagaucuaccacaagugcgacaacgccugcaucggcuccauccgcaacggcaccuacgaccacaacgucuaccgcgacgaggcccucaacaaccgcuuccagaucaagggcgucgagcucaaguccggcuacaaggacuggauccucuggaucuccuucgccaucuccugcuuccuccucugcgucgcccuccucggcuucaucaugugggccugccagaagggcaacauccgcugcaacaucugcaucuga

SEQ ID NO: 109377 - RNA, 1701 nt, Artificial Sequence; identical to SEQ ID NO: 108477
  derived and/or modified CDS sequence (opt2) from hemagglutinin__InfluenzaA__ALE31826

SEQ ID NO: 109378 - RNA, 1701 nt, Artificial Sequence; identical to SEQ ID NO: 108477
  derived and/or modified CDS sequence (opt2) from hemagglutinin__InfluenzaA__ALE31827

SEQ ID NO: 109379 - RNA, 1701 nt, Artificial Sequence; identical to SEQ ID NO: 108477
  derived and/or modified CDS sequence (opt2) from hemagglutinin__InfluenzaA__ALE31828

SEQ ID NO: 109380 - RNA, 1701 nt, Artificial Sequence; identical to SEQ ID NO: 109034
  derived and/or modified CDS sequence (opt2) from hemagglutinin__InfluenzaA__ALE31829

SEQ ID NO: 109381 - RNA, 1701 nt, Artificial Sequence
  derived and/or modified CDS sequence (opt2) from hemagglutinin__InfluenzaA__ALE31830
augaagaccaucaucgcccucuccuacauccucugccucgucuucgcccagaagauccccggcaacgacaacuccaccgccacccucugccucggccaccacgccguccccaacggcaccaucgucaagaccaucaccaacgaccgcaucgaggucaccaacgccaccgagcucguccagaacuccuccaucggcgagaucugcgacuccccccaccagauccucgacggcgagaacugcacccucaucgacgcccuccucggcgacccccagugcgacggcuuccagaacaagaagugggaccucuucgucgagcgcuccaaggccuacuccaacugcuaccccuacgacguccccgacuacgccucccuccgcucccucgucgccuccuccggcacccucgaguucaacaacgaguccuucaacuggaccggcgucacccagaacggcaccuccuccgccugcauccgccgcuccuccuccuccuucuucucccgccucaacuggcucacccaccucaacuacaccuaccccgcccucaacgucaccaugcccaacaacgagcaguucgacaagcucuacaucuggggcguccaccaccccggcaccgacaaggaccagaucuuccucuacgcccaguccuccggccgcaucaccgucuccaccaagcgcucccagcaggccgucauccccaacaucggcucccgcccccgcauccgcgacauccccucccgcaucuccaucuacuggaccaucgucaagcccggcgacauccuccucaucaacuccaccggcaaccucaucgccccccgcggcuacuucaagauccgcuccggcaaguccuccaucaugcgcuccgacgcccccaucggcaagugcaaguccgagugcaucacccccaacggcuccauccccaacgacaagcccuuccagaacgucaaccgcaucaccuacggcgccugcccccgcuacgucaagcacuccacccucaagcucgccaccggcaugcgcaacguccccgagaagcagacccgcggcaucuucggcgccaucgccggcuucaucgagaacggcugggagggcauggucgacggcugguacggcuuccgccaccagaacuccgagggccgcggccaggccgccgaccucaaguccacccaggccgccaucgaccagaucaacggcaagcucaaccgccucaucggcaagaccaacgagaaguuccaccagaucgagaaggaguucuccgaggucgagggccgcauccaggaccucgagaaguacgucgaggacaccaagaucgaccucugguccuacaacgccgagcuccucgucgcccucgagaaccagcacaccaucgacaucaccgacuccgagaugaacaagcucuucgagaagaccaagaagcagcuccgcgagaacgccgaggacaugggcaacggcugcuucaagaucuaccacaagugcgacaacgccugcaucggcuccauccgcaacggcaccuacgaccacaacgucuaccgcgacgaggcccucaacaaccgcuuccagaucaagggcgucgagcucaaguccggcuacaaggacuggauccucuggaucuccuucgccaucuccugcuuccuccucugcgucgcccuccucggcuucaucaugugggccugccagaagggcaacauccgcugcaacaucugcaucuga

SEQ ID NO: 109382 - RNA, 1701 nt, Artificial Sequence
  derived and/or modified CDS sequence (opt2) from hemagglutinin__InfluenzaA__ALE31832
augaagaacaucaucgcccucuccuacauccucugccucgucuucgcccagaagauccccggcaacgacaacuccaccgccacccucugccucggccaccacgccguccccaacggcaccaucgucaagaccaucaccaacgaccgcaucgaggucaccaacgccaccgagcucguccagaacuccuccaucggcgagaucugcgacuccccccaccagauccucgacggcgagaacugcacccucaucgacgcccuccucggcgacccccagugcgacggcuuccagaacaagaagugggaccucuucgucgagcgcuccaaggccuacuccaacugcuaccccuacgacguccccgacuacgccucccuccgcucccucgucgccuccuccggcacccucgaguucaacaacgaguccuucaacuggaccggcgucacccagaacggcaccuccuccgccugcauccgccgcuccaacuccuccuucuucucccgccucaacuggcucacccaccucaacuacaccuaccccgcccucaacgucaccaugcccaacaacgagcaguucgacaagcucuacaucuggggcguccaccaccccggcaccgacaaggaccagaucuuccucuacgcccaguccuccggccgcaucaccgucuccaccaagcgcucccagcaggccgucauccccaacaucggcucccgcccccgcauccgcgacauccccucccgcaucuccaucuacuggaccaucgucaagcccggcgacauccuccucaucaacuccaccggcaaccucaucgccccccgcggcuacuucaagauccgcuccggcaaguccuccaucaugcgcuccgacgcccccaucggcaagugcaaguccgagugcaucacccccaacggcuccauccccaacgacaagcccuuccagaacgucaaccgcaucaccuacggcgccugcccccgcuacgucaagcacuccacccucaagcucgccaccggcaugcgcaacguccccgagaagcagacccgcggcaucuucggcgccaucgccggcuucaucgagaacggcugggagggcauggucgacggcugguacggcuuccgccaccagaacuccgagggccgcggccaggccgccgaccucaaguccacccaggccgccaucgaccagaucaacggcaagcucaaccgccucaucggcaagaccaacgagaaguuccaccagaucgagaaggaguucuccgaggucgagggccgcauccaggaccucgagaaguacgucgaggacaccaagaucgaccucugguccuacaacgccgagcuccucgucgcccucgagaaccagcacaccaucgaccucaccgacuccgagaugaacaagcucuucgagaagaccaagaagcagcuccgcgagaacgccgaggacaugggcaacggcugcuucaagaucuaccacaagugcgacaacgccugcaucggcuccauccgcaacggcaccuacgaccacaacgucuaccgcgacgaggcccucaacaaccgcuuccagaucaagggcgucgagcucaaguccggcuacaaggacuggauccucuggaucuccuucgccaucuccugcuuccuccucugcgucgcccuccucggcuucaucaugugggccugccagaagggcaacauccgcugcaacaucugcaucuga

SEQ ID NO: 109383 - RNA, 1701 nt, Artificial Sequence
  derived and/or modified CDS sequence (opt2) from hemagglutinin__InfluenzaA__ALE31833
augaagaccaucaucgcccucuccuacauccucugccucgucuccgcccagaagauccccggcaacgacaacuccaccgccacccucugccucggccaccacgccguccccaacggcaccaucgucaagaccaucaccaacgaccgcaucgaggucaccaacgccaccgagcucguccagaacuccuccaucggcgagaucugcaacuccccccaccagauccucgacggcgagaacugcacccucaucgacgcccuccucggcgacccccagugcgacggcuuccagaacaagaagugggaccucuucgucgagcgcuccaaggccuacuccaacugcuaccccuacgacguccccgacuacgccucccuccgcucccucgucgccuccuccggcacccucgaguucaacaacgaguccuucaacuggaccggcgucacccagaacggcaccuccuccgccugcauccgccgcuccuccuccuccuucuucucccgccucaacuggcucacccaccucaacuacaccuaccccgcccucaacgucaccaugcccaacaacgagcaguucgacaagcucuacaucuggggcguccaccaccccggcaccgacaaggaccagaucuuccucuacgcccaguccuccggccgcaucaccgucuccaccaagcgcucccagcaggccgucauccccaacaucggcucccgcccccgcauccgcgacauccccucccgcaucuccaucuacuggaccaucgucaagcccggcgacauccuccucaucaacuccaccggcaaccucaucgccccccgcggcuacuucaagauccgcuccggcaaguccuccaucaugcgcuccgacgcccccaucggcaagugcaaguccgagugcaucacccccaacggcuccauccccaacgacaagcccuuccagaacgucaaccgcaucaccuacggcgccugcccccgcuacgucaagcacuccacccucaagcucgccaccggcaugcgcaacguccccgagaagcagacccgcggcaucuucggcgccaucgccggcuucaucgagaacggcugggagggcauggucgacggcugguacggcuuccgccaccagaacuccgagggccgcggccaggccgccgaccucaaguccacccaggccgccaucgaccagaucaacggcaagcucaaccgccucaucggcaagaccaacgagaaguuccaccagaucgagaaggaguucuccgaggucgagggccgcauccaggaccucgagaaguacgucgaggacaccaagaucgaccucugguccuacaacgccgagcuccucgucgcccucgagaaccagcacaccaucgaccucaccgacuccgagaugaacaagcucuucgagaagaccaagaagcagcuccgcgagaacgccgaggacaugggcaacggcugcuucaagaucuaccacaagugcgacaacgccugcaucggcuccauccgcaacggcaccuacgaccacaacgucuaccgcgacgaggcccucaacaaccgcuuccagaucaagggcgucgagcucaaguccggcuacaaggacuggauccucuggaucuccuucgccaucuccugcuuccuccucugcgucgcccuccucggcuucaucaugugggccugccagaagggcaacauccgcugcaacaucugcaucuga

SEQ ID NO: 109384 - RNA, 1701 nt, Artificial Sequence
  derived and/or modified CDS sequence (opt2) from hemagglutinin__InfluenzaA__ALE31834
augaagaccaucaucgcccucuccuacauccucugccucgucuucgcccagaagcuccccggcaacgacaacuccaccgccacccucugccucggccaccacgccguccccaacggcaccaucgucaagaccaucaccaacgaccgcaucgaggucaccaacgccaccgagcucguccagaacuccuccaucggcgagaucugcgacuccccccaccagauccucgacggcgagaacugcacccucaucgacgcccuccucggcgacccccagugcgacggcuuccagaacaagaagugggaccucuucgucgagcgcuccaaggcccacuccaacugcuaccccuacgacguccccgacuacgccucccuccgcucccucgucgccuccuccggcacccucgaguucaacaacgaguccuucaacugggccggcgucacccagaacggcaccuccuccuccugcauccgcggcuccaacuccuccuucuucucccgccucaacuggcucacccaccucaacuccaaguaccccgcccucaacgucaccaugcccaacaacgagcaguucgacaagcucuacaucuggggcguccaccaccccggcaccgacaaggaccagaucuuccucuacgcccaguccuccggccgcaucaccgucuccaccaagcgcucccagcaggccgucauccccaacaucggcucccgcccccgcauccgcgacauccccucccgcaucuccaucuacuggaccaucgucaagcccggcgacauccuccucaucaacuccaccggcaaccucaucgccccccgcggcuacuucaagauccgcuccggcaaguccuccaucaugcgcuccgacgcccccaucggcaagugcaaguccgagugcaucacccccaacggcuccauccccaacgacaagcccuuccagaacgucaaccgcaucaccuacggcgccugcccccgcuacgucaagcaguccacccucaagcucgccaccggcaugcgcaacguccccgagaagcagacccgcggcaucuucggcgccaucgccggcuucaucgagaacggcugggagggcauggucgacggcugguacggcuuccgccaccagaacuccgagggccgcggccaggccgccgaccucaaguccacccaggccgccaucgaccagaucaacggcaagcucaaccgccucaucggcaagaccaacgagaaguuccaccagaucgagaaggaguucuccgaggucgagggccgcauccaggaccucgagaaguacgucgaggacaccaagaucgaccucugguccuacaacgccgagcuccucgucgcccucgagaaccagcacaccaucgaccucaccgacuccgagaugaacaagcucuucgagaagaccaagaagcagcuccgcgagaacgccgaggacaugggcaacggcugcuucaagaucuaccacaagugcgacaacgccugcaucggcuccauccgcaacggcaccuacgaccacgacgucuaccgcgacgaggcccucaacaaccgcuuccagaucaagggcgucgagcucaaguccggcuacaaggacuggauccucuggaucuccuucgccaucuccugcuuccuccucugcgucgcccuccucggcuucaucaugugggccugccagaagggcaacauccgcugcaacaucugcaucuga

SEQ ID NO: 109385 - RNA, 1701 nt, Artificial Sequence; identical to SEQ ID NO: 109135
  derived and/or modified CDS sequence (opt2) from hemagglutinin__InfluenzaA__ALE31835

SEQ ID NO: 109386 - RNA, 1701 nt, Artificial Sequence; identical to SEQ ID NO: 108477
  derived and/or modified CDS sequence (opt2) from hemagglutinin__InfluenzaA__ALE31836

SEQ ID NO: 109387 - RNA, 1701 nt, Artificial Sequence
  derived and/or modified CDS sequence (opt2) from hemagglutinin__InfluenzaA__ALE31837
augaagaccaucaucgcccucuccuacauccucugccucgucuacgcccagaagauccccggcaacgacaacuccaccgccacccucugccucggccaccacgccguccccaacggcaccaucgucaagaccaucaccaacgaccgcaucgaggucaccaacgccaccgagcucguccagaacuccuccaucggcgagaucugcgacuccccccaccagauccucgacggcgagaacugcacccucaucgacgcccuccucggcgacccccagugcgacggcuuccagaacaagaagugggaccucuucgucgagcgcuccaaggccuacuccaacugcuaccccuacgacguccccgacuacgccucccuccgcucccucgucgccuccuccggcacccucgaguucaacaacgaguccuucaacuggaccggcgucacccagaacggcaccuccuccgccugcauccgccgcuccuccuccuccuucuucucccgccucaacuggcucacccaccucaacuacaccuaccccgcccucaacgucaccaugcccaacaacgagcaguucgacaagcucuacaucuggggcguccaccaccccggcaccgacaaggaccagaucuuccucuacgcccaguccuccggccgcaucaccgucuccaccaagcgcucccagcaggccgucauccccaacaucggcucccgcccccgcauccgcgacauccccucccgcaucuccaucuacuggaccaucgucaagcccggcgacauccuccucaucaacuccaccggcaaccucaucgccccccgcggcuacuucaagauccgcuccggcaaguccuccaucaugcgcuccgacgcccccaucggcaagugcaaguccgagugcaucacccccaacggcuccauccccaacgacaagcccuuccagaacgucaaccgcaucaccuacggcgccugcccccgcuacgucaagcacuccacccucaagcucgccaccggcaugcgcaacguccccgagaagcagacccgcggcaucuucggcgccaucgccggcuucaucgagaacggcugggagggcauggucgacggcugguacggcuuccgccaccagaacuccgagggccgcggccaggccgccgaccucaaguccacccaggccgccaucgaccagaucaacggcaagcucaaccgccucaucggcaagaccaacgagaaguuccaccagaucgagaaggaguucuccgaggucgagggccgcauccaggaccucgagaaguacgucgaggacaccaagaucgaccucugguccuacaacgccgagcuccucgucgcccucgagaaccagcacaccaucgaccucaccgacuccgagaugaacaagcucuucgagaagaccaagaagcagcuccgcgagaacgccgaggacaugggcaacggcugcuucaagaucuaccacaagugcgacaacgccugcaucggcuccauccgcaacggcaccuacgaccacaacgucuaccgcgacgaggcccucaacaaccgcuuccagaucaagggcgucgagcucaaguccggcuacaaggacuggauccucuggaucuccuucgccaucuccugcuuccuccucugcgucgcccuccucggcuucaucaugugggccugccagaagggcaacauccgcugcaacaucugcaucuga

SEQ ID NO: 109388 - RNA, 1701 nt, Artificial Sequence; identical to SEQ ID NO: 108477
  derived and/or modified CDS sequence (opt2) from hemagglutinin__InfluenzaA__ALE31838

SEQ ID NO: 109389 - RNA, 1701 nt, Artificial Sequence; identical to SEQ ID NO: 108477
  derived and/or modified CDS sequence (opt2) from hemagglutinin__InfluenzaA__ALE31839

SEQ ID NO: 109390 - RNA, 1701 nt, Artificial Sequence
  derived and/or modified CDS sequence (opt2) from hemagglutinin__InfluenzaA__ALE31840
augaagaccaucaucgcccucuccuacauccucugccucgucuucgcccagaagauccccggcaacgacaacuccaccgccacccucugccucggccaccacgccguccccaacggcaccaucgucaagaccaucaccaacgaccgcaucgaggucaccaacgccaccgagcucguccagaacuccuccaucggcgagaucugcgacuccccccaccagauccucgacggcgagaacugcacccucaucgacgcccuccucggcgacccccagugcgacggcuuccagaacaagaagugggaccucuucgucgagcgcuccaaggccuacuccaacugcuaccccuacgacguccccgacuacgccucccuccgcucccucgucgccuccuccggcacccucgaguucaacaacgaguccuucaacuggaccggcgucacccagaacggcaccuccuccgccugcauccgccgcuccuccuccuccuucuucucccgccucaacuggcucacccaccucaacuacaccuaccccgcccucaacgucaccaugcccaacaacgagcaguucgacaagcucuacaucuggggcguccaccaccccggcaccgacaaggaccagaucuuccucuacgcccaguccuccggccgcaucaccgucuccaccaagcgcucccagcaggccgucauccccaacaucggcucccgccuccgcauccgcgacauccccucccgcaucuccaucuacuggaccaucgucaagcccggcgacauccuccucaucaacuccaccggcaaccucaucgccccccgcggcuacuucaagauccgcuccggcaaguccuccaucaugcgcuccgacgcccccaucggcaagugcaaguccgagugcaucacccccaacggcuccauccccaacgacaagcccuuccagaacgucaaccgcaucaccuacggcgccugcccccgcuacgucaagcacuccacccucaagcucgccaccggcaugcgcaacguccccgagaagcagacccgcggcaucuucggcgccaucgccggcuucaucgagaacggcugggagggcauggucgacggcugguacggcuuccgccaccagaacuccgagggccgcggccaggccgccgaccucaaguccacccaggccgccaucgaccagaucaacggcaagcucaaccgccucaucggcaagaccaacgagaaguuccaccagaucgagaaggaguucuccgaggucgagggccgcauccaggaccucgagaaguacgucgaggacaccaagaucgaccucugguccuacaacgccgagcuccucgucgcccucgagaaccagcacaccaucgaccucaccgacuccgagaugaacaagcucuucgagaagaccaagaagcagcuccgcgagaacgccgaggacaugggcaacggcugcuucaagaucuaccacaagugcgacaacgccugcaucggcuccauccgcaacggcaccuacgaccacaacgucuaccgcgacgaggcccucaacaaccgcuuccagaucaagggcgucgagcucaaguccggcuacaaggacuggauccucuggaucuccuucgccaucuccugcuuccuccucugcgucgcccuccucggcuucaucaugugggccugccagaagggcaacauccgcugcaacaucugcaucuga

SEQ ID NO: 109391 - RNA, 1701 nt, Artificial Sequence; identical to SEQ ID NO: 108477
  derived and/or modified CDS sequence (opt2) from hemagglutinin__InfluenzaA__ALE31842

SEQ ID NO: 109392 - RNA, 1701 nt, Artificial Sequence
  derived and/or modified CDS sequence (opt2) from hemagglutinin__InfluenzaA__ALE31843
augcagaccaucaucgcccucuccuacauccucugccucgucuucgcccagaagauccccggcaacgacaacuccaccgccacccucugccucggccaccacgccguccccaacggcaccaucgucaagaccaucaccaacgaccgcaucgaggucaccaacgccaccgagcucguccagaacuccuccaucggcgagaucugcgacuccccccaccagauccucgacggcgagaacugcacccucaucgacgcccuccucggcgacccccagugcgacggcuuccagaacaagaagugggaccucuucgucgagcgcuccaaggccuacuccaacugcuaccccuacgacguccccgacuacgccucccuccgcucccucgucgccuccuccggcacccucgaguucaacaacgaguccuucaacuggaccggcgucacccagaacggcaccuccuccgccugcauccgcaaguccuccuccuccuucuucucccgccucaacuggcucacccaccucaacuacaccuaccccgcccucaacgucaccaugcccaacaacgagcaguucgacaagcucuacaucuggggcguccaccaccccggcaccgacaaggaccagaucuuccucuacgcccaguccuccggccgcaucaccgucuccaccaagcgcucccagcaggccgucauccccaacaucggcucccgcccccgcauccgcgacauccccucccgcaucuccaucuacuggaccaucgucaagcccggcgacauccuccucaucaacuccaccggcaaccucaucgccccccgcggcuacuucaagauccucuccggcaaguccuccaucaugcgcuccgacgcccccaucggcaagugcaaguccgagugcaucacccccaacggcuccauccccaacgacaagcccuuccagaacgucaaccgcaucaccuacggcgccugcccccgcuacgucaagcacuccacccucaagcucgccaccggcaugcgcaacguccccgagaagcagacccgcggcaucuucggcgccaucgccggcuucaucgagaacggcugggagggcauggucgacggcugguacggcuuccgccaccagaacuccgagggccgcggccaggccgccgaccucaaguccacccaggccgccaucgaccagaucaacggcaagcucaaccgccucaucggcaagaccaacgagaaguuccaccagaucgagaaggaguucuccgaggucgagggccgcauccaggaccucgagaaguacgucgaggacaccaagaucgaccucugguccuacaacgccgagcuccucgucgcccucgagaaccagcacaccaucgaccucaccgacuccgagaugaacaagcucuucgagaagaccaagaagcagcuccgcgagaacgccgaggacaugggcaacggcugcuucaagaucuaccacaagugcgacaacgccugcaucggcuccauccgcaacggcaccuacgaccacaacgucuaccgcgacgaggcccucaacaaccgcuuccagaucaagggcgucgagcucaaguccggcuacaaggacuggauccucuggaucuccuucgccaucuccugcuuccuccucugcgucgcccuccucggcuucaucaugugggccugccagaagggcaacauccgcugcaacaucugcaucuga

SEQ ID NO: 109393 - RNA, 1701 nt, Artificial Sequence; identical to SEQ ID NO: 109034
  derived and/or modified CDS sequence (opt2) from hemagglutinin__InfluenzaA__ALE31844

SEQ ID NO: 109394 - RNA, 1701 nt, Artificial Sequence; identical to SEQ ID NO: 109010
  derived and/or modified CDS sequence (opt2) from hemagglutinin__InfluenzaA__ALE31846

SEQ ID NO: 109395 - RNA, 1701 nt, Artificial Sequence; identical to SEQ ID NO: 108477
  derived and/or modified CDS sequence (opt2) from hemagglutinin__InfluenzaA__ALE31847

SEQ ID NO: 109396 - RNA, 1701 nt, Artificial Sequence; identical to SEQ ID NO: 108477
  derived and/or modified CDS sequence (opt2) from hemagglutinin__InfluenzaA__ALE31848

SEQ ID NO: 109397 - RNA, 1701 nt, Artificial Sequence
  derived and/or modified CDS sequence (opt2) from hemagglutinin__InfluenzaA__ALE31850
augaagaccaucaucgcccucuccuacauccucugccucgucuucgcccagaagcuccccggcaacgacaacuccaccgccacccucugccucggccaccacgccguccccaacggcaccaucgucaagaccaucaccaacgaccgcaucgaggucaccaacgccaccgagcucguccagaacuccuccaucggcgagaucugcgacuccccccaccagauccucgacggcgagaacugcacccucaucgacgcccuccucggcgacccccagugcgacggcuuccagaacaagaagugggaccucuucgucgagcgcuccaaggccuacuccaacugcuaccccuacgacguccccgacuacgccucccuccgcucccucgucgccuccuccggcacccucgaguucaacaacgaguccuucaacugggccggcgucacccagaacggcaccuccuccuccugcauccgcggcuccaacuccuccuucuucucccgccucaacuggcucacccaccucaacuccaaguaccccgcccucaacgucaccaugcccaacaacgagcaguucgacaagcucuacaucuggggcguccaccaccccggcaccgacaaggaccagaucuuccucuacgcccagcccuccggccgcaucaccgucuccaccaagcgcucccagcaggccgucauccccaacaucggcucccgcccccgcauccgcgacauccccucccgcaucuccaucuacuggaccaucgucaagcccggcgacauccuccucaucaacuccaccggcaaccucaucgccccccgcggcuacuucaagauccgcuccggcaaguccuccaucaugcgcuccgacgcccccaucggcaagugcaaguccgagugcaucacccccaacggcuccauccccaacgacaagcccuuccagaacgucaaccgcgucaccuacggcgccugcccccgcuacgucaagcaguccacccucaagcucgccaccggcaugcgcaacguccccgagcgccagacccgcggcaucuucggcgccaucgccggcuucaucgagaacggcugggagggcauggucgacggcugguacggcuuccgccaccagaacuccgagggccgcggccaggccgccgaccucaaguccacccaggccgccaucgaccagaucaacggcaagcucaaccgccucaucggcaagaccaacgagaaguuccaccagaucgagaaggaguucuccgaggucgagggccgcauccaggaccucgagaaguacgucgaggacaccaagaucgaccucugguccuacaacgccgagcuccucgucgcccucgagaaccagcacaccaucgaccucaccgacuccgagaugaacaagcucuucgagaagaccaagaagcagcuccgcgagaacgccgaggacaugggcaacggcugcuucaagaucuaccacaagugcgacaacgccugcaucggcuccauccgcaacggcaccuacgaccacgacgucuaccgcgacgaggcccucaacaaccgcuuccagaucaagggcgucgagcucaaguccggcuacaaggacuggauccucuggaucuccuucgccaucuccugcuuccuccucugcgucgcccuccucggcuucaucaugugggccugccagaagggcaacauccgcugcaacaucugcaucuga

SEQ ID NO: 109398 - RNA, 1701 nt, Artificial Sequence
  derived and/or modified CDS sequence (opt2) from hemagglutinin__InfluenzaA__ALE31851
augaagaccaucaucgcccucuccuacauccucugccucgucuucgcccagaagauccccggcaacgacaacuccaccgccacccucugccucggccaccacgccguccccaacggcaccaucgucaagaccaucaccaacgaccgcaucgaggucaccaacgccaccgagcucguccagaacuccuccaucggcgagaucugcgacuccccccaccagauccucgacggcgagaacugcacccucaucgacgcccuccucggcgacccccagugcgacggcuuccagaacaagaagugggaccucuucgucgagcgcuccaaggccuacuccaacugcuaccccuacgacguccccgacuacgccucccuccgcucccucgucgccuccuccggcacccucgaguucaacaacgaguccuucaacuggaccggcgucacccagaacggcaccuccuccgccugcauccgcaaguccuccuccuccuucuucucccgccucaacuggcucacccaccucaacuacaccuaccccgcccucaacgucaccaugcccaacaacgagcaguucgacaagcucuacaucuggggcguccaccaccccggcaccgacaaggaccagaucuuccucuacgcccgcuccuccggccgcaucaccgucuccaccaagcgcucccagcaggccgucauccccaacaucggcucccgcccccgcauccgcgacauccccucccgcaucuccaucuacuggaccaucgucaagcccggcgacauccuccucaucaacuccaucggcaaccucaucgccccccgcggcuacuucaagauccgcuccggcaaguccuccaucaugcgcuccgacgcccccaucggcaagugcaaguccgagugcaucacccccaacggcuccauccccaacgacaagcccuuccagaacgucaaccgcaucaccuacggcgccugcccccgcuacgucaagcacuccacccucaagcucgccaccggcaugcgcaacguccccgagaagcagacccgcggcaucuucggcgccaucgccggcuucaucgagaacggcugggagggcauggucgacggcugguacggcuuccgccaccagaacuccgagggccgcggccaggccgccgaccucaaguccacccaggccgccaucgaccagaucaacggcaagcucaaccgccucaucggcaagaccaacgagaaguuccaccagaucgagaaggaguucuccgaggucgagggccgcauccaggaccucgagaaguacgucgaggacaccaagaucgaccucugguccuacaacgccgagcuccucgucgcccucgagaaccagcacaccaucgaccucaccgacuccgagaugaacaagcucuucgagaagaccaagaagcagcuccgcgagaacgccgaggacaugggcaacggcugcuucaagaucuaccacaagugcgacaacgccugcaucggcuccauccgcaacggcaccuacgaccacaacgucuaccgcgacgaggcccucaacaaccgcuuccagaucaagggcgucgagcucaaguccggcuacaaggacuggauccucuggaucuccuucgccaucuccugcuuccuccucugcgucgcccuccucggcuucaucaugugggccugccagaagggcaacauccgcugcaacaucugcaucuga

SEQ ID NO: 109399 - RNA, 1701 nt, Artificial Sequence; identical to SEQ ID NO: 109021
  derived and/or modified CDS sequence (opt2) from hemagglutinin__InfluenzaA__ALE31852

SEQ ID NO: 109400 - RNA, 1701 nt, Artificial Sequence
  derived and/or modified CDS sequence (opt2) from hemagglutinin__InfluenzaA__ALE31853
augaagaccaucaucgcccucuccuacauccucugccucgucuucacccagaagauccccggcaacgacaacuccaccgccacccucugccucggccaccacgccguccccaacggcaccaucgucaagaccaucaccaacgaccgcaucgaggucaccaacgccaccgagcucguccagaacuccuccaucggcgagaucugcgacuccccccaccagauccucgacggcgagaacugcacccucaucgacgcccuccucggcgacccccagugcgacggcuuccagaacaagaagugggaccucuucgucgagcgcuccaaggccuacuccaacugcuaccccuacgacguccccgacuacgccucccuccgcucccucgucgccuccuccggcacccucgaguucaacaacgaguccuucaacuggaccggcgucacccagaacggcaccuccuccgccugcauccgccgcuccuccuccuccuucuucucccgccucaacuggcucacccaccucaacuacaccuaccccgcccucaacgucaccaugcccaacaacgagcaguucgacaagcucuacaucuggggcguccaccaccccggcaccgacaaggaccagaucuuccucuacgcccaguccuccggccgcaucaccgucuccaccaagcgcucccagcaggccgucauccccaacaucggcucccgcccccgcauccgcgacauccccucccgcaucuccaucuacuggaccaucgucaagcccggcgacauccuccucaucaacuccaccggcaaccucaucgccccccgcggcuacuucaagauccgcuccggcaaguccuccaucaugcgcuccgacgcccccaucggcaagugcaaguccgagugcaucacccccaacggcuccauccccaacgacaagcccuuccagaacgucaaccgcaucaccuacggcgccugcccccgcuacgucaagcacuccacccucaagcucgccaccggcaugcgcaacguccccgagaagcagacccgcggcaucuucggcgccaucgccggcuucaucgagaacggcugggagggcauggucgacggcugguacggcuuccgccaccagaacuccgagggccgcggccaggccgccgaccucaaguccacccaggccgccaucgaccagaucaacggcaagcucaaccgccucaucggcaagaccaacgagaaguuccaccagaucgagaaggaguucuccgaggucgagggccgcauccaggaccucgagaaguacgucgaggacaccaagaucgaccucugguccuacaacgccgagcuccucgucgcccucgagaaccagcacaccaucgaccucaccgacuccgagaugaacaagcucuucgagaagaccaagaagcagcuccgcgagaacgccgaggacaugggcaacggcugcuucaagaucuaccacaagugcgacaacgccugcaucggcuccauccgcaacggcaccuacgaccacaacgucuaccgcgacgaggcccucaacaaccgcuuccagaucaagggcgucgagcucaaguccggcuacaaggacuggauccucuggaucuccuucgccaucuccugcuuccuccucugcgucgcccuccucggcuucaucaugugggccugccagaagggcaacauccgcugcaacaucugcaucuga

SEQ ID NO: 109401 - RNA, 1701 nt, Artificial Sequence
  derived and/or modified CDS sequence (opt2) from hemagglutinin__InfluenzaA__ALE31854
augaagaccaucaucgcccucuccuacauccucugccucgucuucgcccagaagauccccggcaacgacaacuccaccgccacccucugccucggccaccacgccguccccaacggcaccaucgucaagaccaucaccaacgaccgcaucgaggucaccaacgccaccgagcucguccagaacuccuccaucggcgagaucugcgacuccccccaccagauccucgacggcgagaacugcacccucaucgacgcccuccucggcgacccccagugcgacggcuuccagaacaagaagugggaccucuucgucgagcgcuccaaggccuacuccaacugcuaccccuacgacguccccgacuacgccucccuccgcucccucgucgccuccuccggcacccucgaguucaacaacgaguccuucaacuggaccggcgucacccagaacggcaccuccuccgccugcauccgccgcuccuccuccuccuucuucucccgccucaacuggcucacccaccucaacuacaccuaccccgcccucaacgucaccaugcccaacaacgagcaguucgacaagcucuacaucuggggcguccaccaccccggcaccgacaaggaccagaucuuccucuacgcccgcuccuccggccgcaucaccgucuccaccaagggcucccagcaggccgucauccccaacaucggcucccgcccccgcauccgcgacauccccucccgcaucuccaucuacuggaccaucgucaagcccggcgacauccuccucaucaacuccaccggcaaccucaucgccccccgcggcuacuucaagauccgcuccggcaaguccuccaucaugcgcuccgacgcccccaucggccgcugcaaguccgagugcaucacccccaacggcuccauccccaacgacaagcccuuccagaacgucaaccgcaucaccuacggcgccugcccccgcuacgucaagcacuccacccucaagcucgccaccggcaugcgcaacguccccgagaagcagacccgcggcaucuucggcgccaucgccggcuucaucgagaacggcugggagggcauggucgacggcugguacggcuuccgccaccagaacuccgagggccgcggccaggccgccgaccucaaguccacccaggccgccaucgaccagaucaacggcaagcucaaccgccucaucggcaagaccaacgagaaguuccaccagaucgagaaggaguucuccgaggucgagggccgcauccaggaccucgagaaguacgucgaggacaccaagaucgaccucugguccuacaacgccgagcuccucgucgcccucgagaaccagcacaccaucgaccucaccgacuccgagaugaacaagcucuucgagaagaccaagaagcagcuccgcgagaacgccgaggacaugggcaacggcugcuucaagaucuaccacaagugcgacaacgccugcaucggcuccauccgcaacggcaccuacgaccacaacgucuaccgcgacgaggcccucaacaaccgcuuccagaucaagggcgucgagcucaaguccggcuacaaggacuggauccucuggaucuccuucgccaucuccugcuuccuccucugcgucgcccuccucggcuucaucaugugggccugccagaagggcaacauccgcugcaacaucugcaucuga

SEQ ID NO: 109402 - RNA, 1701 nt, Artificial Sequence; identical to SEQ ID NO: 109163
  derived and/or modified CDS sequence (opt2) from hemagglutinin__InfluenzaA__ALE31855

SEQ ID NO: 109403 - RNA, 1701 nt, Artificial Sequence; identical to SEQ ID NO: 108477
  derived and/or modified CDS sequence (opt2) from hemagglutinin__InfluenzaA__ALE31856

SEQ ID NO: 109404 - RNA, 1701 nt, Artificial Sequence; identical to SEQ ID NO: 108477
  derived and/or modified CDS sequence (opt2) from hemagglutinin__InfluenzaA__ALE31857

SEQ ID NO: 109405 - RNA, 1701 nt, Artificial Sequence
  derived and/or modified CDS sequence (opt2) from hemagglutinin__InfluenzaA__ALE31858
augaagaccaucaucgcccucuccuacauccucugccucgucuucgcccagaagauccccggcaacgacaacuccaccgccacccucugccucggccaccacgccguccccaacggcaccaucgucaagaccaucaccaacgaccgcaucgaggucaccaacgccaccgagcucguccagaacuccuccaucggcgagaucugcgacuccccccaccagauccucgacggcgagaacugcacccucaucgacgcccuccucggcgacccccagugcgacggcuuccagaacaagaagugggaccucuucgucgagcgcuccaaggccuacuccaacugcuaccccuacgacguccccgacuacgccucccuccgcucccucgucgccuccuccggcacccucgaguucaacaacgaguccuucaacuggaccggcgucacccagaacggcaccuccuccgccugcauccgccgcuccuccuccuccuucuucucccgccucaacuggcucacccaccucaaguacaccuaccccgcccucaacgucaccaugcccaacaacgagcaguucgacaagcucuacaucuggggcguccaccaccccggcaccgacaaggaccagaucuuccucuacgcccaguccuccggccgcaucaccgucuccaccaagcgcucccagcaggccgucauccccaacaucggcucccgcccccgcauccgcgacauccccucccgcaucuccaucuacuggaccaucgucaagcccggcgacauccuccucaucaacuccaccggcaaccucaucgccccccgcggcuacuucaagauccgcuccggcaaguccuccaucaugcgcuccgacgcccccaucggcaagugcaaguccgagugcaucacccccaacggcuccauccccaacgacaagcccuuccagaacgucaaccgcaucaccuacggcgccugcccccgcuacgucaagcacuccacccucaagcucgccaccggcaugcgcaacguccccgagaagcagacccgcggcaucuucggcgccaucgccggcuucaucgagaacggcugggagggcauggucgacggcugguacggcuuccgccaccagaacuccgagggccgcggccaggccgccgaccucaaguccacccaggccgccaucgaccagaucaacggcaagcucaaccgccucaucggcaagaccaacgagaaguuccaccagaucgagaaggaguucuccgaggucgagggccgcauccaggaccucgagaaguacgucgaggacaccaagaucgaccucugguccuacaacgccgagcuccucgucgcccucgagaaccagcacaccaucgaccucaccgacuccgagaugaacaagcucuucgagaagaccaagaagcagcuccgcgagaacgccgaggacaugggcaacggcugcuucaagaucuaccacaagugcgacaacgccugcaucggcuccauccgcaacggcaccuacgaccacaacgucuaccgcgacgaggcccucaacaaccgcuuccagaucaagggcgucgagcucaaguccggcuacaaggacuggauccucuggaucuccuucgccaucuccugcuuccuccucugcgucgcccuccucggcuucaucaugugggccugccagaagggcaacauccgcugcaacaucugcaucuga

SEQ ID NO: 109406 - RNA, 1701 nt, Artificial Sequence
  derived and/or modified CDS sequence (opt2) from hemagglutinin__InfluenzaA__ALE31859
augaagaccaucaucgcccucuccuacauccucugccucgucuucgcccagaagauccccggcaacgacaacuccaccgccacccucugccucggccaccacgccguccccaacggcaccaucgucaagaccaucaccaacgaccgcaucgaggucaccaacgccaccgagcucguccagaacuccuccaucggcgagaucugcgacuccccccaccagauccucgacggcgagaacugcacccucaucgacgcccuccucggcgacccccagugcgacggcuuccagaacaagaagugggaccucuucgucgagcgcuccaaggccuacuccaacugcuaccccuacgacguccccgacuacgccucccuccgcucccucgucgccuccuccggcacccucgaguucaacaacgaguccuucaacuggaccggcgucacccagaacggcaccuccuccgccugcacccgccgcuccuccuccuccuucuucucccgccucaacuggcucacccaccucaacuacaccuaccccgcccucaacgucaccaugcccaacaacgagcaguucgacaagcucuacaucuggggcguccaccaccccggcaccgacaaggaccagaucuuccucuacgcccaguccuccggccgcaucaccgucuccaccaagcgcucccagcaggccgucauccccaacaucggcucccgcccccgcauccgcgacauccccucccgcaucuccaucuacuggaccaucgucaagcccggcgacaugcuccucaucaacuccaccggcaaccucaucgccccccgcggcuacuucaagauccgcuccggcaaguccuccaucaugcgcuccgacgcccccaucggcaagugcaaguccgagugcaucacccccaacggcuccauccccaacgacaagcccuuccagaacgucaaccgcaucaccuacggcgccugcccccgcuacgucaagcacuccacccucaagcucgccaccggcaugcgcaacguccccgagaagcagacccgcggcaucuucggcgccaucgccggcuucaucgagaacggcugggagggcauggucgacggcugguacggcuuccgccaccagaacuccgagggccgcggccaggccgccgaccucaaguccacccaggccgccaucgaccagaucaacggcaagcucaaccgccucaucggcaagaccaacgagaaguuccaccagaucgagaaggaguucuccgaggucgagggccgcauccaggaccucgagaaguacgucgaggacaccaagaucgaccucugguccuacaacgccgagcuccucgucgcccucgagaaccagcacaccaucgaccucaccgacuccgagaugaacaagcucuucgagaagaccaagaagcagcuccgcgagaacgccgaggacaugggcaacggcugcuucaagaucuaccacaagugcgacaacgccugcaucggcuccauccgcaacggcaccuacgaccacaacgucuaccgcgacgaggcccucaacaaccgcuuccagaucaagggcgucgagcucaaguccggcuacaaggacuggauccucuggaucuccuucgccaucuccugcuuccuccucugcgucgcccuccucggcuucaucaugugggccugccagaagggcaacauccgcugcaacaucugcaucuga

SEQ ID NO: 109407 - RNA, 1701 nt, Artificial Sequence
  derived and/or modified CDS sequence (opt2) from hemagglutinin__InfluenzaA__ALE31860
augaagaccaucaucgcccucuccuacauccucugccucgucuucgcccagaagauccccggcaacgacaacuccaccgccacccucugccucggccaccacgccguccccaacggcaccaucgucaagaccaucaccaacgaccgcaucgaggucaccaacgccaccgagcucguccagaacuccuccaucggcaagaucugcgacuccccccaccagauccucgacggcgagaacugcacccucaucgacgcccuccucggcgacccccagugcgacggcuuccagaacaagaagugggaccucuucgucgagcgcuccaaggccuacuccaacugcuaccccuacgacguccccgacuacgccucccuccgcucccucgucgccuccuccggcacccucgaguucaacaacgaguccuucaacuggaccggcgucacccagaacggcaccuccuccgccugcauccgccgcuccuccuccuccuucuucucccgccucaacuggcucacccaccucaacuacaccuaccccgcccucaacgucaccaugcccaacaacgagcaguucgacaagcucuacaucuggggcguccaccaccccggcaccgacaaggaccagaucuuccucuacgcccaguccuccggccgcaucaccgucuccaccaagcgcucccagcaggccgucauccccaacaucggcucccgcccccgcauccgcgacauccccucccgcaucuccaucuacuggaccaucgucaagcccggcgacauccuccucaucaacuccaccggcaaccucaucgccccccgcggcuacuucaagauccgcuccggcgaguccuccaucaugcgcuccgacgcccccaucggcaagugcaaguccgagugcaucacccccaacggcuccauccccaacgacaagcccuuccagaacgucaaccgcaucaccuacggcgccugcccccgcuacgucaagcacuccacccucaagcucgccaccggcaugcgcaacguccccgagaagcagacccgcggcaucuucggcgccaucgccggcuucaucgagaacggcugggagggcauggucgacggcugguacggcuuccgccaccagaacuccgagggccgcggccaggccgccgaccucaaguccacccaggccgccaucgaccagaucaacggcaagcucaaccgccucaucggcaagaccaacgagaaguuccaccagaucgagaaggaguucuccgaggucgagggccgcauccaggaccucgagaaguacgucgaggacaccaagaucgaccucugguccuacaacgccgagcuccucgucgcccucgagaaccagcacaccaucgaccucaccgacuccgagaugaacaagcucuucgagaagaccaagaagcagcuccgcgagaacgccgaggacaugggcaacggcugcuucaagaucuaccacaagugcgacaacgccugcaucggcuccauccgcaacggcaccuacgaccacaacgucuaccgcgacgaggcccucaacaaccgcuuccagaucaagggcgucgagcucaaguccggcuacaaggacuggauccucuggaucuccuucgccaucuccugcuuccuccucugcgucgcccuccucggcuucaucaugugggccugccagaagggcaacauccgcugcaacaucugcaucuga

SEQ ID NO: 109408 - RNA, 1701 nt, Artificial Sequence; identical to SEQ ID NO: 108477
  derived and/or modified CDS sequence (opt2) from hemagglutinin__InfluenzaA__ALE31861

SEQ ID NO: 109409 - RNA, 1701 nt, Artificial Sequence
  derived and/or modified CDS sequence (opt2) from hemagglutinin__InfluenzaA__ALE31862
augaagaugaucaucgcccucuccuacauccucugccucgucuucgcccagaagauccccggcaacgacaacuccaccgccacccucugccucggccaccacgccguccccaacggcaccaucgucaagaccaucaccaacgaccgcaucgaggucaccaacgccaccgagcucguccagaacuccuccaucggcgagaucugcgacuccccccaccagauccucgacggcgagaacugcacccucaucgacgcccuccucggcgacccccagugcgacggcuuccagaacaagaagugggaccucuucgucgagcgcuccaaggccuacuccaacugcuaccccuacgacguccccgacuacgccucccuccgcucccucgucgccuccuccggcacccucgaguucaacaacgaguccuucaacuggaccggcgucacccagaacggcaccuccuccgccugcauccgcaaguccuccuccuccuucuucucccgccucaacuggcucacccaccucaacuacaccuaccccgcccucaacgucaccaugcccaacaacgagcaguucgacaagcucuacaucuggggcguccaccaccccggcaccgacaaggaccagaucuuccucuacgcccgcuccuccggccgcaucaccgucuccaccaagcgcucccagcaggccgucauccccaacaucggcucccgcccccgcauccgcgacauccccucccgcaucuccaucuacuggaccaucgucaagcccggcgacauccuccucaucaacuccaccggcaaccucaucgccccccgcggcuacuucaagauccgcuccggcaaguccuccaucaugcgcuccgacgcccccaucggcaagugcaaguccgagugcaucacccccaacggcuccauccccaacgacaagcccuuccagaacgucaaccgcaucaccuacggcgccugcccccgcuacgucaagcacuccacccucaagcucgccaccggcaugcgcaacguccccgagaagcagacccgcggcaucuucggcgccaucgccggcuucaucgagaacggcugggagggcauggucgacggcugguacggcuuccgccaccagaacuccgagggccgcggccaggccgccgaccucaaguccacccaggccgccaucgaccagaucaacggcaagcucaaccgccucaucggcaagaccaacgagaaguuccaccagaucgagaaggaguucuccgaggucgagggccgcauccaggaccucgagaaguacgucgaggacaccaagaucgaccucugguccuacaacgccgaguuccucgucgcccucgagaaccagcacaccaucgaccucaccgacuccgagaugaacaagcucuucgagaagaccaagaagcagcuccgcgagaacgccgaggacaugggcaacggcugcuucaagaucuaccacaagugcgacaacgccugcaucggcuccauccgcaacggcaccuacgaccacaacgucuaccgcgacgaggcccucaacaaccgcuuccagaucaagggcgucgagcucaaguccggcuacaaggacuggauccucuggaucuccuucgccaucuccugcuuccuccucugcgucgcccuccucggcuucaucaugugggccugccagaagggcaacauccgcugcaacaucugcaucuga

SEQ ID NO: 109410 - RNA, 1701 nt, Artificial Sequence; identical to SEQ ID NO: 109135
  derived and/or modified CDS sequence (opt2) from hemagglutinin__InfluenzaA__ALE31863

SEQ ID NO: 109411 - RNA, 1701 nt, Artificial Sequence; identical to SEQ ID NO: 109135
  derived and/or modified CDS sequence (opt2) from hemagglutinin__InfluenzaA__ALE31865

SEQ ID NO: 109412 - RNA, 1701 nt, Artificial Sequence; identical to SEQ ID NO: 109135
  derived and/or modified CDS sequence (opt2) from hemagglutinin__InfluenzaA__ALE31866

SEQ ID NO: 109413 - RNA, 1701 nt, Artificial Sequence
  derived and/or modified CDS sequence (opt2) from hemagglutinin__InfluenzaA__ALE31867
augaagaccaucaucgcccucuccuacauccucugccucgucuucgcccagaagauccccggcaacgacaacuccaccgccacccucugccucggccaccacgccguccccaacggcaccaucgucaagaccaucaccaacgaccgcaucgaggucaccaacgccaccgagcucguccagaacuccuccaucggcgagaucugcgacuccccccaccagauccucgacggcgagaacugcacccucaucgacgcccuccucggcgacccccagugcgacggcuuccagaacaagaagugggaccucuucgucgagcgcuccaaggccuacuccaacugcuaccccuacgacguccccgacuacgccucccuccgcucccucgucgccuccuccggcacccucgaguucaacaacgaguccuucaacuggaccggcgucacccagaacggcaccuccuccgccugcauccgcaaguccuccuccuccuucuucucccgccucaacuggcucacccaccucaacuacaccuaccccgcccucaacgucaccaugcccaacaacgagcaguucgacaagcucuacaucuggggcguccaccaccccggcaccgacaaggaccagaucuuccucuacgcccgcuccuccggccgcaucaccgucuccaccaagcgcucccagcaggccgucauccccaacaucggcucccgcccccgcauccgcgacauccccucccgcaucuccaucuacuggaccaucgucaagcccggcgacauccuccucaucaacuccaccggcaaccucaucgccccccgcggcuacuucaagauccgcuccggcaaguccuccaucaugcgcuccgacgcccccaucggcaagugcaaguccgagugcaucacccccaacggcuccauccccaacgacaagcccuuccagaacgucaaccgcaucaccuacggcgccugcccccgcuacgucaagcacuccacccucaagcucgccaccggcaugcgcaacguccccgagaagcagacccgcggcaucuucggcgccaucgccggcuucaucgagaacggcugggagggcauggucgacggcugguacggcuuccgccaccagaacuccgagggccgcggccaggccgccgaccucaaguccacccaggccgccaucgaccagaucaacggcaagcucaaccgccucaucggcaagaccaacgagaaguuccaccagaucgagaaggaguucuccgaggucgagggccgcauccaggaccucgagaaguacgucgaggacaccaagaucgaccucugguccuacaacgccgagcuccucgucgcccucgagaaccagcacaccaucgaccucaccgacuccgagaugaacaagcucuucgagaagaccaagaagcagcuccgcgagaacgccgaggacaugggcaacggcugcuucaagaucuaccacaagugcgacaacgccugcaucggcuccauccgcaacggcaccuacgaccacaacgucuaccgcgacgaggcccucaacaaccgcuuccagaucaagggcgucgagcucaaguccggcuacaaggacuggauccucuggaucuccuucgccaucuccugcuuccuccucugcgucgcccuccucggcuucaucaugugggccugccagaacggcaacauccgcugcaacaucugcaucuga

SEQ ID NO: 109414 - RNA, 1701 nt, Artificial Sequence; identical to SEQ ID NO: 108477
  derived and/or modified CDS sequence (opt2) from hemagglutinin__InfluenzaA__ALE31868

SEQ ID NO: 109415 - RNA, 1701 nt, Artificial Sequence; identical to SEQ ID NO: 109413
  derived and/or modified CDS sequence (opt2) from hemagglutinin__InfluenzaA__ALE31869

SEQ ID NO: 109416 - RNA, 1701 nt, Artificial Sequence; identical to SEQ ID NO: 109413
  derived and/or modified CDS sequence (opt2) from hemagglutinin__InfluenzaA__ALE31870

SEQ ID NO: 109417 - RNA, 1701 nt, Artificial Sequence
  derived and/or modified CDS sequence (opt2) from hemagglutinin__InfluenzaA__ALE31871
augaagaccaucaucgcccucuccuacauccucugccucgucuucgcccagaagauccccggcaacgacaacuccaccgccacccucugccucggccaccacgccguccccaacggcaccaucgucaagaccaucaccaacgaccgcaucgaggucaccaacgccaccgagcucguccagaacuccuccaucggcgagaucugcaacuccccccaccagauccucgacggcgagaacugcacccucaucgacgcccuccucggcgacccccagugcgacggcuuccagaacaagaagugggaccucuucgucgagcgcuccaaggccuacuccaacugcuaccccuacgacguccccgacuacgccucccuccgcucccucgucgccuccuccggcacccucgaguucaacaacgaguccuucaacuggaccggcgucacccagaacggcaccuccuccgccugcauccgcaaguccuccuccuccuucuucucccgccucaacuggcucacccaccucaacuacaccuaccccgcccucaacgucaccaugcccaacaacgagcaguucgacaagcucuacaucuggggcguccaccaccccggcaccgacaaggaccagaucuuccucuacgcccgcuccuccggccgcaucaccgucuccaccaagcgcucccagcaggccgucauccccaacaucggcucccgcccccgcauccgcgacauccccucccgcaucuccaucuacuggaccaucgucaagcccggcgacauccuccucaucaacuccaccggcaaccucaucgccccccgcggcuacuucaagauccgcuccggcaaguccuccaucaugcgcuccgacgcccccaucggcaagugcaaguccgagugcaucacccccaacggcuccauccccaacgacaagcccuuccagaacgucaaccgcaucaccuacggcgccugcccccgcuacgucaagcacuccacccucaagcucgccaccggcaugcgcaacguccccgagaagcagacccgcggcaucuucggcgccaucgccggcuucaucgagaacggcugggagggcauggucgacggcugguacggcuuccgccaccagaacuccgagggccgcggccaggccgccgaccucaaguccacccaggccgccaucgaccagaucaacggcaagcucaaccgccucaucggcaagaccaacgagaaguuccaccagaucgagaaggaguucuccgaggucgagggccgcauccaggaccucgagaaguacgucgaggacaccaagaucgaccucugguccuacaacgccgagcuccucgucgcccucgagaaccagcacaccaucgaccucaccgacuccgagaugaacaagcucuucgagaagaccaagaagcagcuccgcgagaacgccgaggacaugggcaacggcugcuucaagaucuaccacaagugcgacaacgccugcaucggcuccauccgcaacggcaccuacgaccacaacgucuaccgcgacgaggcccucaacaaccgcuuccagaucaagggcgucgagcucaaguccggcuacaaggacuggauccucuggaucuccuucgccaucuccugcuuccuccucugcgucgcccuccucggcuucaucaugugggccugccagaagggcaacauccgcugcaacaucugcaucuga

SEQ ID NO: 109418 - RNA, 1701 nt, Artificial Sequence; identical to SEQ ID NO: 108463
  derived and/or modified CDS sequence (opt2) from hemagglutinin__InfluenzaA__ALE31872

SEQ ID NO: 109419 - RNA, 1701 nt, Artificial Sequence; identical to SEQ ID NO: 108477
  derived and/or modified CDS sequence (opt2) from hemagglutinin__InfluenzaA__ALE31873

SEQ ID NO: 109420 - RNA, 1701 nt, Artificial Sequence
  derived and/or modified CDS sequence (opt2) from hemagglutinin__InfluenzaA__ALE31874
augaagaccaucaucgcccucuccuacauccucugccucgucuucgcccagaagcuccccggcaacgacaacuccgccgccacccucugccucggccaccacgccguccccaacggcaccaucgucaagaccaucaccaacgaccgcaucgaggucaccaacgccaccgagcucguccagaacuccuccaucggcgagaucugcgacuccccccaccagauccucgacggcgagaacugcacccucaucgacgcccuccucggcgacccccagugcgacggcuuccagaacaagaagugggaccucuucgucgagcgcuccaaggcccacuccaacugcuaccccuacgacguccccgacuacgccucccuccgcucccucgucgccuccuccggcacccucgaguucaacaacgaguccuucaacugggccggcgucacccagaacggcaccuccuccuccugcauccgcggcuccaacuccuccuucuucucccgccucaacuggcucacccaccucaacuccaaguaccccgcccucaacgucaccaugcccaacaacgagcaguucgacaagcucuacaucuggggcguccaccaccccggcaccgacaaggaccagaucuuccucuacgcccaguccuccggccgcaucaccgucuccaccaagcgcucccagcaggccgucauccccaacaucggcucccgcccccgcauccgcgacauccccucccgcaucuccaucuacuggaccaucgucaagcccggcgacauccuccucaucaacuccaccggcaaccucaucgccccccgcggcuacuucaagauccgcuccggcaaguccuccaucaugcgcuccgacgcccccaucggcaagugcaaguccgagugcaucacccccaacggcuccauccccaacgacaagcccuuccagaacgucaaccgcaucaccuacggcgccugcccccgcuacgucaagcaguccacccucaagcucgccaccggcaugcgcaacguccccgagaagcagacccgcggcaucuucggcgccaucgccggcuucaucgagaacggcugggagggcauggucgacggcugguacggcuuccgccaccagaacuccgagggccgcggccaggccgccgaccucaaguccacccaggccgccaucgaccagaucaacggcaagcucaaccgccucaucggcaagaccaacgagaaguuccaccagaucgagaaggaguucuccgaggucgagggccgcauccaggaccucgagaaguacgucgaggacaccaagaucgaccucugguccuacaacgccgagcuccucgucgcccucgagaaccagcacaccaucgaccucaccgacuccgagaugaacaagcucuucgagaagaccaagaagcagcuccgcgagaacgccgaggacaugggcaacggcugcuucaagaucuaccacaagugcgacaacgccugcaucggcuccauccgcaacggcaccuacgaccacgacgucuaccgcgacgaggcccucaacaaccgcuuccagaucaagggcgucgagcucaaguccggcuacaaggacuggauccucuggaucuccuucgccaucuccugcuuccuccucugcgucgcccuccucggcuucaucaugugggccugccagaagggcaacauccgcugcaacaucugcaucuga

SEQ ID NO: 109421 - RNA, 1701 nt, Artificial Sequence; identical to SEQ ID NO: 109420
  derived and/or modified CDS sequence (opt2) from hemagglutinin__InfluenzaA__ALE31875

SEQ ID NO: 109422 - RNA, 1701 nt, Artificial Sequence; identical to SEQ ID NO: 109420
  derived and/or modified CDS sequence (opt2) from hemagglutinin__InfluenzaA__ALE31876

SEQ ID NO: 109423 - RNA, 1701 nt, Artificial Sequence
  derived and/or modified CDS sequence (opt2) from hemagglutinin__InfluenzaA__ALE31877
augaagaccaucaucgcccucuccuacauccucugccucgucuucgcccagaagcuccccgagaacgacaacuccaccgccacccucugccucggccaccacgccguccccaacggcaccaucgucaagaccaucaccuccgaccgcaucgaggucaccaacgccaccgagcucguccagaacuccuccaucggcgagaucugcgacuccccccaccagauccucgacggcaagaacugcacccucaucgacgcccuccucggcgacccccagugcgacggcuuccagaacaagaagugggaccucuucgucgagcgcuccaaggccuacuccaacugcuaccccuacgacguccccgacuacgccucccuccgcucccucgucgccuccuccggcacccucgaguucaacgacgaguccuucaacugggccggcgucacccagaacggcaccuccuccgccugcauccgcggcuccaacuccuccuucuucucccgccucaacuggcucacccacuccaacuucaaguaccccgcccucaacgucaccaugcccaacaacgagcaguucgacaagcucuacaucuggggcguccaccaccccggcaccgacaaggaccagaucuuccucuacgcccaguccuccggccgcaucaccgucuccaccaagcgcucccagcaggccgucauccccaacaucggcucccgcccccgcauccgcaacauccccucccgcaucuccaucuacuggaccaucgucaagcccggcgacauccuccucaucaacuccaccggcaaccucaucgccccccgcggcuacuucaagauccgcuccggcaaguccuccaucaugcgcuccgacgcccccaucggcaagugcaaguccgagugcaucacccccaacggcuccauccccaacgacaagcccuuccagaacgucaaccgcaucaccuacggcgccugcccccgcuacgucaagcaguccacccucaagcucgccaccggcaugcgcaacguccccgagaagcagacccgcggcaucuucggcgccaucgccggcuucaucgagaacggcugggagggcaugaaggacggcugguacggcuuccgccaccagaacuccgagggccgcggccaggccgccgaccucaaguccacccaggccgccaucgaccagaucaacggcaagcucaaccgccucaucggcaagaccaacgagaaguuccaccagaucgagaaggaguucuccgaggucgagggccgcauccaggaccucgagaaguacgucgaggacaccaagaucgaccucugguccuacaacgccgagcuccucgucgcccucgagaaccagcacaccaucgaccucaccgacuccgagaucaacaagcucuucgagaagaccaagaagcagcuccgcgagaacgccgaggacaugggcaacggcugcuucaagaucuaccacaagugcgacaacgccugcaucggcuccauccgcaacggcaccuacgaccacgacgucuaccgcgacgaggcccucaacaaccgcuuccagaucaagggcgucgagcucaaguccggcuacaaggacuggauccucuggaucuccuucgccaucuccugcuuccuccucugcgucgcccuccucggcuucaucaugugggccugccagaagggcaacauccgcugcaacaucugcaucuga

SEQ ID NO: 109424 - RNA, 1701 nt, Artificial Sequence; identical to SEQ ID NO: 108477
  derived and/or modified CDS sequence (opt2) from hemagglutinin__InfluenzaA__ALE31878

SEQ ID NO: 109425 - RNA, 1701 nt, Artificial Sequence; identical to SEQ ID NO: 108477
  derived and/or modified CDS sequence (opt2) from hemagglutinin__InfluenzaA__ALE31879

SEQ ID NO: 109426 - RNA, 1701 nt, Artificial Sequence; identical to SEQ ID NO: 108477
  derived and/or modified CDS sequence (opt2) from hemagglutinin__InfluenzaA__ALE31880

SEQ ID NO: 109427 - RNA, 1701 nt, Artificial Sequence
  derived and/or modified CDS sequence (opt2) from hemagglutinin__InfluenzaA__ALE31881
augaagaccaucaucgcccucucccacauccucugccucgucuucgcccagaagauccccggcaacgacaacuccaccgccacccucugccucggccaccacgccguccccaacggcaccaucgucaagaccaucaccaacgaccgcaucgaggucaccaacgccaccgagcucguccagaacuccuccaucggcgagaucugcgacuccccccaccagauccucgacggcgagaacugcacccucaucgacgcccuccucggcgacccccagugcgacggcuuccagaacaagaagugggaccucuucgucgagcgcuccaaggccuacuccaacugcuaccccuacgacguccccgacuacgccucccuccgcucccucgucgccuccuccggcacccucgaguucaacaacgaguccuucaacuggaccggcgucacccagaacggcaccuccuccgccugcauccgccgcuccuccuccuccuucuucucccgccucaacuggcucacccaccucaacuacaccuaccccgcccucaacgucaccaugcccaacaacgagcaguucgacaagcucuacaucuggggcguccaccaccccggcaccgacaaggaccagaucuuccucuacgcccaguccuccggccgcaucaccgucuccaccaagcgcucccagcaggccgucauccccaacaucggcucccgcccccgcauccgcgacauccccucccgcaucuccaucuacuggaccaucgucaagcccggcgacauccuccucaucaacuccaccggcaaccucgucgccccccgcggcuacuucaagauccgcuccggcaaguccuccaucaugcgcuccgacgcccccaucggcaagugcaaguccgagugcaucacccccaacggcuccauccccaacgacaagcccuuccagaacgucaaccgcaucaccuacggcgccugcccccgcuacgucaagcacuccacccucaagcucgccaccggcaugcgcaacguccccgagaagcagacccgcggcaucuucggcgccaucgccggcuucaucgagaacggcugggagggcauggucgacggcugguacggcuuccgccaccagaacuccgagggccgcggccaggccgccgaccucaaguccacccaggccgccaucgaccagaucaacggcaagcucaaccgccucaucggcaagaccaacgagaaguuccaccagaucgagaaggaguucuccgaggucgagggccgcauccaggaccucgagaaguacgucgaggacaccaagaucgaccucugguccuacaacgccgagcuccucgucgcccucgagaaccagcacaccaucgaccucaccgacuccgagaugaacaagcucuucgagaagaccaagaagcagcuccgcgagaacgccgaggacaugggcaacggcugcuucaagaucuaccacaagugcgacaacgccugcaucggcuccauccgcaacggcaccuacgaccacaacgucuaccgcgacgaggcccucaacaaccgcuuccagaucaagggcaucgagcucaaguccggcuacaaggacuggauccucuggaucuccuucgccaucuccugcuuccuccucugcgucgcccuccucggcuucaucaugugggccugccagaagggcaacauccgcugcaacaucugcaucuga

SEQ ID NO: 109428 - RNA, 1701 nt, Artificial Sequence; identical to SEQ ID NO: 108477
  derived and/or modified CDS sequence (opt2) from hemagglutinin__InfluenzaA__ALE31882

SEQ ID NO: 109429 - RNA, 1701 nt, Artificial Sequence; identical to SEQ ID NO: 108477
  derived and/or modified CDS sequence (opt2) from hemagglutinin__InfluenzaA__ALE31888

SEQ ID NO: 109430 - RNA, 1701 nt, Artificial Sequence; identical to SEQ ID NO: 108477
  derived and/or modified CDS sequence (opt2) from hemagglutinin__InfluenzaA__ALE31889

SEQ ID NO: 109431 - RNA, 1701 nt, Artificial Sequence; identical to SEQ ID NO: 109135
  derived and/or modified CDS sequence (opt2) from hemagglutinin__InfluenzaA__ALE31890

SEQ ID NO: 109432 - RNA, 1701 nt, Artificial Sequence; identical to SEQ ID NO: 109135
  derived and/or modified CDS sequence (opt2) from hemagglutinin__InfluenzaA__ALE31891

SEQ ID NO: 109433 - RNA, 1701 nt, Artificial Sequence; identical to SEQ ID NO: 108477
  derived and/or modified CDS sequence (opt2) from hemagglutinin__InfluenzaA__ALE31892

SEQ ID NO: 109434 - RNA, 1701 nt, Artificial Sequence; identical to SEQ ID NO: 108477
  derived and/or modified CDS sequence (opt2) from hemagglutinin__InfluenzaA__ALE31893

SEQ ID NO: 109435 - RNA, 1701 nt, Artificial Sequence; identical to SEQ ID NO: 109083
  derived and/or modified CDS sequence (opt2) from hemagglutinin__InfluenzaA__ALE31894

SEQ ID NO: 109436 - RNA, 1701 nt, Artificial Sequence; identical to SEQ ID NO: 108463
  derived and/or modified CDS sequence (opt2) from hemagglutinin__InfluenzaA__ALE31895

SEQ ID NO: 109437 - RNA, 1701 nt, Artificial Sequence; identical to SEQ ID NO: 108477
  derived and/or modified CDS sequence (opt2) from hemagglutinin__InfluenzaA__ALE31896

SEQ ID NO: 109438 - RNA, 1701 nt, Artificial Sequence; identical to SEQ ID NO: 108477
  derived and/or modified CDS sequence (opt2) from hemagglutinin__InfluenzaA__ALE31897

SEQ ID NO: 109439 - RNA, 1701 nt, Artificial Sequence; identical to SEQ ID NO: 108477
  derived and/or modified CDS sequence (opt2) from hemagglutinin__InfluenzaA__ALE31898

SEQ ID NO: 109440 - RNA, 1701 nt, Artificial Sequence
  derived and/or modified CDS sequence (opt2) from hemagglutinin__InfluenzaA__ALE31899
augaagaccaucaucgcccucuccuacauccucugccucgucuucgcccagaagauccccggcaacgacaacuccaccgccacccucugccucggccaccacgccguccccaacggcaccaucgucaagaccaucaccaacgaccgcaucgaggucaccaacgccaccgagcucguccagaacuccuccaucggcgagaucugcgacuccccccaccagauccucgacggcgagaacugcacccucaucgacgcccuccucggcgacccccagugcgacggcuuccagaacaagaagugggaccucuucgucgagcgcuccaaggccuacuccaacugcuaccccuacgacguccccgacuacgccucccuccgcucccucgucgccuccuccggcacccucgaguucaacaacgaguccuucaacuggaccggcgucacccagaacggcaccuccuccgccugcauccgcaaguccuccuccuccuucuucucccgccucaacuggcucacccaccucaacuacaccuaccccgcccucaacgucaccaugcccaacaacgagcaguucgacaagcucuacaucuggggcguccaccaccccggcaccgacaaggaccagaucuuccucuacgcccgcuccuccggccgcaucaccgucuccaccaagcgcucccagcaggccgucauccccaacaucggcucccgcccccgcauccgcgacauccccucccgcaucuccaucuacuggaccaucgucaagcccggcgacauccuccucaucaacuccaccggcaaccucaucgccccccgcggcuacuucaagauccgcuccggcaaguccuccaugaugcgcuccgacgcccccaucggcaagugcaaguccgagugcaucacccccaacggcuccauccccaacgacaagcccuuccagaacgucaaccgcaucaccuacggcgccugcccccgcuacgucaagcacuccacccucaagcucgccaccggcaugcgcaacguccccgagaagcagacccgcggcaucuucggcgccaucgccggcuucaucgagaacggcugggagggcauggucgacggcugguacggcuuccgccaccagaacuccgagggccgcggccaggccgccgaccucaaguccacccaggccgccaucgaccagaucaacggcaagcucaaccgccucaucggcaagaccaacgagaaguuccaccagaucgagaaggaguucuccgaggucgagggccgcauccaggaccucgagaaguacgucgaggacaccaagaucgaccucugguccuacaacgccgagcuccucgucgcccucgagaaccagcacaccaucgaccucaccgacuccgagaugaacaagcucuucgagaagaccaagaagcagcuccgcgagaacgccgaggacaugggcaacggcugcuucaagaucuaccacaagugcgacaacgccugcaucggcuccauccgcaacggcaccuacgaccacaacgucuaccgcgacgaggcccucaacaaccgcuuccagaucaagggcgucgagcucaaguccggcuacaaggacuggauccucuggaucuccuucgccaucuccugcuuccuccucugcgucgcccuccucggcuucaucaugugggccugccagaagggcaacauccgcugcaacaucugcaucuga

SEQ ID NO: 109441 - RNA, 1701 nt, Artificial Sequence; identical to SEQ ID NO: 109083
  derived and/or modified CDS sequence (opt2) from hemagglutinin__InfluenzaA__ALE31901

SEQ ID NO: 109442 - RNA, 1701 nt, Artificial Sequence
  derived and/or modified CDS sequence (opt2) from hemagglutinin__InfluenzaA__ALE31902
augaagaccaucaucgcccucuccuacauccucugccucgucuucgcccagaagauccccggcaacgacaacuccaccgccacccucugccucggccaccacgccguccccaacggcaccaucgucaagaccaucaccaacgaccgcaucgaggucaccaacgccaccgagcucguccagaacuccuccaucggcgagaucugcgacuccccccaccagauccucgacggcgagaacugcacccucaucgacgcccuccucggcgacccccagugcgacggcuuccagaacaagaagugggaccucuucgucgagcgcuccaaggccuacuccaacugcuaccccuacgacguccccgacuacgccucccuccgcucccucgucgccuccuccggcacccucgaguucaacaacgaguccuucaacuggaccggcgucacccagaacggcaccuccuccgccugcauccgccgcuccuccuccuccuucuucucccgccucaacuggcucacccaccucaacuacaccuaccccgcccucaacgucaccaugcccaacaacgagcaguucgacaagcucuacaucuggggcguccaccaccccggcaccgacaaggaccagaucuuccucuacgcccaguccuccggccgcaucaccgucuccaccaagcgcucccagcaggccgucauccccaacaucggcucccgcccccgcauccgcgacauccccucccgcaucuccaucuacuggaccaucgucaagcccggcgacauccuccucaucaacuccaccggcaaccucaucgccccccgcggcuacuucaagauccgcuccggcaaguccuccaucaugcgcuccgacgcccccaucggcaagugcaaguccgagugcaucacccccaacggcuccauccccaacgacaagcccuuccagaacgucaaccgcaucaccuacggcgccugcccccgcuacgucaagcacuccacccucaagcucgccaccggcaugcgcaacguccccgagaagcagacccgcggcaucuucggcgccaucgccggcuucaucgagaacggcugggagggcauggucgacggcugguacggcuuccgccaccagaacuccgagggccgcggccaggccgccgaccucaaguccacccaggccgccaucgaccagaucaacggcaagcucaaccgccucaucggcaagaccaacgagaaguuccaccagaucgagaaggaguucuccgaggucgagggccgcauccaggaccucgagaaguacgucgaggacaccaagaucgaccucugguccuacaacgccgagcuccucgucgcccucgagaaccagcacaccaucgaccucaccgacuccgagaugaacaagcucuucgagcgcaccaagaagcagcuccgcgagaacgccgaggacaugggcaacggcugcuucaagaucuaccacaagugcgacaacgccugcaucggcuccauccgcaacggcaccuacgaccacaacgucuaccgcgacgaggcccucaacaaccgcuuccagaucaagggcgucgagcucaaguccggcuacaaggacuggauccucuggaucuccuucgccaucuccugcuuccuccucugcgucgcccuccucggcuucaucaugugggccugccagaagggcaacauccgcugcaacaucugcaucuga

SEQ ID NO: 109443 - RNA, 1701 nt, Artificial Sequence; identical to SEQ ID NO: 108477
  derived and/or modified CDS sequence (opt2) from hemagglutinin__InfluenzaA__ALE31903

SEQ ID NO: 109444 - RNA, 1701 nt, Artificial Sequence; identical to SEQ ID NO: 108477
  derived and/or modified CDS sequence (opt2) from hemagglutinin__InfluenzaA__ALE31904

SEQ ID NO: 109445 - RNA, 1701 nt, Artificial Sequence
  derived and/or modified CDS sequence (opt2) from hemagglutinin__InfluenzaA__ALE31905
augaagaccaucaucgcccucggcuacauccucugccucggcuucgcccagaagauccccggcaacgacaacuccaccgccacccucugccucggccaccacgccguccccaacggcaccaucgucaagaccaucaccaacgaccgcaucgaggucaccaacgccaccgagcucguccagaacuccuccaucggcgagaucugcgacuccccccacaagauccucgacggcgagaacugcacccucaucgacgcccuccucggcgacccccagugcgacggcuuccagaacaagaagugggaccucuucgucgagcgcuccaaggccuacuccaacugcuaccccuacgacguccccgacuacgccucccuccgcucccucgucgccuccuccggcacccucgaguucaacaacgaguccuucaacuggaccggcgucacccagaacggcaccuccuccgccugcauccgccgcuccuccuccuccuucuucucccgccucaacuggcucacccaccucaacuacaccuaccccgcccucaacgucaccaugcccaacaacgagcaguucgacaagcucuacaucuggggcguccaccaccccggcaccgacaaggaccagaucuuccucuacgcccaguccuccggccgcaucaccgucuccaccaagcgcucccagcaggccgucauccccaacaucggcucccgcccccgcauccgcgacauccccucccgcaucuccaucuacuggaccaucgucaagcccggcgacauccuccucaucaacuccaccggcaaccucaucgccccccgcggcuacuucaagauccgcuccggcaaguccuccaucaugcgcuccgacgcccccaucggcaagugcaaguccgagugcaucacccccaacggcuccauccccaacgacaagcccuuccagaacgucaaccgcaucaccuacggcgccugcccccgcuacgucaagcacuccacccucaagcucgccaccggcaugcgcaacguccccgagaagcagacccgcggcaucuucggcgccaucgccggcuucaucgagaacggcugggagggcauggucgacggcugguacggcuuccgccaccagaacuccgagggccgcggccaggccgccgaccucaaguccacccaggccgccaucgaccagaucaacggcaagcucaaccgccucaucggcaagaccaacgagaaguuccaccagaucgagaaggaguucuccgaggucgagggccgcauccaggaccucgagaaguacgucgaggacaccaagaucgaccucugguccuacaacgccgagcuccucgucgcccucgagaaccagcacaccaucgaccucaccgacuccgagaugaacaagcucuucgagaagaccaagaagcagcuccgcgagaacgccgaggacaugggcaacggcugcuucaagaucuaccacaagugcgacaacgccugcaucggcuccauccgcaacggcaccuacgaccacaacgucuaccgcgacgaggcccucaacaaccgcuuccagaucaagggcgucgagcucaaguccggcuacaaggacuggauccucuggaucuccuucgccaucuccugcuuccuccucugcgucgcccuccucggcuucaucaugugggccugccagaagggcaacauccgcugcaacaucugcaucuga

SEQ ID NO: 109446 - RNA, 1701 nt, Artificial Sequence; identical to SEQ ID NO: 108477
  derived and/or modified CDS sequence (opt2) from hemagglutinin__InfluenzaA__ALE31906

SEQ ID NO: 109447 - RNA, 1701 nt, Artificial Sequence
  derived and/or modified CDS sequence (opt2) from hemagglutinin__InfluenzaA__ALE31907
augaagaccaucaucgcccucuccuacauccucugccucgucuucgcccagaagauccccggcaacgacaacuccaccgccacccucugccucggccaccacgccguccccaacggcaccaucgucaagaccaucaccaacgaccgcaucgaggucaccaacgccaccgagcucguccagaacuccuccaucggcgagaucugcgacuccccccaccagauccucgacggcgagaacugcacccucaucgacgcccuccucggcgacccccagugcgacggcuuccagaacaagaagugggaccucuucgucgagcgcuccaaggccuacuccaacugcuaccccuacgacguccccgacuacgccucccuccgcucccucgucgccuccuccggcacccucgaguucaacaacgaguccuucaacuggaccggcgucacccagaacggcaccuccuccgccugcauccgccgcuccuccuccuccuucuucucccgccucaacuggcucacccaccucaacuacaaguaccccgcccucaacgucaccaugcccaacaacgagcaguucgacaagcucuacaucuggggcguccaccaccccggcaccgacaaggaccagaucuuccucuacgcccaguccuccggccgcaucaccgucuccaccaagcgcucccagcaggccgucauccccaacaucggcucccgcccccgcauccgcgacauccccucccgcaucuccaucuacuggaccaucgucaaguccggcgacauccuccucaucaacuccaccggcaaccucaucgccccccgcggcuacuucaagauccgcuccggcaaguccuccaucaugcgcuccgacgcccccaucggcaagugcaaguccgagugcaucacccccaacggcuccauccccaacgacaagcccuuccagaacgucaaccgcaucaccuacggcgccugcccccgcuacgucaagcacuccacccucaagcucgccaccggcaugcgcaacguccccgagaagcagacccgcggcaucuucggcgccaucgccggcuucaucgagaacggcugggagggcauggucgacggcugguacggcuuccgccaccagaacuccgagggccgcggccaggccgccgaccucaaguccacccaggccgccaucgaccagaucaacggcaagcucaaccgccucaucggcaagaccaacgagaaguuccaccagaucgagaaggaguucuccgaggucgagggccgcauccaggaccucgagaaguacgucgaggacaccaagaucgaccucugguccuacaacgccgagcuccucgucgcccucgagaaccagcacaccaucgaccucaccgacuccgagaugaacaagcucuucgagaagaccaagaagcagcuccgcgagaacgccgaggacaugggcaacggcugcuucaagaucuaccacaagugcgacaacgccugcaucggcuccauccgcaacggcaccuacgaccacaacgucuaccgcgacgaggcccucaacaaccgcuuccagaucaagggcgucgagcucaaguccggcuacaaggacuggauccucuggaucuccuucgccaucuccugcuuccuccucugcgucgcccuccucggcuucaucaugugggccugccagaagggcaacauccgcugcaacaucugcaucuga

SEQ ID NO: 109448 - RNA, 1701 nt, Artificial Sequence; identical to SEQ ID NO: 108477
  derived and/or modified CDS sequence (opt2) from hemagglutinin__InfluenzaA__ALE31908

SEQ ID NO: 109449 - RNA, 1701 nt, Artificial Sequence
  derived and/or modified CDS sequence (opt2) from hemagglutinin__InfluenzaA__ALE31909
augaagaccaucaucgcccucuccuacauccucugccucgucuucgcccagaagauccccggcaacgacaacuccaccgccacccucugccucggccaccacgccguccccaacggcaccaucgucaagaccaucaccaacgaccgcaucgaggucaccaacgccaccgagcucguccagaacuccuccaucggcgagaucugcgacuccccccaccagauccucgacggcgagaacugcacccucaucgacgcccuccucggcgacccccagugcgacggcuuccagaacaagaagugggaccucuucgucgagcgcuccaaggccuacuccaacugcuaccccuacgacguccccgacuacgccucccuccgcucccucgucgccuccuccggcacccucgaguucaacaacgaguccuucaacuggaccggcgucacccagaacggcaccuccuccgccugcauccgccgcuccuccuccuccuucuucucccgccucaacuggcucacccaccucaacuacaccuaccccgcccucaacgucaccaugcccaacaacgagcaguucgacaagcucuacaucuggggcguccaccaccccggcaccgacaaggaccagaucuuccucuacgcccaguccuccggccgcaucaccgucuccaccaagcgcucccagcaggccgucauccccaacaucggcucccgcccccgcauccgcgacauccccucccgcaucuccaucuacuggaccaucgucaaguccggcgacauccuccucaucaacuccaccggcaaccucaucgccccccgcggcuacuucaagauccgcuccggcaaguccuccaucaugcgcuccgacgcccccaucggcaagugcaaguccgagugcaucacccccaacggcuccauccccaacgacaagcccuuccagaacgucaaccgcaucaccuacggcgccugcccccgcuacgucaagcacuccacccucaagcucgccaccggcaugcgcaacguccccgagaagcagacccgcggcaucuucggcgccaucgccggcuucaucgagaacggcugggagggcauggucgacggcugguacggcuuccgccaccagaacuccgagggccgcggccaggccgccgaccucaaguccacccaggccgccaucgaccagaucaacggcaagcucaaccgccucaucggcaagaccaacgagaaguuccaccagaucgagaaggaguucuccgaggucgagggccgcauccaggaccucgagaaguacgucgaggacaccaagaucgaccucugguccuacaacgccgagcuccucgucgcccucgagaaccagcacaccaucgaccucaccgacuccgagaugaacaagcucuucgagaagaccaagaagcagcuccgcgagaacgccgaggacaugggcaacggcugcuucaagaucuaccacaagugcgacaacgccugcaucggcuccauccgcaacggcaccuacgaccacaacgucuaccgcgacgaggcccucaacaaccgcuuccagaucaagggcgucgagcucaaguccggcuacaaggacuggauccucuggaucuccuucgccaucuccugcuuccuccucugcgucgcccuccucggcuucaucaugugggccugccagaagggcaacauccgcugcaacaucugcaucuga

SEQ ID NO: 109450 - RNA, 1701 nt, Artificial Sequence; identical to SEQ ID NO: 108477
  derived and/or modified CDS sequence (opt2) from hemagglutinin__InfluenzaA__ALE31910

SEQ ID NO: 109451 - RNA, 1701 nt, Artificial Sequence; identical to SEQ ID NO: 109400
  derived and/or modified CDS sequence (opt2) from hemagglutinin__InfluenzaA__ALE31912

SEQ ID NO: 109452 - RNA, 1701 nt, Artificial Sequence
  derived and/or modified CDS sequence (opt2) from hemagglutinin__InfluenzaA__ALE31913
augaagaccaucaucgcccucggcuacauccucugccucgucuucgcccagaagauccccggcaacgacaacuccaccgccacccucugccucggccaccacgccguccccaacggcaccaucgucaagaccaucaccaacgaccgcaucgaggucaccaacgccaccgagcucguccagaacuccuccaucggcgagaucugcgacuccccccacaagauccucgacggcgagaacugcacccucaucgacgcccuccucggcgacccccagugcgacggcuuccagaacaagaagugggaccucuucgucgagcgcuccaaggccuacuccaacugcuaccccuacgacguccccgacuacgccucccuccgcucccucgucgccuccuccggcacccucgaguucaacaacgaguccuucaacuggaccggcgucacccagaacggcaccuccuccgccugcauccgccgcuccuccuccuccuucuucucccgccucaacuggcucacccaccucaacuacaccuaccccgcccucaacgucaccaugcccaacaacgagcaguucgacaagcucuacaucuggggcguccaccaccccggcaccgacaaggaccagaucuuccucuacgcccaguccuccggccgcaucaccgucuccaccaagcgcucccagcaggccgucauccccaacaucggcucccgcccccgcauccgcgacauccccucccgcaucuccaucuacuggaccaucgucaagcccggcgacauccuccucaucaacuccaccggcaaccucaucgccccccgcggcuacuucaagauccgcuccggcaaguccuccaucaugcgcuccgacgcccccaucggcaagugcaaguccgagugcaucacccccaacggcuccauccccaacgacaagcccuuccagaacgucaaccgcaucaccuacggcgccugcccccgcuacgucaagcacuccacccucaagcucgccaccggcaugcgcaacguccccgagaagcagacccgcggcaucuucggcgccaucgccggcuucaucgagaacggcugggagggcauggucgacggcugguacggcuuccgccaccagaacuccgagggccgcggccaggccgccgaccucaaguccacccaggccgccaucgaccagaucaacggcaagcucaaccgccucaucggcaagaccaacgagaaguuccaccagaucgagaaggaguucuccgaggucgagggccgcauccaggaccucgagaaguacgucgaggacaccaagaucgaccucugguccuacaacgccgagcuccucgucgcccucgagaaccagcacaccaucgaccucaccgacuccgagaugaacaagcucuucgagaagaccaagaagcagcuccgcgagaacgccgaggacaugggcaacggcugcuucaagaucuaccacaagugcgacaacgccugcaucgaguccauccgcaacggcaccuacgaccacaacgucuaccgcgacgaggcccucaacaaccgcuuccagaucaagggcgucgagcucaaguccggcuacaaggacuggauccucuggaucuccuucgccaucuccugcuuccuccucugcgucgcccuccucggcuucaucaugugggccugccagaagggcaacauccgcugcaacaucugcaucuga

SEQ ID NO: 109453 - RNA, 1701 nt, Artificial Sequence; identical to SEQ ID NO: 108477
  derived and/or modified CDS sequence (opt2) from hemagglutinin__InfluenzaA__ALE31914

SEQ ID NO: 109454 - RNA, 1701 nt, Artificial Sequence
  derived and/or modified CDS sequence (opt2) from hemagglutinin__InfluenzaA__ALE31915
augaagaccaucaucgcccucuccuacauccucugccucgucuucgcccagaagauccccggcaacgacaacuccaccgccacccucugccucggccaccacgccguccccaacggcaccaucgucaagaccaucaccaacgaccgcaucgaggucaccaacgccaccgagcucguccagaacuccuccaucggcgagaucugcgacuccccccaccagauccucgacggcgagaacugcacccucaucgacgcccuccucggcgacccccagugcgacggcuuccagaacaagaagugggaccucuucgucgagcgcuccaaggccuacuccaacugcuaccccuacgacguccccgaguacgccucccuccgcucccucgucgccuccuccggcacccucgaguucaacaacgaguccuucaacuggaccggcgucacccagaacggcaccuccuccgccugcauccgccgcuccuccuccuccuucuucucccgccucaacuggcucacccaccucaacuacaccuaccccgcccucaacgucaccaugcccaacaacgagcaguucgacaagcucuacaucuggggcguccaccaccccggcaccgacaaggaccagaucuuccucuacgcccaguccuccggccgcaucaccgucuccaccaagcgcucccagcaggccgucauccccaacaucggcucccgcccccgcauccgcgacauccccucccgcaucuccaucuacuggaccaucgucaagcccggcgacauccuccucaucaacuccaccggcaaccucaucgccccccgcggcuacuucaagauccgcuccggcaaguccuccaucaugcgcuccgacgcccccaucggcaagugcaaguccgagugcaucacccccaacggcuccauccccaacgacaagcccuuccagaacgucaaccgcaucaccuacggcgccugcccccgcuacgucaagcacuccacccucaagcucgccaccggcaugcgcaacguccccgagaagcagacccgcggcaucuucggcgccaucgccggcuucaucgagaacggcugggagggcauggucgacggcugguacggcuuccgccaccagaacuccgagggccgcggccaggccgccgaccucaaguccacccaggccgccaucgaccagaucaacggcaagcucaaccgccucaucggcaagaccaacgagaaguuccaccagaucgagaaggaguucuccgaggucgagggccgcauccaggaccucgagaaguacgucgaggacaccaagaucgaccucugguccuacaacgccgagcuccucgucgcccucgagaaccagcacaccaucgaccucaccgacuccgagaugaacaagcucuucgagaagaccaagaagcagcuccgcgagaacgccgaggacaugggcaacggcugcuucaagaucuaccacaagugcgacaacgccugcaucggcuccauccgcaacggcaccuacgaccacaacgucuaccgcgacgaggcccucaacaaccgcuuccagaucaagggcgucgagcucaaguccggcuacaaggacuggauccucuggaucuccuucgccaucuccugcuuccuccucugcgucgcccuccucggcuucaucaugugggccugccagaagggcaacauccgcugcaacaucugcaucuga

SEQ ID NO: 109455 - RNA, 1701 nt, Artificial Sequence; identical to SEQ ID NO: 108477
  derived and/or modified CDS sequence (opt2) from hemagglutinin__InfluenzaA__ALE31916

SEQ ID NO: 109456 - RNA, 1701 nt, Artificial Sequence; identical to SEQ ID NO: 108477
  derived and/or modified CDS sequence (opt2) from hemagglutinin__InfluenzaA__ALE31917

SEQ ID NO: 109457 - RNA, 1701 nt, Artificial Sequence; identical to SEQ ID NO: 109010
  derived and/or modified CDS sequence (opt2) from hemagglutinin__InfluenzaA__ALE31918

SEQ ID NO: 109458 - RNA, 1701 nt, Artificial Sequence; identical to SEQ ID NO: 109135
  derived and/or modified CDS sequence (opt2) from hemagglutinin__InfluenzaA__ALE31920

SEQ ID NO: 109459 - RNA, 1701 nt, Artificial Sequence; identical to SEQ ID NO: 108477
  derived and/or modified CDS sequence (opt2) from hemagglutinin__InfluenzaA__ALE31921

SEQ ID NO: 109460 - RNA, 1701 nt, Artificial Sequence; identical to SEQ ID NO: 108477
  derived and/or modified CDS sequence (opt2) from hemagglutinin__InfluenzaA__ALE31922

SEQ ID NO: 109461 - RNA, 1701 nt, Artificial Sequence; identical to SEQ ID NO: 109021
  derived and/or modified CDS sequence (opt2) from hemagglutinin__InfluenzaA__ALE31923

SEQ ID NO: 109462 - RNA, 1701 nt, Artificial Sequence; identical to SEQ ID NO: 108477
  derived and/or modified CDS sequence (opt2) from hemagglutinin__InfluenzaA__ALE31924

SEQ ID NO: 109463 - RNA, 1701 nt, Artificial Sequence; identical to SEQ ID NO: 108477
  derived and/or modified CDS sequence (opt2) from hemagglutinin__InfluenzaA__ALE31925

SEQ ID NO: 109464 - RNA, 1701 nt, Artificial Sequence
  derived and/or modified CDS sequence (opt2) from hemagglutinin__InfluenzaA__ALE31926
augaagaccaucaucgcccucuccuacauccucugccucgucuucgcccagaagauccccggcaacgacaacuccaccgccacccucugccucggccaccacgccguccccaacggcaccaucgucaagaccaucaccaacgaccgcaucgaggucaccaacgccaccgagcucguccagaacuccuccaucggcgagaucugcgacuccccccaccagauccucgacggcgagaacugcacccucaucgacgcccuccucggcgacccccagugcgacggcuuccagaacaagaagugggaccucuucgucgagcgcuccaaggccuacuccaacugcuaccccuacgacguccccgacuacgccucccuccgcucccucgucgccuccuccggcacccucgaguucaacaacgagggcuucaacuggaccggcgucacccagaacggcaccuccuccgccugcauccgccgcuccuccuccuccuucuucucccgccucaacuggcucacccaccucaacuacaaguaccccgcccucaacgucaccaugcccaacaacgagcaguucgacaagcucuacaucuggggcguccaccaccccggcaccgacaaggaccagaucuuccucuacgcccaguccuccggccgcaucaccgucuccaccaagcgcucccagcaggccgucauccccaacaucggcucccgcccccgcauccgcgacauccccucccgcaucuccaucuacuggaccaucgucaagcccggcgacauccuccucaucaacuccaccggcaaccucaucgccccccgcggcuacuucaagauccgcuccggcaaguccuccaucaugcgcuccgacgcccccaucggcaagugcaaguccgagugcaucacccccaacggcuccauccccaacgacaagcccuuccagaacgucaaccgcaucaccuacggcgccugcccccgcuacgucaagcacuccacccucaagcucgccaccggcaugcgcaacguccccgagaagcagacccgcggcaucuucggcgccaucgccggcuucaucgagaacggcugggagggcauggucgacggcugguacggcuuccgccaccagaacuccgagggccgcggccaggccgccgaccucaaguccacccaggccgccaucgaccagaucaacggcaagcucaaccgccucaucggcaagaccaacgagaaguuccaccagaucgagaaggaguucuccgaggucgagggccgcauccaggaccucgagaaguacgucgaggacaccaagaucgaccucugguccuacaacgccgagcuccucgucgcccucgagaaccagcacaccaucgaccucaccgacuccgagaugaacaagcucuucgagaagaccaagaagcagcuccgcgagaacgccgaggacaugggcaacggcugcuucaagaucuaccacaagugcgacaacgccugcaucggcuccauccgcaacggcaccuacgaccacaacgucuaccgcgacgaggcccucaacaaccgcuuccagaucaagggcgucgagcucaaguccggcuacaaggacuggauccucuggaucuccuucgccaucuccugcuuccuccucugcgucgcccuccucggcuucaucaugugggccugccagaagggcaacauccgcugcaacaucugcaucuga

SEQ ID NO: 109465 - RNA, 1701 nt, Artificial Sequence; identical to SEQ ID NO: 108477
  derived and/or modified CDS sequence (opt2) from hemagglutinin__InfluenzaA__ALE31927

SEQ ID NO: 109466 - RNA, 1701 nt, Artificial Sequence
  derived and/or modified CDS sequence (opt2) from hemagglutinin__InfluenzaA__ALE31928
augaagaccaucaucgcccucuccuacauccucugccucgucuucgcccagaagcuccccggcaacgacaacuccaccgccacccucugccucggccaccacgccguccccaacggcaccaucgucaagaccaucaccaacgaccgcaucgaggucaccaacgccaccgagcucguccagaacuccuccaucggcgagaucugcgacuccccccaccagauccucgacggcgagaacugcacccucaucgacgcccuccucggcgacccccagugcgacggcuuccagaacaagaagugggaccucuucgucgagcgcuccaaggccuacuccaacugcuaccccuacgacguccccgacuacgccucccuccgcucccucgucgccuccuccggcacccucgaguucaacaacgaguccuucaacugggccggcgucacccagaacggcaccuccuccgccugcauccgcggcuccaacuccuccuucuucucccgccucaacuggcucacccacuccaacuucaaguaccccgcccucaacgucaccaugcccaacaacgagcaguucgacaagcucuacaucuggggcguccaccaccccggcaccgacaaggaccagaucuuccucuacgcccaguccuccggccgcaucaccgucuccaccaagcgcucccagcaggccgucauccccaacaucggcucccgcccccgcauccgcgacauccccucccgcaucuccaucuacuggaccaucgucaagcccggcgacauccuccucaucaacuccaccggcaaccucaucgccccccgcggcuacuucaagauccgcuccggcaaguccuccaucaugcgcuccgacgcccccaucggcaagugcaaguccgagugcaucacccccaacggcuccauccccaacgacaagcccuuccagaacgucaaccgcaucaccuacggcgccugcccccgcuacgucaagcaguccacccucaagcucgccaccggcaugcgcaacguccccgagaagcagacccgcggcaucuucggcgccaucgccggcuucaucgagaacggcugggagggcauggucgacggcugguacggcuuccgccaccagaacuccgagggccgcggccaggccgccgaccucaaguccacccaggccgccaucgaccagaucaacggcaagcucaaccgccucaucggcaagaccaacgagaaguuccaccagaucgagaaggaguucuccgaggucgagggccgcauccaggaccucgagaaguacgucgaggacaccaagaucgaccucugguccuacaacgccgagcuccucgucgcccucgagaaccagcacaccaucgaccucaccgacuccgagaugaacaagcucuucgagaagaccaagaagcagcuccgcgagaacgccgaggacaugggcaacggcugcuucaagaucuaccacaagugcgacaacgccugcaucggcuccauccgcaacggcaccuacgaccacgacgucuaccgcgacgaggcccucaacaaccgcuuccagaucaagggcgucgagcucaaguccggcuacaaggacuggauccucuggaucuccuucgccaucuccugcuuccuccucugcgucgcccuccucggcuucaucaugugggccugccagaagggcaacauccgcugcaacaucugcaucuga

SEQ ID NO: 109467 - RNA, 1701 nt, Artificial Sequence; identical to SEQ ID NO: 109113
  derived and/or modified CDS sequence (opt2) from hemagglutinin__InfluenzaA__ALE31930

SEQ ID NO: 109468 - RNA, 1701 nt, Artificial Sequence; identical to SEQ ID NO: 108477
  derived and/or modified CDS sequence (opt2) from hemagglutinin__InfluenzaA__ALE31931

SEQ ID NO: 109469 - RNA, 1701 nt, Artificial Sequence; identical to SEQ ID NO: 108477
  derived and/or modified CDS sequence (opt2) from hemagglutinin__InfluenzaA__ALE31932

SEQ ID NO: 109470 - RNA, 1701 nt, Artificial Sequence
  derived and/or modified CDS sequence (opt2) from hemagglutinin__InfluenzaA__ALE31933
augaagaccaucaucgcccucuccuacauccucugccucgucuacgcccagaagauccccggcaacgacaacuccaccgccacccucugccucggccaccacgccguccccaacggcaccaucgucaagaccaucaccaacgaccgcaucgaggucaccaacgccaccgagcucguccagaacuccuccaucggcgagaucugcgacuccccccaccagauccucgacggcgagaacugcacccucaucgacgcccuccucggcgacccccagugcgacggcuuccagaacaagaagugggaccucuucgucgagcgcuccaaggccuacuccaacugcuaccccuacgacguccccgacuacgccucccuccgcucccucgucgccuccuccggcacccucgaguucaacaacgaguccuucaacuggaccggcgucacccagaacggcaccuccuccgccugcauccgccgcuccuccuccuccuucuucucccgccucaacuggcucacccaccucaaguacaccuaccccgcccucaacgucaccaugcccaacaacgagcaguucgacaagcucuacaucuggggcguccaccaccccggcaccgacaaggaccagaucuuccucuacgcccaguccuccggccgcaucaccgucuccaccaagcgcucccagcaggccgucauccccaacaucggcucccgcccccgcauccgcgacauccccucccgcaucuccaucuacuggaccaucgucaagcccggcgacauccuccucaucaacuccaccggcaaccucaucgccccccgcggcuacuucaagauccgcuccggcaaguccuccaucaugcgcuccgacgcccccaucggcaagugcaaguccgagugcaucacccccaacggcuccauccccaacgacaagcccuuccagaacgucaaccgcaucaccuacggcgccugcccccgcuacgucaagcacuccacccucaagcucgccaccggcaugcgcaacguccccgagaagcagacccgcggcaucuucggcgccaucgccggcuucaucgagaacggcugggagggcauggucgacggcugguacggcuuccgccaccagaacuccgagggccgcggccaggccgccgaccucaaguccacccaggccgccaucgaccagaucaacggcaagcucaaccgccucaucggcaagaccaacgagaaguuccaccagaucgagaaggaguucuccgaggucgagggccgcauccaggaccucgagaaguacgucgaggacaccaagaucgaccucugguccuacaacgccgagcuccucgucgcccucgagaaccagcacaccaucgaccucaccgacuccgagaugaacaagcucuucgagaagaccaagaagcagcuccgcgagaacgccgaggacaugggcaacggcugcuucaagaucuaccacaagugcgacaacgccugcaucggcuccauccgcaacggcaccuacgaccacaacgucuaccgcgacgaggcccucaacaaccgcuuccagaucaagggcgucgagcucaaguccggcuacaaggacuggauccucuggaucuccuucgccaucuccugcuuccuccucugcgucgcccuccucggcuucaucaugugggccugccagaagggcaacauccgcugcaacaucugcaucuga

SEQ ID NO: 109471 - RNA, 1701 nt, Artificial Sequence
  derived and/or modified CDS sequence (opt2) from hemagglutinin__InfluenzaA__ALE31934
augaagaccaucaucgcccucuccuacauccucugccucgucuucgcccagaagauccccggcaacgacaacuccaccgccacccucugccucggccaccacgccguccccaacggcaccaucgucaagaccaucaccaacgaccgcaucgaggucaccaacgccaccgagcucguccagaacuccuccaucggcgagaucugcgacuccccccaccagauccucgacggcgagaacugcacccucaucgacgcccuccucggcgacccccagugcgacggcuuccagaacaagaagugggaccucuucgucgagcgcuccaaggccuacuccaacugcuaccccuacgacguccccgacuacgccucccuccgcucccucgucgccuccuccggcacccucgaguucaacaacgaguccuucaacuggaccggcgucacccagaacggcaccuccuccgccugcauccgcaaguccuccuccuccuucuucucccgccucaacuggcucacccaccucaacuacaccuaccaggcccucaacgucaccaugcccaacaacgagcaguucgacaagcucuacaucuggggcguccaccaccccggcaccgacaaggaccagaucuuccucuacgcccgcuccuccggccgcaucaccgucuccaccaagcgcucccagcaggccgucauccccaacaucggcucccgcccccgcauccgcgacauccccucccgcaucuccaucuacuggaccaucgucaagcccggcgacauccuccucaucaacuccaccggcaaccucaucgccccccgcggcuacuucaagauccgcuccggcaaguccuccaucaugcgcuccgacgcccccaucggcaagugcaaguccgagugcaucacccccaacggcuccauccccaacgacaagcccuuccagaacgucaaccgcaucaccuacggcgccugcccccgcuacgucaagcacuccacccucaagcucgccaccggcaugcgcaacauccccgagaagcagacccgcggcaucuucggcgccaucgccggcuucaucgagaacggcugggagggcauggucgacggcugguacggcuuccgccaccagaacuccgagggccgcggccaggccgccgaccucaaguccacccaggccgccaucgaccagaucaacggcaagcucaaccgccucaucggcaagaccaacgagaaguuccaccagaucgagaaggaguucuccgaggucgagggccgcauccaggaccucgagaaguacgucgaggacaccaagaucgaccucugguccuacaacgccgagcuccucgucgcccucgagaaccagcacaccaucgaccucaccgacuccgagaugaacaagcucuucgagaagaccaagaagcagcuccgcgagaacgccgaggacaugggcaacggcugcuucaagaucuaccacaagugcgacaacgccugcaucggcuccauccgcaacggcaccuacgaccacaacgucuaccgcgacgaggcccucaacaaccgcuuccagaucaagggcgucgagcucaaguccggcuacaaggacuggauccucuggaucuccuucgccaucuccugcuuccuccucugcgucgcccuccucggcuucaucaugugggccugccagaagggcaacauccgcugcaacaucugcaucuga

SEQ ID NO: 109472 - RNA, 1701 nt, Artificial Sequence; identical to SEQ ID NO: 108477
  derived and/or modified CDS sequence (opt2) from hemagglutinin__InfluenzaA__ALE31935

SEQ ID NO: 109473 - RNA, 1701 nt, Artificial Sequence; identical to SEQ ID NO: 109259
  derived and/or modified CDS sequence (opt2) from hemagglutinin__InfluenzaA__ALE31936

SEQ ID NO: 109474 - RNA, 1701 nt, Artificial Sequence
  derived and/or modified CDS sequence (opt2) from hemagglutinin__InfluenzaA__ALE31937
augaagaccaucaucgcccucuccuacauccucugccucgucuucgcccagaagcuccccgagaacgacaacuccaccgccacccucugccucggccaccacgccguccccaacggcaccaucgucaagaccaucaccaacgaccgcaucgaggucaccaacgccaccgagcucguccagaacuccuccaucggcgagaucugcgacuccccccaccagauccucgacggcgagaacugcacccucaucgacgcccuccucggcgacccccagugcgacggcuuccagaacaagaagugggaccucuucgucgagcgcuccaaggccuacuccaacugcuaccccuacgacguccccgacuacgccucccuccgcucccucgucgccuccuccggcacccucgaguucaacaacgaguccuucaacugggccggcgucacccagaacggcaccuccuccuccugcauccgcggcuccaacuccuccuucuucucccgccucaacuggcucacccaccucaacuccaaguaccccgcccucaacgucaccaugcccaacaacgagcaguucgacaagcucuacaucuggggcguccaccaccccggcaccgacaaggaccagaucuuccucuacgcccagcccuccggccgcaucaccgucuccaccaagcgcucccagcaggccgucauccccaacaucggcucccgcccccgcauccgcgacauccccucccgcaucuccaucuacuggaccaucgucaagcccggcgacauccuccucaucaacuccaccggcaaccucaucgccccccgcggcuacuucaagauccgcuccggcaaguccuccaucaugcgcuccgacgcccccaucggcaagugcaaguccgagugcaucacccccaacggcuccauccccaacgacaagcccuuccagaacgucaaccgcaucaccuacggcgccugcccccgcuacgucaagcaguccacccucaagcucgccaccggcaugcgcaacguccccgagcgccagacccgcggcaucuucggcgccaucgccggcuucaucgagaacggcugggagggcauggucgacggcugguacggcuuccgccaccagaacuccgagggccgcggccaggccgccgaccucaaguccacccaggccgccaucgaccagaucaacggcaagcucaaccgccucaucggcaagaccaacgagaaguuccaccagaucgagaaggaguucuccgaggucgagggccgcauccaggaccucgagaaguacgucgaggacaccaagaucgaccucugguccuacaacgccgagcuccucgucgcccucgagaaccagcacaccaucgaccucaccgacuccgagaugaacaagcucuucgagaagaccaagaagcagcuccgcgagaacgccgaggacaugggcaacggcugcuucaagaucuaccacaagugcgacaacgccugcaucggcuccauccgcaacggcaccuacgaccacgacgucuaccgcgacgaggcccucaacaaccgcuuccagaucaagggcgucgagcucaaguccggcuacaaggacuggauccucuggaucuccuucgccaucuccugcuuccuccucugcgucgcccuccucggcuucaucaugugggccugccagaagggcaacauccgcugcaacaucugcaucuga

SEQ ID NO: 109475 - RNA, 1701 nt, Artificial Sequence; identical to SEQ ID NO: 108477
  derived and/or modified CDS sequence (opt2) from hemagglutinin__InfluenzaA__ALE31938

SEQ ID NO: 109476 - RNA, 1701 nt, Artificial Sequence; identical to SEQ ID NO: 109083
  derived and/or modified CDS sequence (opt2) from hemagglutinin__InfluenzaA__ALE31939

SEQ ID NO: 109477 - RNA, 1701 nt, Artificial Sequence; identical to SEQ ID NO: 108477
  derived and/or modified CDS sequence (opt2) from hemagglutinin__InfluenzaA__ALE31941

SEQ ID NO: 109478 - RNA, 1701 nt, Artificial Sequence; identical to SEQ ID NO: 109034
  derived and/or modified CDS sequence (opt2) from hemagglutinin__InfluenzaA__ALE31943

SEQ ID NO: 109479 - RNA, 1701 nt, Artificial Sequence
  derived and/or modified CDS sequence (opt2) from hemagglutinin__InfluenzaA__ALE31944
augaagaccaucaucgcccucuccuacauccucugccucgucuucgcccagaagcuccccgagaacgacaacuccaccgccacccucugccucggccaccacgccguccccaacggcaccaucgucaagaccaucaccuccgaccgcaucgaggucaccaacgccaccgagcucguccagaacuccuccaucggcgagaucugcgacuccccccaccagauccucgacggcaagaacugcacccucaucgacgcccuccucggcgacccccagugcgacggcuuccagaacaagaagugggaccucuucgucgagcgcuccaaggccuacuccaacugcuaccccuacgacguccccgacuacgccucccuccgcucccucgucgccuccuccggcacccucgaguucaacgacgaguccuucaacugggccggcgucacccagaacggcaccuccuccgccugcauccgcggcuccaacuccuccuucuucucccgccucaacuggcucacccacuccaacuucaaguaccccgcccucaacgucaccaugcccaacaacgagcaguucgacaagcucuacaucuggggcguccaccaccccggcaccgacaaggaccagaucuuccucuacgcccaguccuccggccgcaucaccgucuccaccaagcgcucccagcaggccgucauccccaacaucggcucccgcccccgcauccgcgacauccccucccgcaucuccaucuacuggaccaucgucaagcccggcgacauccuccucaucaacuccaccggcaaccucaucgccccccgcggcuacuucaagauccgcuccggcaaguccuccaucaugcgcuccgacgcccccaucggcaagugcaaguccgagugcaucacccccaacggcuccauccccaacgacaagcccuuccagaacgucaaccgcaucaccuacggcgccugcccccgcuacgucaagcaguccacccucaagcucgccaccggcaugcgcaacguccccgagaagcagacccgcggcaucuucggcgccaucgccggcuucaucgagaacggcugggagggcaugaaggacggcugguacggcuuccgccaccagaacuccgagggccgcggccaggccgccgaccucaaguccacccaggccgccaucgaccagaucaacggcaagcucaaccgccucaucggcaagaccaacgagaaguuccaccagaucgagaaggaguucuccgaggucgagggccgcauccaggaccucgagaaguacgucgaggacaccaagaucgaccucugguccuacaacgccgagcuccucgucgcccucgagaaccagcacaccaucgaccucaccgacuccgagaugaacaagcucuucgagaagaccaagaagcagcuccgcgagaacgccgaggacaugggcaacggcugcuucaagaucuaccacaagugcgacaacgccugcaucggcuccauccgcaacggcaccuacgaccacgacgucuaccgcgacgaggcccucaacaaccgcuuccagaucaagggcgucgagcucaaguccggcuacaaggacuggauccucuggaucuccuucgccaucuccugcuuccuccucugcgucgcccuccucggcuucaucaugugggccugccagaagggcaacauccgcugcaacaucugcaucuga

SEQ ID NO: 109480 - RNA, 1701 nt, Artificial Sequence
  derived and/or modified CDS sequence (opt2) from hemagglutinin__InfluenzaA__ALE31945
augaagaccaucaucgcccucuccuacauccucugccucgucuucgcccagaagauccccggcaacgacaacuccaccgccacccucugccucggccaccacgccguccccaacggcaccaucgucaagaccaucaccaacgaccgcaucgaggucaccaacgccaccgagcucguccagaacuccuccaucggcgagaucugcgacuccccccaccagauccucgacggcgagaacugcacccucaucgacgcccuccucggcgacccccagugcgacggcuuccagaacaagaagugggaccucuucgucgagcgcuccaaggccuacuccaacugcuaccccuacgacguccccgacuacgccucccuccgcucccucgucgccuccuccggcacccucgaguucaacaacgaguccuucaacuggaccggcgucacccagaacggcaccuccuccgccugcauccgccgcuccuccuccuccuucuucucccgccucaacuggcucacccaccucaacuacaccuaccccgcccucaacgucaccaugcccaacaacgagcaguucgacaagcucuacaucuggggcguccaccaccccggcaccgacaaggaccagaucuuccucuacgcccaguccuccggccgcaucaccgucuccaccaagggcucccagcaggccgucauccccaacgucggcucccgcccccgcauccgcgacauccccucccgcaucuccaucuacuggaccaucgucaagcccggcgacauccuccucaucaacuccaccggcaaccucaucgccccccgcggcuacuucaagauccgcuccggcaaguccuccaucaugcgcuccgacgcccccaucggcaagugcaaguccgagugcaucacccccaacggcuccauccccaacgacaagcccuuccagaacgucaaccgcaucaccuacggcgccugcccccgcuacgucaagcacuccacccucaagcucgccaccggcaugcgcaacguccccgagaagcagacccgcggcaucuucggcgccaucgccggcuucaucgagaacggcugggagggcauggucgacggcugguacggcuuccgccaccagaacuccgagggccgcggccaggccgccgaccucaaguccacccaggccgccaucgaccagaucaacggcaagcucaaccgccucaucggcaagaccaacgagaaguuccaccagaucgagaaggaguucuccgaggucgagggccgcauccaggacaucgagaaguacgucgaggacaccaagaucgaccucugguccuacaacgccgagcuccucgucgcccucgagaaccagcacaccaucgaccucaccgacuccgagaugaacaagcucuucgagaagaccaagaagcagcuccgcgagaacgccgaggacaugggcaacggcugcuucaagaucuaccacaagugcgacaacgccugcaucggcuccauccgcaacggcaccuacgaccacaacgucuaccgcgacgaggcccucaacaaccgcuuccagaucaagggcgucgagcucaaguccggcuacaaggacuggauccucuggaucuccuucgccaucuccugcuuccuccucugcgucgcccuccucggcuucaucaugugggccugccagaagggcaacauccgcugcaacaucugcaucuga

SEQ ID NO: 109481 - RNA, 1701 nt, Artificial Sequence; identical to SEQ ID NO: 109135
  derived and/or modified CDS sequence (opt2) from hemagglutinin__InfluenzaA__ALE31946

SEQ ID NO: 109482 - RNA, 1701 nt, Artificial Sequence; identical to SEQ ID NO: 109135
  derived and/or modified CDS sequence (opt2) from hemagglutinin__InfluenzaA__ALE31947

SEQ ID NO: 109483 - RNA, 1701 nt, Artificial Sequence
  derived and/or modified CDS sequence (opt2) from hemagglutinin__InfluenzaA__ALE31948
augaagaccaucaucgcccucuccuacauccucugccucgucuucgcccagaagauccccggcaacgacaacuccaccgccacccucugccucggccaccacgccguccccaacggcaccaucgucaagaccaucaccaacgaccgcaucgaggucaccaacgccaccgagcucguccagaacuccuccaucggcgagaucugcgacuccccccaccagauccucgacggcgagaacugcacccucaucgacgcccuccucggcgacccccagugcgacggcuuccagaacaagaagugggaccucuucgucgagcgcuccaaggccuacuccaacugcuaccccuacgacguccccgacuacgccucccuccgcucccucgucgccuccuccggcacccucgaguucaacaacgaguccuucaacuggaccggcgucacccagaacggcaccuccuccgccugcauccgcaaguccuccuccuccuucuucucccgccucaacuggcucacccaccucaacuacaccuaccccgcccucaacgucaccaugcccaacaacgagcaguucgacaagcucuacaucuggggcguccaccaccccggcaccgacaaggaccagaucuuccucuacgcccgcuccuccggccgcaucaccgucuccaccaagcgcucccagcaggccgucauccccaacaucggcucccgcccccgcauccgcgacauccccucccgcaucuccaucuacuggaccaucgucaagcccggcgacauccuccucaucaacuccaccggcaaccucaucgccccccgcggcuacuucaagauccgcuccggcaaguccuccaucaugcgcuccgacgcccccaucggcaagugcaaguccgagugcaucacccccaacggcuccauccccaacgacaagcccuuccagaacgucaaccgcaucaccuacggcgccugcccccgcuacgucaagcacuccacccucaagcucgccaccggcaugcgcaacguccccgagaagcagacccgcggcaucuucggcgccaucgccggcuucaucgagaacggcugggagggcauggucgacggcugguacggcuuccgccaccagaacuccgagggccgcggccaggccgccgaccucaaguccacccaggccgccaucgaccagaucaacggcaagcucaaccgccucgucggcaagaccaacgagaaguuccaccagaucgagaaggaguucuccgaggucgagggccgcauccaggaccucgagaaguacgucgaggacaccaagaucgaccucugguccuacaacgccgaguuccucgucgcccucgagaaccagcacaccaucgaccucaccgacuccgagaugaacaagcucuucgagaagaccaagaagcagcuccgcgagaacgccgaggacaugggcaacggcugcuucaagaucuaccacaagugcgacaacgccugcaucggcuccauccgcaacggcaccuacgaccacaacgucuaccgcgacgaggcccucaacaaccgcuuccagaucaagggcgucgagcucaaguccggcuacaaggacuggauccucuggaucuccuucgccaucuccugcuuccuccucugcgucgcccuccucggcuucaucaugugggccugccagaagggcaacauccgcugcaacaucugcaucuga

SEQ ID NO: 109484 - RNA, 1701 nt, Artificial Sequence; identical to SEQ ID NO: 109135
  derived and/or modified CDS sequence (opt2) from hemagglutinin__InfluenzaA__ALE31949

SEQ ID NO: 109485 - RNA, 1701 nt, Artificial Sequence; identical to SEQ ID NO: 108477
  derived and/or modified CDS sequence (opt2) from hemagglutinin__InfluenzaA__ALE31950

SEQ ID NO: 109486 - RNA, 1701 nt, Artificial Sequence; identical to SEQ ID NO: 109021
  derived and/or modified CDS sequence (opt2) from hemagglutinin__InfluenzaA__ALE31951

SEQ ID NO: 109487 - RNA, 1701 nt, Artificial Sequence; identical to SEQ ID NO: 108477
  derived and/or modified CDS sequence (opt2) from hemagglutinin__InfluenzaA__ALE31952

SEQ ID NO: 109488 - RNA, 1701 nt, Artificial Sequence
  derived and/or modified CDS sequence (opt2) from hemagglutinin__InfluenzaA__ALE31953
augaagaccaucaucgcccucuccuacauccucugccucgucuucgcccagaagauccccggcaacgacaacuccaccgccacccucugccucggccaccacgccguccccaacggcaccaucgucaagaccaucaccaacgaccgcaucgaggucaccaacgccaccgagcucguccagaacuccuccaucggcgagaucugcgacuccccccaccagauccucgacggcgagaacugcacccucaucgacgcccuccucggcgacccccagugcgacggcuuccagaacaagaagugggaccucuucgucgagcgcuccaaggccuacuccaacugcuaccccuacgacguccccgacuacgccucccuccgcucccucgucgccuccuccggcacccucgaguucaacaacgaguccuucaacuggaccggcgucacccagaacggcaccuccuccgccugcauccgcaaguccuccuccuccuucuucucccgccucaacuggcucacccaccucaacuacaccuaccccgcccucaacgucaccaugcccaacaacgagcaguucgacaagcucuacaucuggggcguccaccaccccggcaccgacaaggaccagaucuuccucuucgcccgcuccuccggccgcaucaccgucuccaccaagcgcucccagcaggccgucauccccaacaucggcucccgcccccgcauccgcgacauccccucccgcaucuccaucuacuggaccaucgucaagcccggcgacauccuccucaucaacuccaccggcaaccucaucgccccccgcggcuacuucaagauccgcuccggcaaguccuccaucaugcgcuccgacgcccccaucggcaagugcaaguccgagugcaucacccccaacggcuccauccccaacgacaagcccuuccagaacgucaaccgcaucaccuacggcgccugcccccgcuacgucaagcacuccacccucaagcucgccaccggcaugcgcaacguccccgagaagcagacccgcggcaucuucggcgccaucgccggcuucaucgagaacggcugggagggcauggucgacggcugguacggcuuccgccaccagaacuccgagggccgcggccaggccgccgaccucaaguccacccaggccgccaucgaccagaucaacggcaagcucaaccgccucaucggcaagaccaacgagaaguuccaccagaucgagaaggaguucuccgaggucgagggccgcauccaggaccucgagaaguacgucgaggacaccaagaucgaccucugguccuacaacgccgagcuccucgucgcccucgagaaccagcacaccaucgaccucaccgacuccgagaugaacaagcucuucgagaagaccaagaagcagcuccgcgagaacgccgaggacaugggcaacggcugcuucaagaucuaccacaagugcgacaacgccugcaucggcuccauccgcaacggcaccuacgaccacaacgucuaccgcgacgaggcccucaacaaccgcuuccagaucaagggcgucgagcucaaguccggcuacaaggacuggauccucuggaucuccuucgccaucuccugcuuccuccucugcgucgcccuccucggcuucaucaugugggccugccagaagggcaacauccgcugcaacaucugcaucuga

SEQ ID NO: 109489 - RNA, 1701 nt, Artificial Sequence
  derived and/or modified CDS sequence (opt2) from hemagglutinin__InfluenzaA__ALE31954
augaagaccaucaucgcccucuccuacauccucugccucgucuucgcccagaagcuccccggcaacgacaacuccaccgccacccucugccucggccaccacgccguccccaacggcaccaucgucaagaccaucaccaacgaccgcaucgaggucaccaacgccaccgagcucguccagaacuccuccaucggcgagaucugcgacuccccccaccagauccucgacggcaagaacugcacccucaucgacgcccuccucggcgacccccagugcgacggcuuccagaacaagcgcugggaccucuucgucgagcgcuccaaggccuacuccaacugcuaccccuacgacguccccgacuacgccucccuccgcucccucgucgccuccuccggcacccucgaguucaacgacgaguccuucaacugggccggcgucacccagaacggcaccuccuccgccugcauccgcggcuccaacuccuccuucuucucccgccucaacuggcucacccacuccaacuucaaguaccccgcccucaacgucaccaugcccaacaacgagcaguucgacaagcucuacaucuggggcguccaccaccccggcaccgacaaggaccagaucuuccucuacgcccacuccuccggccgcaucaccgucuccaccaagcgcucccagcaggccgucauccccaacgucggcucccgcccccgcauccgcaacauccccucccgcaucuccaucuacuggaccaucgucaagcccggcgacauccuccucaucaacuccaccggcaaccucaucgccccccgcggcuacuucaagauccaguccggcaaguccuccaucaugcgcuccgacgcccccaucggcaagugcaaguccgagugcaucacccccaacggcuccauccccaacgacaagcccuuccagaacgucaaccgcaucaccuacggcgccugcccccgcuacgucaagcaguccacccucaagcucgccaccggcaugcgcaacguccccgagaagcagacccgcggcaucuucggcgccaucgccggcuucaucgagaacggcugggagggcaugaaggacggcugguacggcuuccgccaccagaacuccgagggccgcggccaggccgccgaccucaaguccacccaggccgccaucgaccagaucaacggcaagcucaaccgccucgucggcaagaccaacgagaaguuccaccagaucgagaaggaguucuccgaggucgagggccgcauccaggaccucgagaaguacgucgaggacaccaagaucgaccucugguccuacaacgccgagcuccucgucgcccucgagaaccagcacaccaucgaccucaccgacuccgagaugaacaagcucuucgagaagaccaagaagcagcuccgcgagaacgccgaggacaugggcaacggcugcuucaagaucuaccacaagugcgacaacgccugcaucggcuccauccgcaacggcaccuacgaccacuacgucuaccgcgacgaggcccucaacaaccgcuuccagaucaagggcgucgagcucaaguccggcuacaaggacuggauccucuggaucuccuucgccaucuccugcuuccuccucugcgucgcccuccucggcuucaucaugugggccugccagaagggcaacauccgcugcaacaucugcaucuga

SEQ ID NO: 109490 - RNA, 1701 nt, Artificial Sequence; identical to SEQ ID NO: 108477
  derived and/or modified CDS sequence (opt2) from hemagglutinin__InfluenzaA__ALE31955

SEQ ID NO: 109491 - RNA, 1701 nt, Artificial Sequence
  derived and/or modified CDS sequence (opt2) from hemagglutinin__InfluenzaA__ALE31956
augaagaccaucaucgcccucuccuacauccucugccucgucuucgcccagaagauccccggcaacgacaacuccaccgccacccucugccucggccaccacgccguccccaacggcaccaucgucaagaccaucaccaacgaccgcaucgaggucaccaacgccaccgagcucguccagaacuccuccaucggcgagaucugcaacuccccccaccagauccucgacggcgagaacugcacccucaucgacgcccuccucggcgacccccagugcgacggcuuccagaacaagaagugggaccucuucgucgagcgcuccaaggccuacuccaacugcuaccccuacgacguccccgacuacgccucccuccgcucccucgucgccuccuccggcacccucgaguucaacaacgaguccuucaacuggaccggcgucacccagaacggcaccuccuccgccugcauccgccgcuccuccuccuccuucuucucccgccucaacuggcucacccaccucaacuacaccuaccccgcccucaacgucaccaugcccaacaacgagcaguucgacaagcucuacaucuggggcguccaccaccccggcaccgacaaggaccagaucuuccucuacgcccaguccuccggccgcaucaccgucuccaccaagcgcucccagcaggccgucauccccaacaucggcucccgcccccgcauccgcgacauccccucccgcaucuccaucuacuggaccaucgucaagcccggcgacauccuccucaucaacuccaccggcaaccucaucgccccccgcggcuacuucaagauccgcuccggcaaguccuccaucaugcgcuccgacgcccccaucggcaagugcaaguccgagugcaucacccccaacggcuccauccccaacgacaagcccuuccagaacgucaaccgcaucaccuacggcgccugcccccgcuacgucaagcacuccacccucaagcucgccaccggcaugcgcaacguccccgagaagcagacccgcggcaucuucggcgccaucgccggcuucaucgagaacggcugggagggcauggucgacggcugguacggcuuccgccaccagaacuccgagggccgcggccaggccgccgaccucaaguccacccaggccgccaucgaccagaucaacggcaagcucaaccgccucaucggcaagaccaacgagaaguuccaccagaucgagaaggaguucuccgaggucgagggccgcauccaggaccucgagaaguacgucgaggacaccaagaucgaccucugguccuacaacgccgagcuccucgucgcccucgagaaccagcacaccaucgaccucaccgacuccgagaugaacaagcucuucgagaagaccaagaagcagcuccgcgagaacgccgaggacaugggcaacggcugcuucaagaucuaccacaagugcgacaacgccugcaucggcuccauccgcaacggcaccuacgaccacaacgucuaccgcgacgaggcccucaacaaccgcuuccagaucaagggcgucgagcucaaguccggcuacaaggacuggauccucuggaucuccuucgccaucuccugcuuccuccucugcgucgcccuccucggcuucaucaugugggccugccagaagggcaacauccgcugcaacaucugcaucuga

SEQ ID NO: 109492 - RNA, 1701 nt, Artificial Sequence; identical to SEQ ID NO: 109083
  derived and/or modified CDS sequence (opt2) from hemagglutinin__InfluenzaA__ALE31957

SEQ ID NO: 109493 - RNA, 1701 nt, Artificial Sequence
  derived and/or modified CDS sequence (opt2) from hemagglutinin__InfluenzaA__ALE31958
augaagaccaucaucgcccucuccuacauccucugccucgucuucgcccagaagauccccggcaacgacaacuccaccgccacccucugccucggccaccacgccguccccaacggcaccaucgucaagaccaucaccaacgaccgcaucgaggucaccaacgccaccgagcucguccagaacuccuccaucggcgagaucugcgacuccccccaccagauccucgacggcgagaacugcacccucaucgacgcccuccucggcgacccccagugcgacggcuuccagaacaagaagugggaccucuucgucgagcgcuccaaggccuacuccaacugcuaccccuacgacguccccgacuacgccucccuccgcucccucgucgccuccuccggcacccucgaguucaacaacgaguccuucaacuggaccggcgucacccagaacggcaccuccuccgccugcauccgccgcuccuccuccuccuucuucucccgccucaacuggcucacccaccucaacuacaccuaccccgcccucaacgucaccaugcccaacaacgagcaguucgacaagcucuacaucuggggcguccaccaccccggcaccgacaaggaccagaucuuccucuacgcccaguccuccggccgcaucaccgucuccaccaagcgcucccagcaggccgucauccccaacaucggcuccaagccccgcauccgcgacauccccucccgcaucuccaucuacuggaccaucgucaagcccggcgacauccuccucaucaacuccaccggcaaccucaucgccccccgcggcuacuucaagauccgcuccggcaaguccuccaucaugcgcuccgacgcccccaucggcaagugcaaguccgagugcaucacccccaacggcuccauccccaacgacaagcccuuccagaacgucaaccgcaucaccuacggcgccugcccccgcuacgucaagcacuccacccucaagcucgccaccggcaugcgcaacguccccgagaagcagacccgcggcaucuucggcgccaucgccggcuucaucgagaacggcugggagggcauggucgacggcugguacggcuuccgccaccagaacuccgagggccgcggccaggccgccgaccucaaguccacccaggccgccaucgaccagaucaacggcaagcucaaccgccucaucggcaagaccaacgagaaguuccaccagaucgagaaggaguucuccgaggucgagggccgcauccaggaccucgagaaguacgucgaggacaccaagaucgaccucugguccuacaacgccgagcuccucgucgcccucgagaaccagcacaccaucgaccucaccgacuccgagaugaacaagcucuucgagaagaccaagaagcagcuccgcgagaacgccgaggacaugggcaacggcugcuucaagaucuaccacaagugcgacaacgccugcaucggcuccauccgcaacggcaccuacgaccacaacgucuaccgcgacgaggcccucaacaaccgcuuccagaucaagggcgucgagcucaaguccggcuacaaggacuggauccucuggaucuccuucgccaucuccugcuuccuccucugcgucgcccuccucggcuucaucaugugggccugccagaagggcaacauccgcugcaacaucugcaucuga

SEQ ID NO: 109494 - RNA, 1701 nt, Artificial Sequence
  derived and/or modified CDS sequence (opt2) from hemagglutinin__InfluenzaA__ALE31959
augaagaccaucaucgcccucuccuacauccucugccucgucuucgcccagaagauccccggcaacgacaacuccaccgccacccucugccucggccaccacgccguccccaacggcaccaucgucaagaccaucaccaacgaccgcaucgaggucaccaacgccaccgagcucguccagaacuccuccaucggcgagaucugcgacuccccccaccagauccucgacggcgagaacugcacccucaucgacgcccuccucggcgacccccagugcgacggcuuccagaacaagaagugggaccucuucgucgagcgcuccaaggccuacuccaacugcuaccccuacgacguccccgacuacgccucccuccgcucccucgucgccuccuccggcacccucgaguucaacaacgaguccuucaacuggaccggcgucacccagaacggcaccuccuccgccugcauccgcaaguccuccuccuccuucuucucccgccucaacuggcucacccaccucaacuacgccuaccccgcccucaacgucaccaugcccaacaacgagcaguucgacaagcucuacaucuggggcguccaccaccccggcaccgacaaggaccagaucuuccucuacgcccgcuccuccggccgcaucaccgucuccaccaagcgcucccagcaggccgucauccccaacaucggcucccgcccccgcauccgcgacauccccucccgcaucuccaucuacuggaccaucgucaagcccggcgacauccuccucaucaacuccaccggcaaccucaucgccccccgcggcuacuucaagauccgcuccggcaaguccuccaucaugcgcuccgacgcccccaucggcaagugcaaguccgagugcaucacccccaacggcuccauccccaacgacaagcccuuccagaacgucaaccgcaucaccuacggcgccugcccccgcuacgucaagcacuccacccucaagcucgccaccggcaugcgcaacguccccgagaagcagacccgcggcaucuucggcgccaucgccggcuucaucgagaacggcugggagggcauggucgacggcugguacggcuuccgccaccagaacuccgagggccgcggccaggccgccgaccucaaguccacccaggccgccaucgaccagaucaacggcaagcucaaccgccucaucggcaagaccaacgagaaguuccaccagaucgagaaggaguucuccgaggucgagggccgcauccaggaccucgagaaguacgucgaggacaccaagaucgaccucugguccuacaacgccgagcuccucgucgcccucgagaaccagcacaccaucgaccucaccgacuccgagaugaacaagcucuucgagaagaccaagaagcagcuccgcgagaacgccgaggacaugggcaacggcugcuucaagaucuaccacaagugcgacaacgccugcaucggcuccauccgcaacggcaccuacgaccacaacgucuaccgcgacgaggcccucaacaaccgcuuccagaucaagggcgucgagcucaaguccggcuacaaggacuggauccucuggaucuccuucgccaucuccugcuuccuccucugcgucgcccuccucggcuucaucaugugggccugccagaagggcaacauccgcugcaacaucugcaucuga

SEQ ID NO: 109495 - RNA, 1701 nt, Artificial Sequence; identical to SEQ ID NO: 108477
  derived and/or modified CDS sequence (opt2) from hemagglutinin__InfluenzaA__ALE31960

SEQ ID NO: 109496 - RNA, 1701 nt, Artificial Sequence; identical to SEQ ID NO: 108666
  derived and/or modified CDS sequence (opt2) from hemagglutinin__InfluenzaA__ALE31961

SEQ ID NO: 109497 - RNA, 1701 nt, Artificial Sequence
  derived and/or modified CDS sequence (opt2) from hemagglutinin__InfluenzaA__ALE31962
augaagaccaucaucgcccucuccuacauccucugccucgucuucgcccagaagauccccggcaacgacaacuccaccgccacccucugccucggccaccacgccguccccaacggcaccaucgucaagaccaucaccaacgaccgcaucgaggucaccaacgccaccgagcucguccagaacuccuccaucggcgagaucugcgacuccccccaccagauccucgacggcgagaacugcacccucaucgacgcccuccucggcgacccccagugcgacggcuuccagaacaagaagugggaccucuucgucgagcgcuccaaggccuacuccaacugcuaccccuacgacguccccgacuacgccucccuccgcucccucgucgccuccuccggcacccucgaguucaacaacgaguccuucaacuggaccggcgucacccagaacggcaccuccuccgccugcauccgccgcuccuccuccuccuucuucucccgccucaacuggcucacccaccucaacuacaccuaccccgcccucaacgucaccaugcccaacaacgagcaguucgacaagcucuacaucuggggcguccaccaccccggcaccgacaaggaccagaucuuccucuacgcccaguccuccggccgcaucaccgucuccaccaagcgcucccagcaggccgucauccccaacaucggcucccgcccccgcauccgcgacauccccucccgcauguccaucuacuggaccaucgucaagcccggcgacauccuccucaucaacuccaccggcaaccucaucgccccccgcggcuacuucaagauccgcuccggcaaguccuccaucaugcgcuccgacgcccccaucggcaagugcaaguccgagugcaucacccccaacggcuccauccccaacgacaagcccuuccagaacgucaaccgcaucaccuacggcgccugcccccgcuacgucaagcacuccacccucaagcucgccaccggcaugcgcaacguccccgagaagcagacccgcggcaucuucggcgccaucgccggcuucaucgagaacggcugggagggcauggucgacggcugguacggcuuccgccaccagaacuccgagggccgcggccaggccgccgaccucaaguccacccaggccgccaucgaccagaucaacggcaagcucaaccgccucaucggcaagaccaacgagaaguuccaccagaucgagaaggaguucuccgaggucgagggccgcauccaggaccucgagaaguacgucgaggacaccaagaucgaccucugguccuacaacgccgagcuccucgucgcccucgagaaccagcacaccaucgaccucaccgacuccgagaugaacaagcucuucgagaagaccaagaagcagcuccgcgagaacgccgaggacaugggcaacggcugcuucaagaucuaccacaagugcgacaacgccugcaucggcuccauccgcaacggcaccuacgaccacaacgucuaccgcgacgaggcccucaacaaccgcuuccagaucaagggcgucgagcucaaguccggcuacaaggacuggauccucuggaucuccuucgccaucuccugcuuccuccucugcgucgcccuccucggcuucaucaugugggccugccagaagggcaacauccgcugcaacaucugcaucuga

SEQ ID NO: 109498 - RNA, 1701 nt, Artificial Sequence
  derived and/or modified CDS sequence (opt2) from hemagglutinin__InfluenzaA__ALE31963
augaagaccaucaucgcccucuccuacauccucugccucgucuucgcccagaagauccccggcaacgacaacuccaccgccacccucugccucggccaccacgccguccccaacggcaccaucgucaagaccaucaccaacgaccgcaucgaggucaccaacgccaccgagcucguccagaacuccuccaucggcgagaucugcgacuccccccaccagauccucgacggcgagaacugcacccucaucgacgcccuccucggcgacccccagugcgacggcuuccagaacaagaagugggaccucuucgucgagcgcuccaaggccuacuccaacugcuaccccuacgacguccccgacuacgccucccuccgcucccucgucgccuccuccggcacccucgaguucaacaacgaguccuucaacuggaccggcgucacccagaacggcaccuccuccgccugcauccgccgcuccuccuccuccuucuucucccgccucaacuggcucacccaccucaacuacaccuaccccgcccucaacgucaccaugcccaacaacgagcaguucgacaagcucuacaucuggggcguccaccaccccggcaccgacaaggaccagaccuuccucuacgcccaguccuccggccgcaucaccgucuccaccaagcgcucccagcaggccgucauccccaacaucggcucccgcccccgcauccgcgacauccccucccgcaucuccaucuacuggaccaucgucaagcccggcgacauccuccucaucaacuccaccggcaaccucaucgccccccgcggcuacuucaagauccgcuccggcaaguccuccaucaugcgcuccgacgcccccaucggcaagugcaaguccgagugcaucacccccaacggcuccauccccaacgacaagcccuuccagaacgucaaccgcaucaccuacggcgccugcccccgcuacgucaagcacuccacccucaagcucgccaccggcaugcgcaacguccccgagaagcagacccgcggcaucuucggcgccaucgccggcuucaucgagaacggcugggagggcauggucgacggcugguacggcuuccgccaccagaacuccgagggccgcggccaggccgccgaccucaaguccacccaggccgccaucgaccagaucaacggcaagcucaaccgccucaucggcaagaccaacgagaaguuccaccagaucgagaaggaguucuccgaggucgagggccgcauccaggaccucgagaaguacgucgaggacaccaagaucgaccucugguccuacaacgccgagcuccucgucgcccucgagaaccagcacaccaucgaccucaccgacuccgagaugaacaagcucuucgagaagaccaagaagcagcuccgcgagaacgccgaggacaugggcaacggcugcuucaagaucuaccacaagugcgacaacgccugcaucggcuccauccgcaacggcaccuacaaccacaacgucuaccgcgacgaggcccucaacaaccgcuuccagaucaagggcgucgagcucaaguccggcuacaaggacuggauccucuggaucuccuucgccaucuccugcuuccuccucugcgucgcccuccucggcuucaucaugugggccugccagaagggcaacauccgcugcaacaucugcaucuga

SEQ ID NO: 109499 - RNA, 1701 nt, Artificial Sequence
  derived and/or modified CDS sequence (opt2) from hemagglutinin__InfluenzaA__ALE31964
augaagaccaucaucgcccucuccuacauccucugccucgucuucgcccagaagauccccggcaacgacaacuccaccgccacccucugccucggccaccacgccguccccaacggcaccaucgucaagaccaucaccaacgaccgcaucgaggucaccaacgccaccgagcucguccagaacuccuccaucggcgagaucugcgacuccccccaccagauccucgacggcgagaacugcacccucaucgacgcccuccucggcgacccccagugcgacggcuuccagaacaagaagugggaccucuucgucgagcgcuccaaggccuacuccaacugcuaccccuacuacguccccgacuacgccucccuccgcucccucgucgccuccuccggcacccucgaguucaacaacgaguccuucaacuggaccggcgucacccagaacggcaccuccuccgccugcauccgccgcuccuccuccuccuucuucucccgccucaacuggcucacccaccucaacuacaccuaccccgcccucaacgucaccaugcccaacaacgagcaguucgacaagcucuacaucuggggcguccaccaccccggcaccgacaaggaccagaucuuccucuacgcccaguccuccggccgcaucaccgucuccaccaagcgcucccagcaggccgucauccccaacaucggcucccgcccccgcauccgcgacauccccucccgcaucuccaucuacuggaccaucgucaagcccggcgacauccuccucaucaacuccaccggcaaccucaucgccccccgcggcuacuucaagauccaguccggcaaguccuccaucaugcgcuccgacgcccccaucggcaagugcaaguccgagugcaucacccccaacggcuccauccccaacgacaagcccuuccagaacgucaaccgcaucaccuacggcgccugcccccgcuacgucaagcacuccacccucaagcucgccaccggcaugcgcaacguccccgagaagcagacccgcggcaucuucggcgccaucgccggcuucaucgagaacggcugggagggcauggucgacggcugguacggcuuccgccaccagaacuccgagggccgcggccaggccgccgaccucaaguccacccaggccgccaucgaccagaucaacggcaagcucaaccgccucaucggcaagaccaacgagaaguuccaccagaucgagaaggaguucuccgaggucgagggccgcauccaggaccucgagaaguacgucgaggacaccaagaucgaccucugguccuacaacgccgagcuccucgucgcccucgagaaccagcacaccaucgaccucaccgacuccgagaugaacaagcucuucgagaagaccaagaagcagcuccgcgagaacgccgaggacaugggcaacggcugcuucaagaucuaccacaagugcgacaacgccugcaucggcuccauccgcaacggcaccuacgaccacaacgucuaccgcgacgaggcccucaacaaccgcuuccagaucaagggcgucgagcucaaguccggcuacaaggacuggauccucuggaucuccuucgccaucuccugcuuccuccucugcgucgcccuccucggcuucaucaugugggccugccagaagggcaacauccgcugcaacaucugcaucuga

SEQ ID NO: 109500 - RNA, 1701 nt, Artificial Sequence; identical to SEQ ID NO: 108477
  derived and/or modified CDS sequence (opt2) from hemagglutinin__InfluenzaA__ALE31965

SEQ ID NO: 109501 - RNA, 1701 nt, Artificial Sequence; identical to SEQ ID NO: 109135
  derived and/or modified CDS sequence (opt2) from hemagglutinin__InfluenzaA__ALE31966

SEQ ID NO: 109502 - RNA, 1701 nt, Artificial Sequence; identical to SEQ ID NO: 109405
  derived and/or modified CDS sequence (opt2) from hemagglutinin__InfluenzaA__ALE31967

SEQ ID NO: 109503 - RNA, 1701 nt, Artificial Sequence; identical to SEQ ID NO: 109021
  derived and/or modified CDS sequence (opt2) from hemagglutinin__InfluenzaA__ALE31968

SEQ ID NO: 109504 - RNA, 1701 nt, Artificial Sequence; identical to SEQ ID NO: 109128
  derived and/or modified CDS sequence (opt2) from hemagglutinin__InfluenzaA__ALE31969

SEQ ID NO: 109505 - RNA, 1701 nt, Artificial Sequence; identical to SEQ ID NO: 108477
  derived and/or modified CDS sequence (opt2) from hemagglutinin__InfluenzaA__ALE31970

SEQ ID NO: 109506 - RNA, 1701 nt, Artificial Sequence
  derived and/or modified CDS sequence (opt2) from hemagglutinin__InfluenzaA__ALE31971
augaagaccaucaucgcccucuccuacauccucugccucgucuucgcccagaagauccccggcaacgacaacuccaccgccacccucugccucggccaccacgccguccccaacggcaccaucgucaagaccaucaccaacgaccgcaucgaggucaccaacgccaccgagcucguccagaacuccuccaucggcgagaucugcgacuccccccaccagauccucgacggcgagaacugcacccucaucgacgcccuccucggcgacccccagugcgacggcuuccagaacaagaagugggaccucuucgucgagcgcuccaaggccuacuccaacugcuaccccuacgacguccccgacuacgccucccuccgcucccucgucgccuccuccggcacccucgaguucaacaacgaguccuucaacuggaccggcgucacccagaacggcaccuccuccgccugcauccgccgcuccuccuccuccuucuucucccgccucaacuggcucacccaccucaacuacgccuaccccgcccucaacgucaccaugcccaacaacgagcaguucgacaagcucuacaucuggggcguccaccaccccggcaccgacaaggaccagaucuuccucuacgcccaguccuccggccgcaucaccgucuccaccaagggcucccagcaggccgucauccccaacaucggcucccgcccccgcauccgcgacauccccucccgcaucuccaucuacuggaccaucgucaagcccggcgacauccuccucaucaacuccaccggcaaccucaucgccccccgcggcuacuucaagauccgcuccggcaaguccuccaucaugcgcuccgacgcccccaucggcaagugcaaguccgagugcaucacccccaacggcuccauccccaacgacaagcccuuccagaacgucaaccgcaucaccuacggcgccugcccccgcuacgucaagcacuccacccucaagcucgccaccggcaugcgcaacguccccgagaagcagacccgcggcaucuucggcgccaucgccggcuucaucgagaacggcugggagggcauggucgacggcugguacggcuuccgccaccagaacuccgagggccgcggccaggccgccgaccucaaguccacccaggccgccaucgaccagaucaacggcaagcucaaccgccucaucggcaagaccaacgagaaguuccaccagaucgagaaggaguucuccgaggucgagggccgcauccaggaccucgagaaguacgucgaggacaccaagaucgaccucugguccuacaacgccgagcuccucgucgcccucgagaaccagcacaccaucgaccucaccgacuccgagaugaacaagcucuucgagaagaccaagaagcagcuccgcgagaacgccgaggacaugggcaacggcugcuucaagaucuaccacaagugcgacaacgccugcaucggcuccauccgcaacggcaccuacgaccacaacgucuaccgcgacgaggcccucaacaaccgcuuccagaucaagggcgucgagcucaaguccggcuacaaggacuggauccucuggaucuccuucgccaucuccugcuuccuccucugcgucgcccuccucggcuucaucaugugggccugccagaagggcaacauccgcugcaacaucugcaucuga

SEQ ID NO: 109507 - RNA, 1701 nt, Artificial Sequence; identical to SEQ ID NO: 109021
  derived and/or modified CDS sequence (opt2) from hemagglutinin__InfluenzaA__ALE31972

SEQ ID NO: 109508 - RNA, 1701 nt, Artificial Sequence; identical to SEQ ID NO: 109021
  derived and/or modified CDS sequence (opt2) from hemagglutinin__InfluenzaA__ALE31973

SEQ ID NO: 109509 - RNA, 1701 nt, Artificial Sequence; identical to SEQ ID NO: 108666
  derived and/or modified CDS sequence (opt2) from hemagglutinin__InfluenzaA__ALE31974

SEQ ID NO: 109510 - RNA, 1701 nt, Artificial Sequence; identical to SEQ ID NO: 109021
  derived and/or modified CDS sequence (opt2) from hemagglutinin__InfluenzaA__ALE31975

SEQ ID NO: 109511 - RNA, 1701 nt, Artificial Sequence; identical to SEQ ID NO: 108477
  derived and/or modified CDS sequence (opt2) from hemagglutinin__InfluenzaA__ALE31976

SEQ ID NO: 109512 - RNA, 1701 nt, Artificial Sequence; identical to SEQ ID NO: 108477
  derived and/or modified CDS sequence (opt2) from hemagglutinin__InfluenzaA__ALE31977

SEQ ID NO: 109513 - RNA, 1701 nt, Artificial Sequence
  derived and/or modified CDS sequence (opt2) from hemagglutinin__InfluenzaA__ALE31978
augaagaccaucaucgcccucuccuacauccucugccucgucuucgcccagaagauccccggcaacgacaacuccaccgccacccucugccucggccaccacgccguccccaacggcaccaucgucaagaccaucaccaacgaccgcaucgaggucaccaacgccaccgagcucguccagaacuccuccaucggcgagaucugcgacuccccccaccagauccucgacggcgagaacugcacccucaucgacgcccuccucggcgacccccagugcgacggcuuccagaacaagaagugggaccucuucgucgagcgcuccaaggccuacuccaacugcuaccccuacgacguccccgacuacgccucccuccgcucccucgucgccuccuccggcacccucgaguucaacaacgaguccuucaacuggaccggcgucacccagaacggcaccuccuccgccugcauccgcaaguccuccuccuccuucuucucccgccucaacuggcucacccaccucaacuacaccuaccccgcccucaacgucaccaugcccaacaacgagcaguucgacaagcucuacaucuggggcguccaccaccccggcaccgacaaggaccagaucuuccucuacgcccgcuccuccggccgcaucaccgucuccaccaagcgcucccagcaggccgucauccccaacaucggcucccgcccccgcauccgcgacauccccucccgcaucuccaucuacuggaccaucgucaagcccggcgacauccuccucauccacuccaccggcaaccucaucgccccccgcggcuacuucaagauccgcuccggcaaguccuccaucaugcgcuccgacgcccccaucggcaagugcaaguccgagugcaucacccccaacggcuccauccccaacgacaagcccuuccagaacgucaaccgcaucaccuacggcgccugcccccgcuacgucaagcacuccacccucaagcucgccaccggcaugcgcaacguccccgagaagcagacccgcggcaucuucggcgccaucgccggcuucaucgagaacggcugggagggcauggucgacggcugguacggcuuccgccaccagaacuccgagggccgcggccaggccgccgaccucaaguccacccaggccgccaucgaccagaucaacggcaagcucaaccgccucaucggcaagaccaacgagaaguuccaccagaucgagaaggaguucuccgaggucgagggccgcauccaggaccucgagaaguacgucgaggacaccaagaucgaccucugguccuacaacgccgagcuccucgucgcccucgagaaccagcacaccaucgaccucaccgacuccgagaugaacaagcucuucgagaagaccaagaagcagcuccgcgagaacgccgaggacaugggcaacggcugcuucaagaucuaccacaagugcgacaacgccugcaucggcuccauccgcaacggcaccuacgaccacaacgucuaccgcgacgaggcccucaacaaccgcuuccagaucaagggcgucgagcucaaguccggcuacaaggacuggauccucuggaucuccuucgccaucuccugcuuccuccucugcgucgcccuccucggcuucaucaugugggccugccagaagggcaacauccgcugcaacaucugcaucuga

SEQ ID NO: 109514 - RNA, 1701 nt, Artificial Sequence; identical to SEQ ID NO: 108477
  derived and/or modified CDS sequence (opt2) from hemagglutinin__InfluenzaA__ALE31979

SEQ ID NO: 109515 - RNA, 1701 nt, Artificial Sequence
  derived and/or modified CDS sequence (opt2) from hemagglutinin__InfluenzaA__ALE31980
augaagaccaucaucgcccucuccuacauccucugccucgucuucgcccagaagauccccggcaacgacaacuccaccgccacccucugccucggccaccacgccguccccaacggcaccaucgucaagaccaucaccaacgaccgcaucgaggucaccaacgccaccgagcucguccagaacuccuccaucggcgagaucugcgacuccccccaccagauccucgacggcgagaacugcacccucaucgacgcccuccucggcgacccccagugcgacggcuuccagaacaagaagugggaccucuucgucgagcgcuccaaggccuacuccaacugcuaccccuacgacguccccgacuacgccucccuccgcucccucgucgccuccuccggcacccucgaguucaacaacgaguccuucaacuggaccggcgucacccagaacggcaccuccuccgccugcauccgccgcuccuccuccuccuucuucucccgccucaacuggcucacccaccucaacuacaccuaccccgcccucaacgucaccaugcccaacaacgagcaguucgacaagcucuacaucuggggcguccaccaccccggcaccgacaaggaccagaucuuccucuacgcccaguccuccggccgcaucaccgucuccaccaagcgcucccagcaggccgucauccccaacaucggcucccgcccccgcauccgcgacauccccucccgcaucuccaucuacuggaccaucgucaagcccggcgacauccuccucaucaacuccaccggcaaccucaucgccccccgcggcuacuucaagauccgcuccggcaaguccuccaucaugcgcuccgacgcccccaucggcaagugcaaguccgagugcaucacccccaacggcuccauccccaacgacaagcccuuccagaacgucaaccgcaucaccuacggcgccugcccccgcuacgucaagcacuccacccucaagcucgccaccggcaugcgcaacguccccgagaagcagacccgcggcaucuucggcgccaucgccggcuucaucgagaacggcugggagggcauggucgacggcugguacggcuuccgccaccagaacuccgagggccgcggccaggccgccgaccucaaguccacccaggccgccaucgaccagaucaacggcaagcucaaccgccucaucggcaagaccaacgagaaguuccaccagaucgagaaggaguucuccgaggucgagggccgcauccaggaccucgagaaguacgucgaggacaccaagaucgaccucugguccuacaacgccgagcuccucgucgcccucgagaaccagcacaccaucgaccucaccgacuccgagaugaacaagcucuucgagaagaccaagaagcagcuccgcgagaacgccgaggacaugggcaacggcugcuucaagaucuaccacaagugcgacaacgccugcaucggcuccauccgcaacggcaccuacgaccacaacgucuaccgcgacgaggcccucaacaaccgcuuccagaucaagggcgucgagcucaaguccgaguacaaggacuggauccucuggaucuccuucgccaucuccugcuuccuccucugcgucgcccuccucggcuucaucaugugggccugccagaagggcaacauccgcugcaacaucugcaucuga

SEQ ID NO: 109516 - RNA, 1701 nt, Artificial Sequence; identical to SEQ ID NO: 108477
  derived and/or modified CDS sequence (opt2) from hemagglutinin__InfluenzaA__ALE31981

SEQ ID NO: 109517 - RNA, 1701 nt, Artificial Sequence; identical to SEQ ID NO: 109017
  derived and/or modified CDS sequence (opt2) from hemagglutinin__InfluenzaA__ALE31995

SEQ ID NO: 109518 - RNA, 1701 nt, Artificial Sequence
  derived and/or modified CDS sequence (opt2) from hemagglutinin__InfluenzaA__ALE31996
augaagaccaucaucgcccucuccuacauccucugccucgucuucgcccagaagauccccggcaacgacaacuccaccgccacccucugccucggccaccacgccguccccaacggcaccaucgucaagaccaucaccaacgaccgcaucgaggucaccaacgccaccgagcucguccagaacuccuccaucggcgagaucugcgacuccccccaccagauccucgacggcgagaacugcacccucaucgacgcccuccucggcgacccccagugcgacggcuuccagaacaagaagugggaccucuucgucgagcgcuccaaggccuacuccaacugcuaccccuacgacguccccgacuacgccucccuccgcucccucgucgccuccuccggcacccucgaguucaacaacgaguccuucaacuggaccggcgucacccagaacggcaccuccuccgccugcauccgccgcuccuccuccuccuucuucucccgccucaacuggcucacccaccucaacuacaccuaccccgcccucaacgucaccaugcccaacaacgagcaguucgacaagcucuacaucuggggcguccaccaccccggcaccgacaaggaccagaucuuccucuacgcccaguccuccggccgcaucaccgucuccaccaagcgcucccagcaggccgucauccccaacaucggcucccgcccccgcauccgcgacauccccucccgcaucuccaucuacuggaccaucgucaagcccggcgacauccuccucaucaacuccaccggcaaccucaucgccccccgcggcuacuucaagauccgcuccggcaaguccuccaucaugcgcuccgacgcccccaucggcaagugcaaguccgagugcaucacccccaacggcuccauccccaacgacaagcccuuccagaacgucaaccgcgucaccuacggcgccugcccccgcuacgucaagcacuccacccucaagcucgccaccggcaugcgcaacguccccgagaagcagacccgcggcaucuucggcgccaucgccggcuucaucgagaacggcugggagggcauggucgacggcugguacggcuuccgccaccagaacuccgagggccgcggccaggccgccgaccucaaguccacccaggccgccaucgaccagaucaacggcaagcucaaccgccucaucggcaagaccaacgagaaguuccaccagaucgagaaggaguucuccgaggucgagggccgcauccaggaccucgagaaguacgucgaggacaccaagaucgaccucugguccuacaacgccgagcuccucgucgcccucgagaaccagcacaccaucgaccucaccgacuccgagaugaacaagcucuucgagaagaccaagaagcagcuccgcgagaacgccgaggacaugggcaacggcugcuucaagaucuaccacaagugcgacaacgccugcaucggcuccauccgcaacggcaccuacgaccacaacgucuaccgcgacgaggcccucaacaaccgcuuccagaucaagggcgucgagcucaaguccggcuacaaggacuggauccucuggaucuccuucgccaucuccugcuuccuccucugcgucgcccuccucggcuucaucaugugggccugccagaagggcaacauccgcugcaacaucugcaucuga

SEQ ID NO: 109519 - RNA, 1701 nt, Artificial Sequence
  derived and/or modified CDS sequence (opt2) from hemagglutinin__InfluenzaA__ALE31997
augaagaccaucaucgcccucuccuacauccucugccucgucuucgcccagaagauccccggcaacgacaacuccaccgccacccucugccucggccaccacgccguccccaacggcaccaucgucaagaccaucaccaacgaccgcaucgaggucaccaacgccaccgagcucguccagaacuccuccaucggcgagaucugcgacuccccccaccagauccucgacggcgagaacugcacccucaucgacgcccuccucggcgacccccagugcgacggcuuccagaacaagaagugggaccucuucaucgagcgcuccaaggccuacuccaacugcuaccccuacgacguccccgacuacgccucccuccgcucccucgucgccuccuccggcacccucgaguucaacaacgaguccuucaacuggaccggcgucacccagaacggcaccuccuccgccugcauccgccgcuccuccuccuccuucuucucccgccucaacuggcucacccaccucaacuacaccuaccccgcccucaacgucaccaugcccaacaacgagcaguucgacaagcucuacaucuggggcguccaccaccccggcaccgacaaggaccagaucuuccucuacgcccaguccuccggccgcaucaccgucuccaccaagcgcucccagcaggccgucauccccaacaucggcucccgcccccgcauccgcgacauccccucccgcaucuccaucuacuggaccaucgucaagcccggcgacauccuccucaucaacuccaccggcaaccucaucgccccccgcggcuacuucaagauccgcuccggcaaguccuccaucaugcgcuccgacgcccccaucggcaagugcaaguccgagugcaucacccccaacggcuccauccccaacgacaagcccuuccagaacgucaaccgcaucaccuacggcgccugcccccgcuacgucaagcacuccacccucaagcucgccaccggcaugcgcaacguccccgagaagcagacccgcggcaucuucggcgccaucgccggcuucaucgagaacggcugggagggcauggucgacggcugguacggcuuccgccaccagaacuccgagggccgcggccaggccgccgaccucaaguccacccaggccgccaucgaccagaucaacggcaagcucaaccgccucaucggcaagaccaacgagaaguuccaccagaucgagaaggaguucuccgaggucgagggccgcauccaggaccucgagaaguacgucgaggacaccaagaucgaccucugguccuacaacgccgagcuccucgucgcccucgagaaccagcacaccaucgaccucaccgacuccgagaugaacaagcucuucgagaagaccaagaagcagcuccgcgagaacgccgaggacaugggcaacggcugcuucaagaucuaccacaagugcgacaacgccugcaucggcuccauccgcaacggcaccuacgaccacaacgucuaccgcgacgaggcccucaacaaccgcuuccagaucaagggcgucgagcucaaguccggcuacaaggacuggauccucuggaucuccuucgccaucuccugcuuccuccucugcgucgcccuccucggcuucaucaugugggccugccagaagggcaacauccgcugcaacaucugcaucuga

SEQ ID NO: 109520 - RNA, 1701 nt, Artificial Sequence; identical to SEQ ID NO: 108477
  derived and/or modified CDS sequence (opt2) from hemagglutinin__InfluenzaA__ALE31998

SEQ ID NO: 109521 - RNA, 1701 nt, Artificial Sequence
  derived and/or modified CDS sequence (opt2) from hemagglutinin__InfluenzaA__ALE31999
augaagaccaucaucgcccucuccuacauccucugccucgucuucgcccagaagauccccggcaacgacaacuccaccgccacccucugccucggccaccacgccguccccaacggcaccaucgucaagaccaucaccaacgaccgcaucgaggucaccaacgccaccgagcucguccagaacuccuccaucggcgagaucugcgacuccccccaccagauccucgacggcgagaacugcacccucaucgacgcccuccucggcgacccccagugcgacggcuuccagaacaagaagugggaccucuucgucgagcgcuccaaggccuacuccaacugcuaccccuacgacguccccgacuacgccucccuccgcucccucgucgccuccuccggcacccucgaguucaacaacgaguccuucaacuggaccggcgucacccagaacggcaccuccuccgccugcauccgccgcuccuccuccuccuucuucucccgccucaacuggcucacccaccuccacuacaccuaccccgcccucaacgucaccaugcccaacaacgagcaguucgacaagcucuacaucuggggcguccaccaccccggcaccgacaaggaccagaucuuccucuacgcccaguccuccggccgcaucaccgucuccaccaagcgcucccagcaggccgucauccccaacaucggcucccgcccccgcauccgcgacauccccucccgcaucuccaucuacuggaccaucgucaagcccggcgacauccuccucaucaacuccaccggcaaccucaucgccccccgcggcuacuucaagauccgcuccggcaaguccuccaucaugcgcuccgacgcccccaucggcaagugcaaguccgagugcaucacccccaacggcuccauccccaacgacaagcccuuccagaacgucaaccgcaucaccuacggcgccugcccccgcuacgucaagcacuccacccucaagcucgccaccggcaugcgcaacguccccgagaagcagacccgcggcaucuucggcgccaucgccggcuucaucgagaacggcugggagggcauggucgacggcugguacggcuuccgccaccagaacuccgagggccgcggccaggccgccgaccucaaguccacccaggccgccaucgaccagaucaacggcaagcucaaccgccucaucggcaagaccaacgagaaguuccaccagaucgagaaggaguucuccgaggucgagggccgcauccaggaccucgagaaguacgucgaggacaccaagaucgaccucugguccuacaacgccgagcuccucgucgcccucgagaaccagcacaccaucgaccucaccgacuccgagaugaacaagcucuucgagaagaccaagaagcagcuccgcgagaacgccgaggacaugggcaacggcugcuucaagaucuaccacaagugcgacaacgccugcaucggcuccauccgcaacggcaccuacgaccacaacgucuaccgcgacgaggcccucaacaaccgcuuccagaucaagggcgucgagcucaaguccggcuacaaggacuggauccucuggaucuccuucgccaucuccugcuuccuccucugcgucgcccuccucggcuucaucaugugggccugccagaagggcaacauccgcugcaacaucugcaucuga

SEQ ID NO: 109522 - RNA, 1701 nt, Artificial Sequence
  derived and/or modified CDS sequence (opt2) from hemagglutinin__InfluenzaA__ALE32000
augaagaccaucaucgcccucucccacauccucugccucgucuucgcccagaagcuccccgagaacgacaacuccaccgccacccucugccucggccaccacgccguccccaacggcaccaucgucaagaccaucaccuccgaccgcaucgaggucaccaacgccaccgagcucguccagaacuccuccaucggcgagaucugcgacuccccccaccagauccucgacggcaagaacugcacccucaucgacgcccuccucggcgacccccagugcgacggcuuccagaacaagaagugggaccucuucgucgagcgcuccaaggccuacuccaacugcuaccccuacgacguccccgacuacgccucccuccgcucccucgucgccuccuccggcacccucgaguucaacgacgaguccuucaacugggccggcgucacccagaacggcaccuccuccgccugcauccgcggcuccaacuccuccuucuucucccgccucaacuggcucacccacuccaacuucaaguaccccgcccucaacgucaccaugcccaacaacgagcaguucgacaagcucuacaucuggggcguccaccaccccggcaccgacaaggaccagaucuuccucuacgcccaguccuccggccgcaucaccgucuccaccaagcgcucccagcaggccgucauccccaacaucggcucccgcccccgcauccgcaacauccccucccgcaucuccaucuacuggaccaucgucaagcccggcgacauccuccucaucaacuccaccggcaaccucaucgccccccgcggcuacuucaagauccgcuccggcaaguccuccaucaugcgcuccgacgcccccaucggcaagugcaaguccgagugcaucacccccaacggcuccauccccaacgacaagcccuuccagaacgucaaccgcaucaccuacggcgccugcccccgcuacgucaagcaguccacccucaagcucgccaccggcaugcgcaacguccccgagaagcagacccgcggcaucuucggcgccaucgccggcuucaucgagaacggcugggagggcaugaaggacggcugguacggcuuccgccaccagaacuccgagggccgcggccaggccgccgaccucaaguccacccaggccgccaucgaccagaucaacggcaagcucaaccgccucaucggcaagaccaacgagaaguuccaccagaucgagaaggaguucuccgaggucgagggccgcauccaggaccucgagaaguacgucgaggacaccaagaucgaccucugguccuacaacgccgagcuccucgucgcccucgagaaccagcacaccaucgaccucaccgacuccgagaugaacaagcucuucgagaagaccaagaagcagcuccgcgagaacgccgaggacaugggcaacggcugcuucaagaucuaccacaagugcgacaacgccugcaucggcuccauccgcaacggcaccuacgaccacgacgucuaccgcgacgaggcccucaacaaccgcuuccagaucaagggcgucgagcucaaguccggcuacaaggacuggauccucuggaucuccuucgccaucuccugcuuccuccucugcgucgcccuccucggcuucaucaugugggccugccagaagggcaacauccgcugcaacaucugcaucuga

SEQ ID NO: 109523 - RNA, 1701 nt, Artificial Sequence; identical to SEQ ID NO: 108477
  derived and/or modified CDS sequence (opt2) from hemagglutinin__InfluenzaA__ALE32001

SEQ ID NO: 109524 - RNA, 1701 nt, Artificial Sequence; identical to SEQ ID NO: 108477
  derived and/or modified CDS sequence (opt2) from hemagglutinin__InfluenzaA__ALE32002

SEQ ID NO: 109525 - RNA, 1701 nt, Artificial Sequence; identical to SEQ ID NO: 108577
  derived and/or modified CDS sequence (opt2) from hemagglutinin__InfluenzaA__ALE32003

SEQ ID NO: 109526 - RNA, 1701 nt, Artificial Sequence; identical to SEQ ID NO: 108477
  derived and/or modified CDS sequence (opt2) from hemagglutinin__InfluenzaA__ALE32004

SEQ ID NO: 109527 - RNA, 1701 nt, Artificial Sequence; identical to SEQ ID NO: 108477
  derived and/or modified CDS sequence (opt2) from hemagglutinin__InfluenzaA__ALE32005

SEQ ID NO: 109528 - RNA, 1701 nt, Artificial Sequence; identical to SEQ ID NO: 109021
  derived and/or modified CDS sequence (opt2) from hemagglutinin__InfluenzaA__ALE32006

SEQ ID NO: 109529 - RNA, 1701 nt, Artificial Sequence; identical to SEQ ID NO: 108477
  derived and/or modified CDS sequence (opt2) from hemagglutinin__InfluenzaA__ALE32007

SEQ ID NO: 109530 - RNA, 1701 nt, Artificial Sequence; identical to SEQ ID NO: 109028
  derived and/or modified CDS sequence (opt2) from hemagglutinin__InfluenzaA__ALE32008

SEQ ID NO: 109531 - RNA, 1701 nt, Artificial Sequence
  derived and/or modified CDS sequence (opt2) from hemagglutinin__InfluenzaA__ALE32009
augaagaccaucaucgcccucuccuacauccucugccucgucuucgcccagaagcuccccgagaacgacaacuccaccgccacccucugccucggccaccacgccguccccaacggcaccaucgucaagaccaucaccuccgaccgcaucgaggucaccaacgccaccgagcucguccagaacuccuccaucggcgagaucugcgacuccccccaccagauccucgacggcaagaacugcacccucaucgacgcccuccucggcgacccccagugcgacggcuuccagaacaagaagugggaccucuucgucgagcgcuccaaggccuacuccaacugcuaccccuacgacguccccgacuacgccucccuccgcucccucgucgccuccuccggcacccucgaguucaacgacgaguccuucaacugggccggcgucacccagaacggcaccuccuccgccugcauccgcggcuccaacuccuccuucuucucccgccucaacuggcucacccacuccaacuucaaguaccccgcccucaacgucaccaugcccaacaacgagcaguucgacaagcucuacaucuggggcguccaccaccccggcaccgacaaggaccagaucuuccucuacgcccaguccuccggccgcaucaccgucuccaccaagcgcucccagcaggccgucauccccaacaucggcucccgcccccgcauccgcaacauccccucccgcaucuccaucuacuggaccaucgucaagcccggcgacauccuccucaucaacuccaccggcaaccucaucgccccccgcggcuacuucaagauccgcuccggcaaguccuccaucaugcgcuccgacgcccccaucggcaagugcaaguccgagugcaucacccccaacggcuccauccccaacgacaagcccuuccagaacgucaaccgcaucaccuacggcgccugcccccgcuacgucaagcaguccacccucaagcucgccaccggcaugcgcaacguccccgagaagcagacccgcggcaucuucggcgccaucgccggcuucaucgagaacggcugggagggcaugaaggacggcugguacggcuuccgccaccagaacuccgagggccgcggccaggccgccgaccucaaguccacccaggccgccaucgaccagaucaacggcaagcucaaccgccucaucggcaagaccaacgagaaguuccaccagaucgagaaggaguucuccgaggucgagggccgcauccaggaccucgagaaguacgucgaggacaccaagaucgaccucugguccuacaacgccgagcuccucgucgcccucgagaaccagcacaccaucguccucaccgacuccgagaugaacaagcucuucgagaagaccaagaagcagcuccgcgagaacgccgaggacaugggcaacggcugcuucaagaucuaccacaagugcgacaacgccugcaucggcuccauccgcaacggcaccuacgaccacgacgucuaccgcgacgaggcccucaacaaccgcuuccagaucaagggcgucgagcucaaguccggcuacaaggacuggauccucuggaucuccuucgccaucuccugcuuccuccucugcgucgcccuccucggcuucaucaugugggccugccaggagggcaacauccgcugcaacaucugcaucuga

SEQ ID NO: 109532 - RNA, 1701 nt, Artificial Sequence
  derived and/or modified CDS sequence (opt2) from hemagglutinin__InfluenzaA__ALE32010
augaagaccaucaucgcccucuccuacauccucugccucgccuucgcccagaagauccccggcaacgacaacuccaccgccacccucugccucggccaccacgccguccccaacggcaccaucgucaagaccaucaccaacgaccgcaucgaggucaccaacgccaccgagcucguccagaacuccuccaucggcgagaucugcgacuccccccaccagauccucgacggcgagaacugcacccucaucgacgcccuccucggcgacccccagugcgacggcuuccagaacaagaagugggaccucuucgucgagcgcuccaaggccuacuccaacugcuaccccuacgacguccccgacuacgccucccuccgcucccucgucgccuccuccggcacccucgaguucaacaacgaguccuucaacuggaccggcgucacccagaacggcaccuccuccgccugcauccgccgcuccuccuccuccuucuucucccgccucaacuggcucacccaccuccacuacaccuaccccgcccucaacgucaccaugcccaacaacgagcaguucgacaagcucuacaucuggggcguccaccaccccggcaccgacaaggaccagaucuuccucuacgcccaguccuccggccgcaucaccgucuccaccaagcgcucccagcaggccgucauccccaacaucggcucccgcccccgcauccgcgacauccccucccgcaucuccaucuacuggaccaucgucaagcccggcgacauccuccucaucaacuccaccggcaaccucaucgccccccgcggcuacuucaagauccgcuccggcaaguccuccaucaugcgcuccgacgcccccaucggcaagugcaaguccgagugcaucacccccaacggcuccauccccaacgacaagcccuuccagaacgucaaccgcaucaccuacggcgccugcccccgcuacgucaagcacuccacccucaagcucgccaccggcaugcgcaacguccccgagaagcagacccgcggcaucuucggcgccaucgccggcuucaucgagaacggcugggagggcauggucgacggcugguacggcuuccgccaccagaacuccgagggccgcggccaggccgccgaccucaaguccacccaggccgccaucgaccagaucaacggcaagcucaaccgccucaucggcaagaccaacgagaaguuccaccagaucgagaaggaguucuccgaggucgagggccgcauccaggaccucgagaaguacgucgaggacaccaagaucgaccucugguccuacaacgccgagcuccucgucgcccucgagaaccagcacaccaucgaccucaccgacuccgagaugaacaagcucuucgagaagaccaagaagcagcuccgcgagaacgccgaggacaugggcaacggcugcuucaagaucuaccacaagugcgacaacgccugcaucggcuccauccgcaacggcaccuacgaccacaacgucuaccgcgacgaggcccucaacaaccgcuuccagaucaagggcgucgagcucaaguccggcuacaaggacuggauccucuggaucuccuucgccaucuccugcuuccuccucugcgucgcccuccucggcuucaucaugugggccugccagaagggcaacauccgcugcaacaucugcaucuga

SEQ ID NO: 109533 - RNA, 1701 nt, Artificial Sequence; identical to SEQ ID NO: 109491
  derived and/or modified CDS sequence (opt2) from hemagglutinin__InfluenzaA__ALE32011

SEQ ID NO: 109534 - RNA, 1701 nt, Artificial Sequence; identical to SEQ ID NO: 109034
  derived and/or modified CDS sequence (opt2) from hemagglutinin__InfluenzaA__ALE32012

SEQ ID NO: 109535 - RNA, 1701 nt, Artificial Sequence; identical to SEQ ID NO: 108477
  derived and/or modified CDS sequence (opt2) from hemagglutinin__InfluenzaA__ALE32013

SEQ ID NO: 109536 - RNA, 1701 nt, Artificial Sequence
  derived and/or modified CDS sequence (opt2) from hemagglutinin__InfluenzaA__ALE32014
augaagaccaucaucgcccucuccuacauccucugccucgucuucgcccagaagauccccggcaacgacaacuccaccgccacccucugccucggccaccacgccguccccaacggcaccaucgucaagaccaucaccaacgaccgcaucgaggucaccaacgccaccgagcucguccagaacuccuccaucggcgagaucugcgacuccccccaccagauccucgacggcgagaacugcacccucaucgacgcccuccucggcgacccccagugcgacggcuuccagaacaagaagugggaccucuucgucgagcgcuccaaggccuacuccaacugcuaccccuacgacguccccgacuacgccucccuccgcucccucgucgccuccuccggcacccucgaguucaacaacgaguccuucaacuggaccggcgucacccagaacggcaccuccuccgccugcauccgcaaguccuccuccuccuucuucucccgccucaacuggcucacccagcucaacuacaccuaccccgcccucaacgucaccaugcccaacaacgagcaguucgacaagcucuacaucuggggcguccaccaccccggcaccgacaaggaccagaucuuccucuacgcccaguccuccggccgcaucaccgucuccaccaagcgcucccagcaggccgucauccccaacaucggcucccgcccccgcauccgcgacauccccucccgcaucuccaucuacuggaccaucgucaagcccggcgacauccuccucaucaacuccaccggcaaccucaucgccccccgcggcuacuucaagauccgcuccggcaaguccuccaucaugcgcuccgacgcccccaucggcaagugcaaguccgagugcaucacccccaacggcuccauccccaacgacaagcccuuccagaacgucaaccgcaucaccuacggcgccugcccccgcuacgucaagcacuccacccucaagcucgccaccggcaugcgcaacguccccgagaagcagacccgcggcaucuucggcgccaucgccggcuucaucgagaacggcugggagggcauggucgacggcugguacggcuuccgccaccagaacuccgagggccgcggccaggccgccgaccucaaguccacccaggccgccaucgaccagaucaacggcaagcucaaccgccucaucggcaagaccaacgagaaguuccaccagaucgagaaggaguucuccgaggucgagggccgcauccaggaccucgagaaguacgucgaggacaccaagaucgaccucugguccuacaacgccgagcuccucgucgcccucgagaaccagcacaccaucgaccucaccgacuccgagaugaacaagcucuucgagaagaccaagaagcagcuccgcgagaacgccgaggacaugggcaacggcugcuucaagaucuaccacaagugcgacaacgccugcaucggcuccauccgcaacggcaccuacgaccacaacgucuaccgcgacgaggcccucaacaaccgcuuccagaucaagggcgucgagcucaaguccggcuacaaggacuggauccucuggaucuccuucgccaucuccugcuuccuccucugcgucgcccuccucggcuucaucaugugggccugccagaagggcaacauccgcugcaacaucugcaucuga

SEQ ID NO: 109537 - RNA, 1701 nt, Artificial Sequence; identical to SEQ ID NO: 109362
  derived and/or modified CDS sequence (opt2) from hemagglutinin__InfluenzaA__ALE32015

SEQ ID NO: 109538 - RNA, 1701 nt, Artificial Sequence; identical to SEQ ID NO: 108477
  derived and/or modified CDS sequence (opt2) from hemagglutinin__InfluenzaA__ALE32016

SEQ ID NO: 109539 - RNA, 1701 nt, Artificial Sequence; identical to SEQ ID NO: 108477
  derived and/or modified CDS sequence (opt2) from hemagglutinin__InfluenzaA__ALE32017

SEQ ID NO: 109540 - RNA, 1701 nt, Artificial Sequence; identical to SEQ ID NO: 108477
  derived and/or modified CDS sequence (opt2) from hemagglutinin__InfluenzaA__ALE32018

SEQ ID NO: 109541 - RNA, 1701 nt, Artificial Sequence; identical to SEQ ID NO: 109021
  derived and/or modified CDS sequence (opt2) from hemagglutinin__InfluenzaA__ALE32020

SEQ ID NO: 109542 - RNA, 1701 nt, Artificial Sequence; identical to SEQ ID NO: 109128
  derived and/or modified CDS sequence (opt2) from hemagglutinin__InfluenzaA__ALE32021

SEQ ID NO: 109543 - RNA, 1701 nt, Artificial Sequence; identical to SEQ ID NO: 109208
  derived and/or modified CDS sequence (opt2) from hemagglutinin__InfluenzaA__ALE32022

SEQ ID NO: 109544 - RNA, 1701 nt, Artificial Sequence; identical to SEQ ID NO: 108477
  derived and/or modified CDS sequence (opt2) from hemagglutinin__InfluenzaA__ALE32023

SEQ ID NO: 109545 - RNA, 1701 nt, Artificial Sequence
  derived and/or modified CDS sequence (opt2) from hemagglutinin__InfluenzaA__ALE32024
augaagaccaucaucgcccucuccuacauccucugccucgucuucgcccagaagcuccccggcaacgacaacuccaccgccacccucugccucggccaccacgccguccccaacggcaccaucgucaagaccaucaccaacgaccgcaucgaggucaccaacgccaccgagcucguccagaacuccuccaucggcgagaucugcgacuccccccaccagauccucgacggcaagaacugcacccucaucgacgcccuccucggcgacccccagugcgacggcuuccagaacaagcgcugggaccucuucgucgagcgcuccaaggccuacuccaacugcuaccccuacgacguccccgacuacgccucccuccgcucccucgucgccuccuccggcacccucgaguucaacgacgaguccuucaacugggccggcgucacccagaacggcaaguccuccgccugcauccgcggcuccaacuccuccuucuucucccgccucaacuggcucacccacuccaacuucaaguaccccgcccucaacgucaccaugcccaacaacgagcaguucgacaagcucuacaucuggggcguccaccaccccggcaccgacaaggaccagaucuuccucuacgcccacuccuccggccgcaucaccgucuccaccaagcgcucccagcaggccgucauccccaacaucggcucccgcccccgcauccgcaacauccccucccgcaucuccaucuacuggaccaucgucaagcccggcgacauccuccucaucaacuccaccggcaaccucaucgccccccgcggcuacuucaagauccaguccggcaaguccuccaucaugcgcuccgacgcccccaucggcaagugcaaguccgagugcaucacccccaacggcuccauccccaacgacaagcccuuccagaacgucaaccgcaucaccuacggcaccugcccccgcuacgucaagcaguccacccucaagcucgccaccggcaugcgcaacguccccgagaagcagacccgcggcaucuucggcgccaucgccggcuucaucgagaacggcugggagggcaugaaggacggcugguacggcuuccgccaccagaacuccgagggccgcggccaggccgccgaccucaaguccacccaggccgccaucgaccagaucaacggcaagcucaaccgccucaucggcaagaccaacgagaaguuccaccagaucgagaaggaguucuccgaggucgagggccgcauccaggaccucgagaaguacgucgaggacaccaagaucgaccucugguccuacaacgccgagcuccucgucgcccucgagaaccagcacaccaucgaccucaccgacuccgagaugaacaagcucuucgagaagaccaagaagcagcuccgcgagaacgccgaggacaugggcaacggcugcuucaagaucuaccacaagugcgacaacgccugcaucggcuccauccgcaacggcaccuacgaccacuacgucuaccgcgacgaggcccucaacaaccgcuuccagaucaagggcgucgagcucaaguccggcuacaaggacuggauccucuggaucuccuucgccaucuccugcuuccuccucugcgucgcccuccucggcuucaucaugugggccugccagaagggcaacauccgcugcaacaucugcaucuga

SEQ ID NO: 109546 - RNA, 1701 nt, Artificial Sequence
  derived and/or modified CDS sequence (opt2) from hemagglutinin__InfluenzaA__ALE32025
augaagaccaucaucgcccucuccuacauccucugccucgucuucgcccagaagauccccggcaacgacaacuccaccgccacccucugccucggccaccacgccguccccaacggcaccaucgucaagaccaucaccaacgaccgcaucgaggucaccaacgccaccgagcucguccagaacuccuccaucggcgagaucugcgacuccccccaccagauccucgacggcgagaacugcacccucaucgacgcccuccucggcgacccccagugcgacggcuuccagaacaagaagugggaccucuucgucgagcgcuccaaggccuacuccaacugcuaccccuacgacguccccgacuacgccucccuccgcucccucgucgccuccuccggcacccucgaguucaacaacgaguccuucaacuggaccggcgucacccagaacggcaccuccuccgccugcauccgcaaguccuccuccuccuucuucucccgccucaacuggcucacccaccucaacuacaccuaccccgcccucaacgucaccaugcccaacaacgagcaguucgacaagcucuacaucuggggcguccaccaccccggcaccgacaaggaccagaucuuccucuacgcccgcuccuccggccgcaucaccgucuccaccaagcgcucccagcaggccgucauccccaacaucggcucccgcccccgcauccgcgacauccccucccgcaucuccaucuacuggaccaucgucaaguccggcgacauccuccucaucaacuccaccggcaaccucaucgccccccgcggcuacuucaagauccgcuccggcaaguccuccaucaugcgcuccgacgcccccaucggcaagugcaaguccgagugcaucacccccaacggcuccauccccaacgacaagcccuuccagaacgucaaccgcaucaccuacggcgccugcccccgcuacgucaagcacuccacccucaagcucgccaccggcaugcgcaacguccccgagaagcagacccgcggcaucuucggcgccaucgccggcuucaucgagaacggcugggagggcauggucgacggcugguacggcuuccgccaccagaacuccgagggccgcggccaggccgccgaccucaaguccacccaggccgccaucgaccagaucaacggcaagcucaaccgccucaucggcaagaccaacgagaaguuccaccagaucgagaaggaguucuccgaggucgagggccgcauccaggaccucgagaaguacgucgaggacaccaagaucgaccucugguccuacaacgccgagcuccucgucgcccucgagaaccagcacaccaucgaccucaccgacuccgagauguccaagcucuucgagaagaccaagaagcagcuccgcgagaacgccgaggacaugggcaacggcugcuucaagaucuaccacaagugcgacaacgccugcaucggcuccauccgcaacggcaccuacgaccacaacgucuaccgcgacgaggcccucaacaaccgcuuccagaucaagggcgucgagcucaaguccggcuacaaggacuggauccucuggaucuccuucgccaucuccugcuuccuccucugcgucgcccuccucggcuucaucaugugggccugccagaagggcaacauccgcugcaacaucugcaucuga

SEQ ID NO: 109547 - RNA, 1701 nt, Artificial Sequence; identical to SEQ ID NO: 108477
  derived and/or modified CDS sequence (opt2) from hemagglutinin__InfluenzaA__ALE32026

SEQ ID NO: 109548 - RNA, 1701 nt, Artificial Sequence; identical to SEQ ID NO: 109021
  derived and/or modified CDS sequence (opt2) from hemagglutinin__InfluenzaA__ALE32027

SEQ ID NO: 109549 - RNA, 1701 nt, Artificial Sequence
  derived and/or modified CDS sequence (opt2) from hemagglutinin__InfluenzaA__ALE32028
augaagaccaucaucgcccucucccacauccucugccucgucuucgcccagaagauccccggcaacgacaacuccaccgccacccucugccucggccaccacgccguccccaacggcaccaucgucaagaccaucaccaacgaccgcaucgaggucaccaacgccaccgagcucguccagaacuccuccaucggcgagaucugcgacuccccccaccagauccucgacggcgagaacugcacccucaucgacgcccuccucggcgacccccagugcgacggcuuccagaacaagaagugggaccucuucgucgagcgcuccaaggccuacuccaacugcuaccccuacgacguccccgacuacgccucccuccgcucccucgucgccuccuccggcacccucgaguucaacaacgaguccuucaacuggaccggcgucacccagaacggcaccuccuccgccugcauccgccgcuccuccuccuccuucuucucccgccucaacuggcucacccaccucaacuacaccuaccccgcccucaacgucaccaugcccaacaacgagcaguucgacaagcucuacaucuggggcguccaccaccccggcaccgacaaggaccagaucuuccucuacgcccaguccuccggccgcaucaccgucuccaccaagcgcucccagcaggccgucauccccaacaucggcucccgcccccgcauccgcgacauccccucccgcaucuccaucuacuggaccaucgucaagcccggcgacauccuccucaucaacuccaccggcaaccucaucgccccccgcggcuacuucaagauccgcuccggcaaguccuccaucaugcgcuccgacgcccccaucggcaagugcaaguccgagugcaucacccccaacggcuccauccccaacgacaagcccuuccagaacgucaaccgcaucaccuacggcgccugcccccgcuacgucaagcacuccacccucaagcucgccaccggcaugcgcaacguccccgagaagcagacccgcggcaucuucggcgccaucgccggcuucaucgagaacggcugggagggcaugauggacggcugguacggcuuccgccaccagaacuccgagggccgcggccaggccgccgaccucaaguccacccaggccgccaucgaccagaucaacggcaagcucaaccgccucaucggcaagaccaacgagaaguuccaccagaucgagaaggaguucuccgaggucgagggccgcauccaggaccucgagaaguacgucgaggacaccaagaucgaccucugguccuacaacgccgagcuccucgucgcccucgagaaccagcacaccaucgaccucaccgacuccgagaugaacaagcucuucgagaagaccaagaagcagcuccgcgagaacgccgaggacaugggcaacggcugcuucaagaucuaccacaagugcgacaacgccugcaucggcuccauccgcaacggcaccuacgaccacaacgucuaccgcgacgaggcccucaacaaccgcuuccagaucaagggcgucgagcucaaguccggcuacaaggacuggauccucuggaucuccuucgccaucuccugcuuccuccucugcgucgcccuccucggcuucaucaugugggccugccagaagggcaacauccgcugcaacaucugcaucuga

SEQ ID NO: 109550 - RNA, 1701 nt, Artificial Sequence; identical to SEQ ID NO: 109128
  derived and/or modified CDS sequence (opt2) from hemagglutinin__InfluenzaA__ALE32029

SEQ ID NO: 109551 - RNA, 1701 nt, Artificial Sequence
  derived and/or modified CDS sequence (opt2) from hemagglutinin__InfluenzaA__ALE32030
augaagaccaucaucgcccucucccacauccucugccucgucuucgcccagaagauccccggcaacgacaacuccaccgccacccucugccucggccaccacgccguccccaacggcaccaucgucaagaccaucaccaacgaccgcaucgaggucaccaacgccaccgagcucguccagaacuccuccaucggcgagaucugcgacuccccccaccagauccucgacggcgagaacugcacccucaucgacgcccuccucggcgacccccagugcgacggcuuccagaacaagaagugggaccucuucgucgagcgcuccaaggccuacuccaacugcuaccccuacgacguccccgacuacgccucccuccgcucccucgucgccuccuccggcacccucgaguucaacaacgaguccuucaacuggaccggcgucacccagaacggcaccuccuccgccugcauccgccgcuccuccuccuccuucuucucccgccucaacuggcucacccaccucaacuacaucuaccccgcccucaacgucaccaugcccaacaacgagcaguucgacaagcucuacaucuggggcguccaccaccccggcaccgacaaggaccagaucuuccucuacgcccaguccuccggccgcaucaccgucuccaccaagcgcucccagcaggccgucauccccaacaucggcucccgcccccgcauccgcgacauccccucccgcaucuccaucuacuggaccaucgucaagcccggcgacauccuccucaucaacuccaccggcaaccucaucgccccccgcggcuacuucaagauccgcuccggcaaguccuccaucaugcgcuccgacgcccccaucggcaagugcaaguccgagugcaucacccccaacggcuccauccccaacgacaagcccuuccagaacgucaaccgcaucaccuacggcgccugcccccgcuacgucaagcacuccacccucaagcucgccaccggcaugcgcaacguccccgagaagcagacccgcggcaucuucggcgccaucgccggcuucaucgagaacggcugggagggcaugauggacggcugguacggcuuccgccaccagaacuccgagggccgcggccaggccgccgaccucaaguccacccaggccgccaucgaccagaucaacggcaagcucaaccgccucaucggcaagaccaacgagaaguuccaccagaucgagaaggaguucuccgaggucgagggccgcauccaggaccucgagaaguacgucgaggacaccaagaucgaccucugguccuacaacgccgagcuccucgucgcccucgagaaccagcacaccaucgaccucaccgacuccgagaugaacaagcucuucgagaagaccaagaagcagcuccgcgagaacgccgaggacaugggcaacggcugcuucaagaucuaccacaagugcgacaacgccugcaucggcuccauccgcaacggcaccuacgaccacaacgucuaccgcgacgaggcccucaacaaccgcuuccagaucaagggcgucgagcucaaguccggcuacaaggacuggauccucuggaucuccuucgccaucuccugcuuccuccucugcgucgcccuccucggcuucaucaugugggccugccagaagggcaacauccgcugcaacaucugcaucuga

SEQ ID NO: 109552 - RNA, 1701 nt, Artificial Sequence
  derived and/or modified CDS sequence (opt2) from hemagglutinin__InfluenzaA__ALE32031
augaagaccaucaucgcccucuccuacauccucugccucgucuucgcccagaagauccccggcaacgacaacuccaccgccacccucugccucggccaccacgccguccccaacggcaccaucgucaagaccaucaccaacgaccgcaucgaggucaccaacgccaccgagcucguccagaacuccuccaucggcgagaucugcgacuccccccaccagauccucgacggcgagaacugcacccucaucgacgcccuccucggcgacccccagugcgacggcuuccagaacaagaagugggaccucuucgucgagcgcuccaaggccuacuccaacugcuaccccuacgacguccccgacuacgccucccuccgcucccucgucgccuccuccggcacccucgaguucaacaacgaguccuucaacuggaccggcgucacccagaacggcaccuccuccgccugcauccgccgcuccuccuccuccuucuucucccgccucaacuggcucacccaccucaacuacaccuaccccgcccucaacgucaccaugcccaacaacgagcaguucgacaagcucuacaucuggggcguccaccaccccggcaccgacaaggaccagaucuuccucuacgcccaguccuccggccgcaucaccgucuccaccaagcgcucccagcaggccgucauccccaacaucggcucccgcccccgcauccgcgacauccccucccgcaucuccaucuacuggaccaucgucaagcccggcgacauccuccucaucaacuccaccggcaaccucaucgccccccgcggcuacuucaagauccgcuccggcaaguccuccaucaugcgcuccgacgcccccaucggcaagugcaaguccgagugcaucacccccaacggcuccauccccaacgacaagcccuuccagaacgucaaccgcaucaccuacggcgccugcccccgcuacgucaagcacuccacccucaagcucgccaccggcaugcgcaacguccccgagaagcagacccgcggcaucuucggcgccaucgccggcuucaucgagaacggcugggagggcaugauggacggcugguacggcuuccgccaccagaacuccgagggccgcggccaggccgccgaccucaaguccacccaggccgccaucgaccagaucaacggcaagcucaaccgccucaucggcaagaccaacgagaaguuccaccagaucgagaaggaguucuccgaggucgagggccgcauccaggaccucgagaaguacgucgaggacaccaagaucgaccucugguccuacaacgccgagcuccucgucgcccucgagaaccagcacaccaucgaccucaccgacuccgagaugaacaagcucuucgagaagaccaagaagcagcuccgcgagaacgccgaggacaugggcaacggcugcuucaagaucuaccacaagugcgacaacgccugcaucggcuccauccgcaacggcaccuacgaccacaacgucuaccgcgacgaggcccucaacaaccgcuuccagaucaagggcgucgagcucaaguccggcuacaaggacuggauccucuggaucuccuucgccaucuccugcuuccuccucugcgucgcccuccucggcuucaucaugugggccugccagaagggcaacauccgcugcaacaucugcaucuga

SEQ ID NO: 109553 - RNA, 1701 nt, Artificial Sequence
  derived and/or modified CDS sequence (opt2) from hemagglutinin__InfluenzaA__ALE32032
augaagaccaucaucgcccucuccuacauccucugccucgucuucgcccagaagauccccggcaacgacaacuccaccgccacccucugccucggccaccacgccguccccaacggcaccaucgucaagaccaucaccaacgaccgcaucgaggucaccaacgccaccgagcucguccagaacuccuccaucggcgagaucugcgacuccccccaccagauccucgacggcgagaacugcacccucaucgacgcccuccucggcgacccccagugcgacggcuuccagaacaagaagugggaccucuucgucgagcgcuccaaggccuacuccaacugcuaccccuacgacguccccgacuacgccucccuccgcucccucgucgccuccuccggcacccucgaguucaacaacgaguccuucaacuggaccggcgucacccagaacggcaccuccuccgccugcauccgccgcuccuccuccuccuucuucucccgccucaacuggcucacccaccucaacuacaccuaccccgcccucaacgucaccaugcccaacaacgagcaguucgacaagcucuacaucuggggcguccaccaccccggcaccgacaaggaccagaucuuccucuacgcccaguccuccggccgcaucgccgucuccaccaagcgcucccagcaggccgucauccccaacaucggcucccgcccccgcauccgcgacauccccucccgcaucuccaucuacuggaccaucgucaagcccggcgacauccuccucaucaacuccaccggcaaccucaucgccccccgcggcuacuucaagauccgcuccggcaaguccuccaucaugcgcuccgacgcccccaucggcaagugcaaguccgagugcaucacccccaacggcuccauccccaacgacaagcccuuccagaacgucaaccgcaucaccuacggcgccugcccccgcuacgucaagcacuccacccucaagcucgccaccggcaugcgcaacguccccgagaagcagacccgcggcaucuucggcgccaucgccggcuucaucgagaacggcugggagggcaugauggacggcugguacggcuuccgccaccagaacuccgagggccgcggccaggccgccgaccucaaguccacccaggccgccaucgaccagaucaacggcaagcucaaccgccucaucggcaagaccaacgagaaguuccaccagaucgagaaggaguucuccgaggucgagggccgcauccaggaccucgagaaguacgucgaggacaccaagaucgaccucugguccuacaacgccgagcuccucgucgcccucgagaaccagcacaccaucgaccucaccgacuccgagaugaacaagcucuucgagaagaccaagaagcagcuccgcgagaacgccgaggacaugggcaacggcugcuucaagaucuaccacaagugcgacaacgccugcaucggcuccauccgcaacggcaccuacgaccacaacgucuaccgcgacgaggcccucaacaaccgcuuccagaucaagggcgucgagcucaaguccggcuacaaggacuggauccucuggaucuccuucgccaucuccugcuuccuccucugcgucgcccuccucggcuucaucaugugggccugccagaagggcaacauccgcugcaacaucugcaucuga

SEQ ID NO: 109554 - RNA, 1701 nt, Artificial Sequence; identical to SEQ ID NO: 108477
  derived and/or modified CDS sequence (opt2) from hemagglutinin__InfluenzaA__ALE32033

SEQ ID NO: 109555 - RNA, 1701 nt, Artificial Sequence
  derived and/or modified CDS sequence (opt2) from hemagglutinin__InfluenzaA__ALE32034
augaagaccaucaucgcccucggcuacauccucugccucgucuucgcccagaagauccccggcaacgacaacuccaccgccacccucugccucggccaccacgccguccccaacggcaccaucgucaagaccaucaccaacgaccgcaucgaggucaccaacgccaccgagcucguccagaacuccuccaucggcgagaucugcgacuccccccacaagauccucgacggcgagaacugcacccucaucgacgcccuccucggcgacccccagugcgacggcuuccagaacaagaagugggaccucuucgucgagcgcuccaaggccuacuccaacugcuaccccuacgacguccccgacuacgccucccuccgcucccucgucgccuccuccggcacccucgaguucaacaacgaguccuucaacuggaccggcgucacccagaacggcaccuccuccgccugcauccgccgcuccuccuccuccuucuucucccgccucaacuggcucacccaccucaaguacaccuaccccgcccucaacgucaccaugcccaacaacgagcaguucgacaagcucuacaucuggggcguccaccaccccggcaccgacaaggaccagaucuuccucuacgcccaguccuccggccgcaucaccgucuccaccaagcgcucccagcaggccgucauccccaacaucggcucccgcccccgcauccgcgacauccccucccgcaucuccaucuacuggaccaucgucaagcccggcgacauccuccucaucaacuccaccggcaaccucaucgccccccgcggcuacuucaagauccgcuccggcaaguccuccaucaugcgcuccgacgcccccaucggcaagugcaaguccgagugcaucacccccaacggcuccauccccaacgacaagcccuuccagaacgucaaccgcaucaccuacggcgccugcccccgcuacgucaagcacuccacccucaagcucgccaccggcaugcgcaacguccccgagaagcagacccgcggcaucuucggcgccaucgccggcuucaucgagaacggcugggagggcauggucgacggcugguacggcuuccgccaccagaacuccgagggccgcggccaggccgccgaccucaaguccacccaggccgccaucgaccagaucaacggcaagcucaaccgccucaucggcaagaccaacgagaaguuccaccagaucgagaaggaguucuccgaggucgagggccgcauccaggaccucgagaaguacgucgaggacaccaagaucgaccucugguccuacaacgccgagcuccucgucgcccucgagaaccagcacaccaucgaccucaccgacuccgagaugaacaagcucuucgagaagaccaagaagcagcuccgcgagaacgccgaggacaugggcaacggcugcuucaagaucuaccacaagugcgacaacgccugcaucggcuccauccgcaacggcaccuacgaccacaacgucuaccgcgacgaggcccucaacaaccgcuuccagaucaagggcgucgagcucaaguccggcuacaaggacuggauccucuggaucuccuucgccaucuccugcuuccuccucugcgucgcccuccucggcuucaucaugugggccugccagaagggcaacauccgcugcaacaucugcaucuga

SEQ ID NO: 109556 - RNA, 1701 nt, Artificial Sequence; identical to SEQ ID NO: 109367
  derived and/or modified CDS sequence (opt2) from hemagglutinin__InfluenzaA__ALE32035

SEQ ID NO: 109557 - RNA, 1701 nt, Artificial Sequence
  derived and/or modified CDS sequence (opt2) from hemagglutinin__InfluenzaA__ALE32036
augaagaccaucaucgcccucggcuacauccucugccucgucuucgcccagaagauccccggcaacgacaacuccaccgccacccucugccucggccaccacgccguccccaacggcaccaucgucaagaccaucaccaacgaccgcaucgaggucaccaacgccaccgagcucguccagaacuccuccaucggcgagaucugcgacuccccccacaagauccucgacggcgagaacugcacccucaucgacgcccuccucggcgacccccagugcgacggcuuccagaacaagaagugggaccucuucgucgagcgcuccaaggccuacuccaacugcuaccccuacgacguccccgacuacgccucccuccgcucccucgucgccuccuccggcacccucgaguucaacaacgaguccuucaacuggaccggcgucacccagaacggcaccuccuccgccugcauccgccgcuccuccuccuccuucuucucccgccucaacuggcucacccaccuccacuacaccuaccccgcccucaacgucaccaugcccaacaacgagcaguucgacaagcucuacaucuggggcguccaccaccccggcaccgacaaggaccagaucuuccucuacgcccaguccuccggccgcaucaccgucuccaccaagcgcucccagcaggccgucauccccaacaucggcucccgcccccgcauccgcgacauccccucccgcaucuccaucuacuggaccaucgucaagcccggcgacauccuccucaucaacuccaccggcaaccucaucgccccccgcggcuacuucaagauccgcuccggcaaguccuccaucaugcgcuccgacgcccccaucggcaagugcaaguccgagugcaucacccccaacggcuccauccccaacgacaagcccuuccagaacgucaaccgcaucaccuacggcgccugcccccgcuacgucaagcacuccacccucaagcucgccaccggcaugcgcaacguccccgagaagcagacccgcggcaucuucggcgccaucgccggcuucaucgagaacggcugggagggcauggucgacggcugguacggcuuccgccaccagaacuccgagggccgcggccaggccgccgaccucaaguccacccaggccgccaucgaccagaucaacggcaagcucaaccgccucaucggcaagaccaacgagaaguuccaccagaucgagaaggaguucuccgaggucgagggccgcauccaggaccucgagaaguacgucgaggacaccaagaucgaccucugguccuacaacgccgagcuccucgucgcccucgagaaccagcacaccaucgaccucaccgacuccgagaugaacaagcucuucgagaagaccaagaagcagcuccgcgagaacgccgaggacaugggcaacggcugcuucaagaucuaccacaagugcgacaacgccugcaucggcuccauccgcaacggcaccuacgaccacaacgucuaccgcgacgaggcccucaacaaccgcuuccagaucaagggcgucgagcucaaguccggcuacaaggacuggauccucuggaucuccuucgccaucuccugcuuccuccucugcgucgcccuccucggcuucaucaugugggccugccagaagggcaacauccgcugcaacaucugcaucuga

SEQ ID NO: 109558 - RNA, 1701 nt, Artificial Sequence
  derived and/or modified CDS sequence (opt2) from hemagglutinin__InfluenzaA__ALE32037
augaagaccaucaucgcccucuccuacauccucugccucgucuucgcccagaagauccccggcaacgacaacuccaccgccacccucugccucggccaccacgccguccccaacggcaccaucgucaagaccaucaccaacgaccgcaucgaggucaccaacgccaccgagcucguccagaacuccuccaucggcgagaucugcgacuccccccaccagauccucgacggcgagaacugcacccucaucgacgcccuccucggcgacccccagugcgacggcuuccagaacaagaagugggaccucuucgucgagcgcuccaaggccuacuccaacugcuaccccuacgacguccccgacuacgccucccuccgcucccucgucgccuccuccggcacccucgaguucaacaacgaguccuucaacuggaccggcgucacccagaacggcaccuccuccgccugcauccgccgcuccuccuccuccuucuucucccgccucaacuggcucacccaccucaacuacaaguaccccgcccucaacgucaccaugcccaacaacgagcaguucgacaagcucuacaucuggggcguccaccaccccggcaccgacaaggaccagaucuuccucuacgcccaguccuccggccgcaucaccgucuccaccaagcgcucccagcaggccgucauccccaacaucggcucccgcccccgcauccgcgacauccccucccgcaucuccaucuacuggaccaucgucaagcccggcgacauccuccucaucaacuccaccggcaaccucaucgccccccgcggcuacuucaagauccucuccggcaaguccuccaucaugcgcuccgacgcccccaucggcaagugcaaguccgagugcaucacccccaacggcuccauccccaacgacaagcccuuccagaacgucaaccgcaucaccuacggcgccugcccccgcuacgucaagcacuccacccucaagcucgccaccggcaugcgcaacguccccgagaagcagacccgcggcaucuucggcgccaucgccggcuucaucgagaacggcugggagggcauggucgacggcugguacggcuuccgccaccagaacuccgagggccgcggccaggccgccgaccucaaguccacccaggccgccaucgaccagaucaacggcaagcucaaccgccucaucggcaagaccaacgagaaguuccaccagaucgagaaggaguucuccgaggucgagggccgcauccaggaccucgagaaguacgucgaggacaccaagaucgaccucugguccuacaacgccgagcuccucgucgcccucgagaaccagcacaccaucgaccucaccgacuccgagaugaacaagcucuucgagaagaccaagaagcagcuccgcgagaacgccgaggacaugggcaacggcugcuucaagaucuaccacaagugcgacaacgccugcaucggcuccauccgcaacggcaccuacgaccacaacgucuaccgcgacgaggcccucaacaaccgcuuccagaucaagggcgucgagcucaaguccggcuacaaggacuggauccucuggaucuccuucgccaucuccugcuuccuccucugcgucgcccuccucggcuucaucaugugggccugccagaagggcaacauccgcugcaacaucugcaucuga

SEQ ID NO: 109559 - RNA, 1701 nt, Artificial Sequence
  derived and/or modified CDS sequence (opt2) from hemagglutinin__InfluenzaA__ALE32038
augaagaccaucaucgcccucuccuacauccucugccucgucuucgcccagaagauccccggcaacgacaacuccaccgccacccucugccucggccaccacgccguccccaacggcaccaucgucaagaccaucaccaacgaccgcaucgaggucaccaacgccaccgagcucguccagaacuccuccaucggcgagaucugcgacuccccccaccagauccucgacggcgagaacugcacccucaucgacgcccuccucggcgacccccagugcgacggcuuccagaacaagaagugggaccucuucgucgagcgcuccaaggccuacuccaacugcuaccccuacgacguccccgacuacgccucccuccgcucccucgucgccuccuccggcacccucgaguucaacaacgaguccuucaacuggaccggcgucacccagaacggcaccuccuccgccugcauccgccgcuccuccuccuccuucuucucccgccucaacuggcucacccaccucaacuacaccuaccccgcccucaacgucaccaugcccaacaacgagcaguucgacaagcucuacaucuggggcguccaccaccccggcaccgacaaggaccagaucuuccucuacgcccaguccuccggccgcaucaccgucuccaccaagcgcucccagcaggccgucauccccaacaucggcucccgcccccgcauccgcgacauccccucccgcaucuccaucuacuggaccaucgucaagcccggcgacauccuccucaucaacuccaagggcaaccucaucgccccccgcggcuacuucaagauccgcuccggcaaguccuccaucaugcgcuccgacgcccccaucggcaagugcaaguccgagugcaucacccccaacggcuccauccccaacgacaagcccuuccagaacgucaaccgcaucaccuacggcgccugcccccgcuacgucaagcacuccacccucaagcucgccaccggcaugcgcaacguccccgagaagcagacccgcggcaucuucggcgccaucgccggcuucaucgagaacggcugggagggcauggucgacggcugguacggcuuccgccaccucaacuccgagggccgcggccaggccgccgaccucaaguccacccaggccgccaucgaccagaucaacggcaagcucaaccgccucaucggcaagaccaacgagaaguuccaccagaucgagaaggaguucuccgaggucgagggccgcauccaggaccucgagaaguacgucgaggacaccaagaucgaccucugguccuacaacgccgagcuccucgucgcccucgagaaccagcacaccaucgaccucaccgacuccgagaugaacaagcucuucgagaagaccaagaagcagcuccgcgagaacgccgaggacaugggcaacggcugcuucaagaucuaccacaagugcgacaacgccugcaucggcuccauccgcaacggcaccuacgaccacaacgucuaccgcgacgaggcccucaacaaccgcuuccagaucaagggcgucgagcucaaguccggcuacaaggacuggauccucuggaucuccuucgccaucuccugcuuccuccucugcgucgcccuccucggcuucaucaugugggccugccagaagggcaacauccgcugcaacaucugcaucuga

SEQ ID NO: 109560 - RNA, 1701 nt, Artificial Sequence; identical to SEQ ID NO: 109135
  derived and/or modified CDS sequence (opt2) from hemagglutinin__InfluenzaA__ALE32039

SEQ ID NO: 109561 - RNA, 1701 nt, Artificial Sequence
  derived and/or modified CDS sequence (opt2) from hemagglutinin__InfluenzaA__ALE32040
augaagaccaucaucgcccucuccuacauccucugccucgucuucgcccagaagauccccggcaacgacaacuccaccgccacccucugccucggccaccacgccguccccaacggcaccaucgucaagaccaucaccaacgaccgcaucgaggucaccaacgccaccgagcucguccagaacuccuccaucggcgagaucugcgacuccccccaccagauccucgacggcgagaacugcacccucaucgacgcccuccucggcgacccccagugcgacggcuuccagaacaagaagugggaccucuucgucgagcgcuccaaggccuacuccaacugcuaccccuacgacguccccgacuacgccucccuccgcucccucgucgccuccuccggcacccucgaguucaacaacgaguccuucaacuggaccggcgucacccagaacggcaccuccuccgccugcauccgccgcuccuccuccuccuucuucucccgccucaacuggcucacccaccucaacuacaccuaccccgcccucaacgucaccaugcccaacaacgagcaguucgacaagcucuacaucuggggcguccaccaccccggcaccgacaaggaccagaucuuccucuacgcccaguccuccggccgcaucaccgucuccaccaagcgcucccagcaggccgucauccccaacaucggcucccgcccccgcauccgcgacauccccucccgcaucuccaucuacuggaccaucgucaagcccggcgacauccuccucaucaacuccaccggcaaccucaucgccccccgcggcuacuucaagauccgcuccggcaccuccuccaucaugcgcuccgacgcccccaucggcaagugcaaguccgagugcaucacccccaacggcuccauccccaacgacaagcccuuccagaacgucaaccgcaucaccuacggcgccugcccccgcuacgucaagcacuccacccucaagcucgccaccggcaugcgcaacguccccgagaagcagacccgcggcaucuucggcgccaucgccggcuucaucgagaacggcugggagggcauggucgacggcugguacggcuuccgccaccagaacuccgagggccgcggccaggccgccgaccucaaguccacccaggccgccaucgaccagaucaacggcaagcucaaccgccucaucggcaagaccaacgagaaguuccaccagaucgagaaggaguucuccgaggucgagggccgcauccaggaccucgagaaguacgucgaggacaccaagaucgaccucugguccuacaacgccgagcuccucgucgcccucgagaaccagcacaccaucgaccucaccgacuccgagaugaacaagcucuucgagaagaccaagaagcagcuccgcgagaacgccgaggacaugggcaacggcugcuucaagaucuaccacaagugcgacaacgccugcaucggcuccauccgcaacggcaccuacgaccacaacgucuaccgcgacgaggcccucaacaaccgcuuccagaucaagggcgucgagcucaaguccggcuacaaggacuggauccucuggaucuccuucgccaucuccugcuuccuccucugcgucgcccuccucggcuucaucaugugggccugccagaagggcaacauccgcugcaacaucugcaucuga

SEQ ID NO: 109562 - RNA, 1701 nt, Artificial Sequence; identical to SEQ ID NO: 108477
  derived and/or modified CDS sequence (opt2) from hemagglutinin__InfluenzaA__ALE32041

SEQ ID NO: 109563 - RNA, 1701 nt, Artificial Sequence; identical to SEQ ID NO: 108477
  derived and/or modified CDS sequence (opt2) from hemagglutinin__InfluenzaA__ALE32042

SEQ ID NO: 109564 - RNA, 1701 nt, Artificial Sequence
  derived and/or modified CDS sequence (opt2) from hemagglutinin__InfluenzaA__ALE32043
augaagaccaucaucgcccucuccuacauccucugccucgucuucgcccagaagauccccggcaacgacaacuccaccgccacccucugccucggccaccacgccguccccaacggcaccaucgucaagaccaucaccaacgaccgcaucgaggucaccaacgccaccgagcucguccagaacuccuccaucggcgagaucugcgacuccccccaccagauccucgacggcgagaacugcacccucaucgacgcccuccucggcgacccccagugcgacggcuuccagaacaagaagugggaccucuucgucgagcgcuccaaggccuacuccaacugcuaccccuacgacguccccgacuacaccucccuccgcucccucgucgccuccuccggcacccucgaguucaacaacgaguccuucaacuggaccggcgucacccagaacggcaccuccuccgccugcauccgccgcuccuccuccuccuucuucucccgccucaacuggcucacccaccucaacuacaccuaccccgcccucaacgucaccaugcccaacaacgagcaguucgacaagcucuacaucuggggcguccaccaccccggcaccgacaaggaccagaucuuccucuacgcccaguccuccggccgcaucaccgucuccaccaagcgcucccagcaggccgucauccccaacaucggcucccgcccccgcauccgcgacauccccucccgcaucuccaucuacuggaccaucgucaagcccggcgacauccuccucaucaacuccaccggcaaccucaucgccccccgcggcuacuucaagauccgcuccggcaaguccuccaucaugcgcuccgacgcccccaucggcaagugcaaguccgagugcaucacccccaacggcuccauccccaacgacaagcccuuccagaacgucaaccgcaucaccuacggcgccugcccccgcuacgucaagcacuccacccucaagcucgccaccggcaugcgcaacguccccgagaagcagacccgcggcaucuucggcgccaucgccggcuucaucgagaacggcugggagggcauggucgacggcugguacggcuuccgccaccagaacuccgagggccgcggccaggccgccgaccucaaguccacccaggccgccaucgaccagaucaacggcaagcucaaccgccucaucggcaagaccaacgagaaguuccaccagaucgagaaggaguucuccgaggucgagggccgcauccaggaccucgagaaguacgucgaggacaccaagaucgaccucugguccuacaacgccgagcuccucgucgcccucgagaaccagcacaccaucgaccucaccgacuccgagaugaacaagcucuucgagaagaccaagaagcagcuccgcgagaacgccgaggacaugggcaacggcugcuucaagaucuaccacaagugcgacaacgccugcaucggcuccauccgcaacggcaccuacgaccacaacgucuaccgcgacgaggcccucaacaaccgcuuccagaucaagggcgucgagcucaaguccggcuacaaggacuggauccucuggaucuccuucgccaucuccugcuuccuccucugcgucgcccuccucggcuucaucaugugggccugccagaagggcaacauccgcugcaacaucugcaucuga

SEQ ID NO: 109565 - RNA, 1701 nt, Artificial Sequence; identical to SEQ ID NO: 108477
  derived and/or modified CDS sequence (opt2) from hemagglutinin__InfluenzaA__ALE32044

SEQ ID NO: 109566 - RNA, 1701 nt, Artificial Sequence; identical to SEQ ID NO: 108477
  derived and/or modified CDS sequence (opt2) from hemagglutinin__InfluenzaA__ALE32045

SEQ ID NO: 109567 - RNA, 1701 nt, Artificial Sequence; identical to SEQ ID NO: 108477
  derived and/or modified CDS sequence (opt2) from hemagglutinin__InfluenzaA__ALE32046

SEQ ID NO: 109568 - RNA, 1701 nt, Artificial Sequence
  derived and/or modified CDS sequence (opt2) from hemagglutinin__InfluenzaA__ALE32047
augaagaccaucaucgcccucuccuacauccucugccucgucuucgcccagaagauccccggcaacgacaacuccaccgccacccucugccucggccaccacgccguccccaacggcaccaucgucaagaccaucaccaacgaccgcaucgaggucaccaacgccaccgagcucguccagaacuccuccaucggcgagaucugcgacuccccccaccagguccucgacggcgagaacugcacccucaucgacgcccuccucggcgacccccagugcgacggcuuccagaacaagaagugggaccucuucgucgagcgcuccaaggccuacuccaacugcuaccccuacgacguccccgacuacgccucccuccgcucccucgucgccuccuccggcacccucgaguucaacaacgaguccuucaacuggaccggcgucacccagaacggcaccuccuccgccugcauccgccgcuccuccuccuccuucuucucccgccucaacuggcucacccaccucaacuacaccuaccccgcccucaacgucaccaugcccaacaacgagcaguucgacaagcucuacaucuggggcguccaccaccccggcaccgacaaggaccagaucuuccucuacgcccaguccuccggccgcaucaccgucuccaccaagcgcucccagcaggccgucauccccaacaucggcucccgcccccgcauccgcgacauccccucccgcaucuccaucuacuggaccaucgucaagcccggcgacauccuccucaucaacuccaccggcaaccucaucgccccccgcggcuacuucaagauccgcuccggcaaguccuccaucaugaucuccgacgcccccaucggcaagugcaaguccgagugcaucacccccaacggcuccauccccuccgacaagcccuuccagaacgucaaccgcaucaccuacggcgccugcccccgcuacgucaagcacuccacccucaagcucgccaccggcaugcgcaacguccccgagaagcagacccgcggcaucuucggcgccaucgccggcuucaucgagaacggcugggagggcauggucgacggcugguacggcuuccgccaccagaacuccgagggccgcggccaggccgccgaccucaaguccacccaggccgccaucgaccagaucaacggcaagcucaaccgccucaucggcaagaccaacgagaaguuccaccagaucgagaaggaguucuccgaggucgagggccgcauccaggaccucgagaaguacgucgaggacaccaagaucgaccucugguccuacaacgccgagcuccucgucgcccucgagaaccagcacaccaucgaccucaccgacuccgagaugaacaagcucuucgagaagaccaagaagcagcuccgcgagaacgccgaggacaugggcaacggcugcuucaagaucuaccacaagugcgacaacgccugcaucggcuccauccgcaacggcaccuacgaccacaacgucuaccgcgacgaggcccucaacaaccgcuuccagaucaagggcgucgagcucaaguccggcuacaaggacuggauccucuggaucuccuucgccaucuccugcuuccuccucugcgucgcccuccucggcuucaucaugugggccugccagaagggcaacauccgcugcaacaucugcaucuga

SEQ ID NO: 109569 - RNA, 1701 nt, Artificial Sequence; identical to SEQ ID NO: 108477
  derived and/or modified CDS sequence (opt2) from hemagglutinin__InfluenzaA__ALE32048

SEQ ID NO: 109570 - RNA, 1701 nt, Artificial Sequence; identical to SEQ ID NO: 109135
  derived and/or modified CDS sequence (opt2) from hemagglutinin__InfluenzaA__ALE32049

SEQ ID NO: 109571 - RNA, 1701 nt, Artificial Sequence
  derived and/or modified CDS sequence (opt2) from hemagglutinin__InfluenzaA__ALE32050
augaagaccaucaucgcccucuccuacauccucugccucgucuucgcccagaagauccccggcaacgacaacuccaccgccacccucugccucggccaccacgccguccccaacggcaccaucgucaagaccaucaccaacgaccgcaucgaggucaccaacgccaccgagcucguccagaacuccuccaucggcgagaucugcgacuccccccaccagauccucgacggcgagaacugcacccucaucgacgcccuccucggcgacccccagugcgacggcuuccagaacaagaagugggaccucuucgucgagcgcuccaaggccuacuccaacugcuaccccuacgacguccccgacuacgccucccuccgcucccucgucgccuccuccggcacccucgaguucaacaacgaguccuucaacuggaccggcgucacccaggacggcaccuccuccgccugcauccgccgcuccuccuccuccuucuucucccgccucaacuggcucacccaccucaacuacaccuaccccgcccucaacgucaccaugcccaacaacgagcaguucgacaagcucuacaucuggggcguccaccaccccggcaccgacaaggaccagaucuuccucuacgcccaguccuccggccgcaucaccgucuccaccaagcgcucccagcaggccgucauccccaacaucggcucccgcccccgcauccgcgacauccccucccgcaucuccaucuacuggaccaucgucaagcccggcgacauccuccucaucaacuccaccggcaaccucaucgccccccgcggcuacuucaagauccgcuccggcaaguccuccaucaugcgcuccgacgcccccaucggcaagugcaaguccgagugcaucacccccaacggcuccauccccaacgacaagcccuuccagaacgucaaccgcaucaccuacggcgccugcccccgcuacgucaagcacuccacccucaagcucgccaccggcaugcgcaacguccccgagaagcagacccgcggcaucuucggcgccaucgccggcuucaucgagaacggcugggagggcauggucgacggcugguacggcuuccgccaccagaacuccgagggccgcggccaggccgccgaccucaaguccacccaggccgccaucgaccagaucaacggcaagcucaaccgccucaucggcaagaccaacgagaaguuccaccagaucgagaaggaguucuccgaggucgagggccgcauccaggaccucgagaaguacgucgaggacaccaagaucgaccucugguccuacaacgccgagcuccucgucgcccucgagaaccagcacaccaucgaccucaccgacuccgagaugaacaagcucuucgagaagaccaagaagcagcuccgcgagaacgccgaggacaugggcaacggcugcuucaagaucuaccacaagugcgacaacgccugcaucggcuccauccgcaacggcaccuacgaccacaacgucuaccgcgacgaggcccucaacaaccgcuuccagaucaagggcgucgagcucaaguccggcuacaaggacuggauccucuggaucuccuucgccaucuccugcuuccuccucugcgucgcccuccucggcuucaucaugugggccugccagaagggcaacauccgcugcaacaucugcaucuga

SEQ ID NO: 109572 - RNA, 1701 nt, Artificial Sequence
  derived and/or modified CDS sequence (opt2) from hemagglutinin__InfluenzaA__ALE32051
augaagaccaucaucgcccucuccuacauccucugccucgucuucgcccagaagauccccggcaacgacaacuccaccgccacccucugccucggccaccacgccguccccaacggcaccaucgucaagaccaucaccaacgaccgcaucgaggucaccaacgccaccgagcucguccagaacuccuccaucggcgagaucugcgacuccccccaccagauccucgacggcgagaacugcacccucaucgacgcccuccucggcgacccccagugcgacggcuuccagaacaagaagugggaccucuucgucgagcgcuccaaggccuacuccaacugcuaccccuacgacguccccgacuacgccucccuccgcucccucgucgccuccuccggcacccucgaguucaacaacgaguccuucaacuggaccggcgucacccagaacggcaccuccuccgccugcauccgccgcuccuccuccuccuucuucucccgccucaacuggcucacccaccucaacuacaccuaccccgcccucaacgucaccaugcccaacaacgagcaguucgacaagcucuacaucuggggcguccaccaccccggcaccgacaaggaccagaucuuccucuacgcccaguccuccggccgcaucaccgucuccaccaagcgcucccagcaggccgucauccccaacaucggcucccgcccccgcauccgcgacauccccucccgcaucuccaucuacuggaccaucgucaagcccggcgacauccuccucaucaacuccaccggcaaccucaucgccccccgcggcuacuucaagauccgcuccggcaaguccuccaucaugcgcuccgacgcccccaucggcaagugcaaguccgagugcaucacccccaacggcuccauccccaacgacaagcccuuccagaacgucaaccgcgucaccuacggcgccugcccccgcuacgucaagcacuccacccucaagcucgccaccggcaugcgcaacguccccgagaagcagacccgcggcaucuucggcgccaucgccggcuucaucgagaacggcugggagggcauggucgacggcugguacggcuuccgccaccagaacuccgagggccgcggccaggccgccgaccucaaguccacccaggccgccaucgaccagaucaacggcaagcucaaccgccucaucggcaagaccaacgagaaguuccaccagaucgagaaggaguucuccgaggucgagggccgcauccaggaccucgagaaguacgucgaggacaccaagaucgaccucugguccuacaacgccgagcuccucgucgcccucgagaaccagcacaccaucgaccucaccgacuccgagaugaacaagcucuucgagaagaccaagaagcagcuccgcgagaacgccgaggacaugggcaacggcugcuucaagaucuaccacaagugcgacaacgccugcaucggcuccauccgcaacggcaccuacgaccacaacgucuaccgcgacgaggcccucaucaaccgcuuccagaucaagggcgucgagcucaaguccggcuacaaggacuggauccucuggaucuccuucgccaucuccugcuuccuccucugcgucgcccuccucggcuucaucaugugggccugccagaagggcaacauccgcugcaacaucugcaucuga

SEQ ID NO: 109573 - RNA, 1701 nt, Artificial Sequence; identical to SEQ ID NO: 108477
  derived and/or modified CDS sequence (opt2) from hemagglutinin__InfluenzaA__ALE32052

SEQ ID NO: 109574 - RNA, 1701 nt, Artificial Sequence; identical to SEQ ID NO: 108477
  derived and/or modified CDS sequence (opt2) from hemagglutinin__InfluenzaA__ALE32053

SEQ ID NO: 109575 - RNA, 1701 nt, Artificial Sequence
  derived and/or modified CDS sequence (opt2) from hemagglutinin__InfluenzaA__ALE32054
augaagaccaucaucgcccucuccuacauccucugccucgucuucgcccagaagauccccggcaacgacaacuccaccgccacccucugccucggccaccacgccguccccaacggcaccaucgucaagaccaucaccaacgaccgcaucgaggucaccaacgccaccgagcucguccagaacuccuccaucggcgagaucugcgaguccccccaccagauccucgacggcgagaacugcacccucaucgacgcccuccucggcgacccccagugcgacggcuuccagaacaagaagugggaccucuucgucgagcgcuccaaggccuacuccaacugcuaccccuacgacguccccgacuacgccucccuccgcucccucgucgccuccuccggcacccucgaguucaacaacgaguccuucaacuggaccggcgucacccagaacggcaccuccuccgccugcauccgccgcuccuccuccuccuucuucucccgccucaacuggcucacccaccucaacuacaccuaccccgcccucaacgucaccaugcccaacaacgagcaguucgacaagcucuacaucuggggcguccaccaccccggcaccgacaaggaccagaucuuccucuacgcccaguccuccggccgcaucaccgucuccaccaagggcucccagcaggccgucauccccaacaucggcucccgcccccgcauccgcgacauccccucccgcaucuccaucuacuggaccaucgucaagcccggcgacauccuccucaucaacuccaccggcaaccucaucgccccccgcggcuacuucaagauccgcuccggcaaguccuccaucaugcgcuccgacgcccccaucggcaagugcaaguccgagugcaucacccccaacggcuccauccccaacgacaagcccuuccagaacgucaaccgcaucaccuacggcgccugcccccgcuacgucaagcacuccacccucaagcucgccaccggcaugcgcaacguccccgagaagcagacccgcggcaucuucggcgccaucgccggcuucaucgagaacggcugggagggcauggucgacggcugguacggcuuccgccaccagaacuccgagggccgcggccaggccgccgaccucaaguccacccaggccgccaucgaccagaucaacggcaagcucaaccgccucaucggcaagaccaacgagaaguuccaccagaucgagaaggaguucuccgaggucgagggccgcauccaggaccucgagaaguacgucgaggacaccaagaucgaccucugguccuacaacgccgagcuccucgucgcccucgagaaccagcacaccaucgaccucaccgacuccgagaugaacaagcucuucgagaagaccaagaagcagcuccgcgagaacgccgaggacaugggcaacggcugcuucaagaucuaccacaagugcgacaacgccugcaucggcuccauccgcaacggcaccuacgaccacaacgucuaccgcgacgaggcccucaacaaccgcuuccagaucaagggcgucgagcucaaguccggcuacaaggacuggauccucuggaucuccuucgccaucuccugcuuccuccucugcgucgcccuccucggcuucaucaugugggccugccagaagggcaacauccgcugcaaccacugcaucuga

SEQ ID NO: 109576 - RNA, 1701 nt, Artificial Sequence
  derived and/or modified CDS sequence (opt2) from hemagglutinin__InfluenzaA__ALE32055
augaagaccaucaucgcccucuccuacauccucugccucgucuucgcccagaagauccccggcaacgacaacuccaccgccacccucugccucggccaccacgccguccccaacggcaccaucgucaagaccaucaccaacgaccgcaucgaggucaccaacgccaccgagcucguccagaacuccuccaucggcgagaucugcgacuccccccaccagauccucgacggcgagaacugcacccucaucgacgcccuccucggcgacccccagugcgacggcuuccagaacaagaagugggaccucuucgucgagcgcuccaaggccuacuccaacugcuaccccuacgacguccccgacuacgccucccuccgcucccucgucgccuccuccggcacccucgaguucaacaacgaguccuucaacuggaccggcgucacccagaacggcaccuccuccgccugcauccgccgcuccuccuccuccuucuucucccgccucaacuggcucacccaccucaacuacaaguaccccgcccucaacgucaccaugcccaacaacgagcaguucgacaagcucuacaucuggggcguccaccaccccggcaccgacaaggaccagaucuuccucuacgcccaguccuccggccgcaucaccgucuccaccaagcgcucccagcaggccgucauccccaacaucggcucccgcccccgcauccgcgacauccccucccgcaucuccaucuacuggaccaucgucaagcccggcgacauccuccucaucaacuccaccggcaaccucaucgccccccgcggcuacuucaagauccgcuccggcaaguccuccaucaugcgcuccgacgcccccaucggcaagugcaaguccgagugcaucacccccaacggcuccauccccaacgacaagcccuuccagaacgucaaccgcaucaccuacggcgccugcccccgcuacgucaagcacuccacccucaagcucgccaccggcaugcgcaacguccccgagaagcagacccgcggcaucuucggcgccaucgccggcuucaucgagaacggcugggagggcauggucgacggcugguacggcuuccgccaccagaacuccgagggccgcggccaggccgccgaccucaaguccacccaggccgccaucgaccagaucaacggcaagcucaaccgccucaucggcaagaccaacgagaaguuccaccagaucgagaaggaguucuccgaggucgagggccgcauccaggaccucgagaaguacgucgaggacaccaagaucgaccucugguccuacaacgccgagcuccucgucgcccucgagaaccagcacaccaucgaccucaccgacuccgagaugaacaagcucuucgagaagaccaagaagcagcuccgcgagaacgccgaggacaugggcaacggcugcuucaagaucuaccacaagugcgacaacgccugcaucggcuccauccgcaacggcaccuacgaccacaacgucuaccgcgacgaggcccucaacaaccgcuuccagaucaagggcgucgagcucaaguccggcuacaaggacuggauccucuggaucuccuucgccaucuccugcuuccuccucugcgucgcccuccucggcuucaucaugugggccugccagaacggcaacauccgcugcaacaucugcaucuga

SEQ ID NO: 109577 - RNA, 1701 nt, Artificial Sequence; identical to SEQ ID NO: 109128
  derived and/or modified CDS sequence (opt2) from hemagglutinin__InfluenzaA__ALE32056

SEQ ID NO: 109578 - RNA, 1701 nt, Artificial Sequence
  derived and/or modified CDS sequence (opt2) from hemagglutinin__InfluenzaA__ALE32057
augaagaccaucaucgcccucuccuacguccucugccucgucuucgcccagaagauccccggcaacgacaacuccaccgccacccucugccucggccaccacgccguccccaacggcaccaucgucaagaccaucaccaacgaccgcaucgaggucaccaacgccaccgagcucguccagaacuccuccaucggcgagaucugcgacuccccccaccagauccucgacggcgagaacugcacccucaucgacgcccuccucggcgacccccagugcgacggcuuccagaacaagaagugggaccucuucgucgagcgcuccaaggccuacuccaacugcuaccccuacgacguccccgacuacgccucccuccgcucccucgucgccuccuccggcacccucgaguucaacaacgaguccuucaacuggaccggcgucacccagaacggcaccuccuccgccugcauccgccgcuccuccuccuccuucuucucccgccucaacuggcucacccaccucaacuacaccuaccccgcccucaacgucaccaugcccaacaacgagcaguucgacaagcucuacaucuggggcguccaccaccccggcaccgacaaggaccagaucuuccucuacgcccaguccuccggccgcaucaccgucuccaccaagcgcucccagcaggccgucauccccaacaucggcucccgcccccgcauccgcgacauccccucccgcaucuccaucuacuggaccaucgucaagcccggcgacauccuccucaucaacuccaccggcaaccucaucgccccccgcggcuacuucaagauccgcuccggcaaguccuccaucaugcgcuccgacgcccccaucggcaagugcaaguccgagugcaucacccccaacggcuccauccccaacgacaagcccuuccagaacgucaaccgcaucaccuacggcgccugcccccgcuacgucaagcacuccacccucaagcucgccaccggcaugcgcaacguccccgagaagcagacccgcggcaucuucggcgccaucgccggcuucaucgagaacggcugggagggcauggucgacggcugguacggcuuccgccaccagaacuccgagggccgcggccaggccgccgaccucaaguccacccaggccgccaucgaccagaucaacggcaagcucaaccgccucaucggcaagaccaacgagaaguuccaccagaucgagaaggaguucuccgaggucgagggccgcauccaggaccucgagaaguacgucgaggacaccaagaucgaccucugguccuacaacgccgagcuccucgucgcccucgagaaccagcacaccaucgaccucaccgacuccgagaugaacaagcucuucgagaagaccaagaagcagcuccgcgagaacgccgaggacaugggcaacggcugcuucaagaucuaccacaagugcgacaacgccugcaucggcuccauccgcaacggcaccuacgaccacaacgucuaccgcgacgaggcccucaacaaccgcuuccagaucaagggcgucgagcucaaguccggcuacaaggacuggauccucuggaucuccuucgccaucuccugcuuccuccucugcgucgcccuccucggcuucaucaugugggccugccagaagggcaacauccgcugcaacaucugcaucuga

SEQ ID NO: 109579 - RNA, 1701 nt, Artificial Sequence; identical to SEQ ID NO: 108477
  derived and/or modified CDS sequence (opt2) from hemagglutinin__InfluenzaA__ALE32058

SEQ ID NO: 109580 - RNA, 1701 nt, Artificial Sequence; identical to SEQ ID NO: 108477
  derived and/or modified CDS sequence (opt2) from hemagglutinin__InfluenzaA__ALE32059

SEQ ID NO: 109581 - RNA, 1701 nt, Artificial Sequence
  derived and/or modified CDS sequence (opt2) from hemagglutinin__InfluenzaA__ALE32060
augaagaccaucaucgcccucuccuacauccucugccucgucuucgcccagaagauccccggcaacgacaacuccaccgccacccucugccucggccaccacgccguccccaacggcaccaucgucaagaccaucaccaacgaccgcaucgaggucaccaacgccaccgagcucguccagaacuccuccaucggcgagaucugcgacuccccccaccagauccucgacggcgagaacugcacccucaucgacgcccuccucggcgacccccagugcgacggcuuccagaacaagaagugggaccucuucgucgagcgcuccaaggccuacuccaacugcuaccccuacgacguccccgacuacgccucccuccgcucccucgucgccuccuccggcacccucgaguucaacaacgaguccuucaacuggaccggcgucacccagaacggcaccuccuccgccugcauccgccgcuccuccuccuccuucuucucccgccucaacuggcucacccaccucaacuacaccuaccccgcccucaacgucaccaugcccaacaacgagcaguucgacaagcucuacaucuggggcguccaccaccccggcaccgacaaggaccaggucuuccucuacgcccaguccuccggccgcaucaccgucuccaccaagcgcucccagcaggccgucauccccaacaucggcucccgcccccgcauccgcgacauccccucccgcaucuccaucuacuggaccaucgucaagcccggcgacauccuccucauccacuccaccggcaaccucaucgccccccgcggcuacuucaagauccgcuccggcaaguccuccaucaugcgcuccgacgcccccaucggcaagugcaaguccgagugcaucacccccaacggcuccauccccaacgacaagcccuuccagaacgucaaccgcaucaccuacggcgccugcccccgcuacgucaagcacuccacccucaagcucgccaccggcaugcgcaacguccccgagaagcagacccgcggcaucuucggcgccaucgccggcuucaucgagaacggcugggagggcauggucgacggcugguacggcuuccgccaccagaacuccgagggccgcggccaggccgccgaccucaaguccacccaggccgccaucgaccagaucaacggcaagcucaaccgccucaucggcaagaccaacgagaaguuccaccagaucgagaaggaguucuccgaggucgagggccgcauccaggaccucgagaaguacgucgaggacaccaagaucgaccucugguccuacaacgccgagcuccucgucgcccucgagaaccagcacaccaucgaccucaccgacuccgagaugaacaagcucuucgagaagaccaagaagcagcuccgcgagaacgccgaggacaugggcaacggcugcuucaagaucuaccacaagugcgacaacgccugcaucggcuccauccgcaacggcaccuacgaccacaacgucuaccgcgacgaggcccucaacaaccgcuuccagaucaagggcgucgagcucaaguccggcuacaaggacuggauccucuggaucuccuucgccaucuccugcuuccuccucugcgucgcccuccucggcuucaucaugugggccugccagaagggcaacauccgcugcaacaucugcaucuga

SEQ ID NO: 109582 - RNA, 1701 nt, Artificial Sequence
  derived and/or modified CDS sequence (opt2) from hemagglutinin__InfluenzaA__ALE32061
augaagaccaucaucgcccucuccuacauccucugccucgucuucgcccagaagauccccggcaacgacaacuccaccgccacccucugccucggccaccacgccguccccaacggcaccaucgucaagaccaucaccaacgaccgcaucgaggucaccaacgccaccgagcucguccagaacuccuccaucggcgagaucugcgacuccccccaccagauccucgacggcgagaacugcacccucaucgacgcccuccucggcgacccccagugcgacggcuuccagaacaagaagugggaccucuucgucgagcgcuccaaggccuacuccaacugcuaccccuacgacguccccgacuacgccucccuccgcucccucgucgccuccuccggcacccucgaguucaacaacgaguccuucaacuggaccggcgucacccagaacggcaccuccuccgccugcauccgccgcuccuccuccuccuucuucucccgccucaacuggcucacccaccucaaguacaccuaccccgcccucaacgucaccaugcccaacaacgagcaguucgacaagcucuacaucuggggcguccaccaccccggcaccgacaacgaccagaucuuccucuacgcccgcuccuccggccgcaucaccgucuccaccaagggcucccagcaggccgucauccccaacaucggcucccgcccccgcauccgcgacauccccucccgcaucuccaucuacuggaccaucgucaagcccggcgacauccuccucaucaacuccaccggcaaccucaucgccccccgcggcuacuucaagauccgcuccggcaaguccuccaucaugcgcuccgacgcccccaucggcaagugcaaguccgagugcaucacccccaacggcuccauccccaacgacaagcccuuccagaacgucaaccgcaucaccuacggcgccugcccccgcuacgucaagcacuccacccucaagcucgccaccggcaugcgcaacguccccgagaagcagacccgcggcaucuucggcgccaucgccggcuucaucgagaacggcugggagggcauggucgacggcugguacggcuuccgccaccagaacuccgagggccgcggccaggccgccgaccucaaguccacccaggccgccaucgaccagaucaacggcaagcucaaccgccucaucggcaagaccaacgagaaguuccaccagaucgagaaggaguucuccgaggucgagggccgcauccaggaccucgagaaguacgucgaggacaccaagaucgaccucugguccuacaacgccgagcuccucgucgcccucgagaaccagcacaccaucgaccucaccgacuccgagaugaacaagcucuucgagaagaccaagaagcagcuccgcgagaacgccgaggacaugggcaacggcugcuucaagaucuaccacaagugcgacaacgccugcaucggcuccauccgcaacggcaccuacgaccacaacgucuaccgcgacgaggcccucaacaaccgcuuccagaucaagggcgucgagcucaaguccggcuacaaggacuggauccucuggaucuccuucgccaucuccugcuuccuccucugcgucgcccuccucggcuucaucaugugggccugccagaagggcaacauccgcugcaacaucugcaucuga

SEQ ID NO: 109583 - RNA, 1701 nt, Artificial Sequence
  derived and/or modified CDS sequence (opt2) from hemagglutinin__InfluenzaA__ALE32062
augaagaccaucaucgcccucuccuacauccucugccucgucuucgcccagaagauccccggcaacgacaacuccaccgccacccucugccucggccaccacgccguccccaacggcaccaucgucaagaccaucaccaacgaccgcaucgaggucaccaacgccaccgagcucguccagaacuccuccaucggcgagaucugcgacuccccccaccagauccucgacggcgagaacugcacccucaucgacgcccuccucggcgacccccagugcgacggcuuccagaacaagaagugggaccucuucgucgagcgcuccaaggccuacuccaacugcuaccccuacgacguccccgacuacgccucccuccgcucccucgucgccuccuccggcacccucgaguucaacaacgaguccuucaacuggaccggcgucacccagaacggcaccuccuccgccugcauccgccgcuccuccuccuccuucuucucccgccucaacuggcucacccaccucaacuacaccuaccccgcccucaacgucaccaugcccaacaacgagcaguucgacaagcucuacaucuggggcguccaccaccccggcaccgacaaggaccagaucuuccucuacgcccaguccuccggccgcaucaccgucuccaccaagcgcucccagcaggccgucauccccaacaucggcucccgcccccgcauccgcgacauccccucccgcaucuccaucuacuggaccaucgucaagcccggcgacauccuccucaucuacuccaccggcaaccucaucgccccccgcggcuacuucaagauccgcuccggcaaguccuccaucaugcgcuccgacgcccccaucggcaagugcaaguccgagugcaucacccccaacggcuccauccccaacgacaagcccuuccagaacgucaaccgcaucaccuacggcgccugcccccgcuacgucaagcacuccacccucaagcucgccaccggcaugcgcaacguccccgagaagcagacccgcggcaucuucggcgccaucgccggcuucaucgagaacggcugggagggcauggucgacggcugguacggcuuccgccaccagaacuccgagggccgcggccaggccgccgaccucaaguccacccaggccgccaucgaccagaucaacggcaagcucaaccgccucaucggcaagaccaacgagaaguuccaccagaucgagaaggaguucuccgaggucgagggccgcauccaggaccucgagaaguacgucgaggacaccaagaucgaccucugguccuacaacgccgagcuccucgucgcccucgagaaccagcacaccaucgaccucaccgacuccgagaugaacaagcucuucgagaagaccaagaagcagcuccgcgagaacgccgaggacaugggcaacggcugcuucaagaucuaccacaagugcgacaacgccugcaucggcuccauccgcaacggcaccuacgaccacaacgucuaccgcgacgaggcccucaacaaccgcuuccagaucaagggcgucgagcucaaguccggcuacaaggacuggauccucuggaucuccuucgccaucuccugcuuccuccucugcgucgcccuccucggcuucaucaugugggccugccagaagggcaacauccgcugcaacaucugcaucuga

SEQ ID NO: 109584 - RNA, 1701 nt, Artificial Sequence; identical to SEQ ID NO: 108477
  derived and/or modified CDS sequence (opt2) from hemagglutinin__InfluenzaA__ALE32063

SEQ ID NO: 109585 - RNA, 1701 nt, Artificial Sequence
  derived and/or modified CDS sequence (opt2) from hemagglutinin__InfluenzaA__ALE32064
augaagaccaucaucgcccucuccuacauccucugccucgucuucgcccagaagauccccggcaacgacaacuccaccgccacccucugccucggccaccacgccguccccaacggcaccaucgucaagaccaucaccaacgaccgcaucgaggucaccaacgccaccgagcucguccagaacuccuccaucggcgagaucugcgacuccccccaccagauccucgacggcgagaacugcacccucaucgacgcccuccucggcgacccccagugcgacggcuuccagaacaagaagugggaccucuucgucgagcgcuccaaggccuacuccaacugcuaccccuacgacguccccgacuacgccucccuccgcucccucgucgccuccuccggcacccucgaguucaacaacgaguccuucaacuggaccggcgucacccagaacggcaccuccuccgccugcauccgccgcuccuccaacuccuucuucucccgccucaacuggcucacccaccucaacuacaccuaccccgcccucaacgucaccaugcccaacaacgagcaguucgacaagcucuacaucuggggcguccaccaccccggcaccgacaaggaccagaucuuccucuacgcccaguccuccggccgcaucaccgucuccaccaagcgcucccagcaggccgucauccccaacaucggcucccgcccccgcauccgcgacauccccucccgcaucuccaucuacuggaccaucgucaagcccggcgacauccuccucaucaacuccaccggcaaccucaucgccccccgcggcuacuucaagauccgcuccggcaaguccuccaucaugcgcuccgacgcccccaucggcaagugcaaguccgagugcaucacccccaacggcuccauccccaacgacaagcccuuccagaacgucaaccgcaucaccuacggcgccugcccccgcuacgucaagcacuccacccucaagcucgccaccggcaugcgcaacguccccgagaagcagacccgcggcaucuucggcgccaucgccggcuucaucgagaacggcugggagggcauggucgacggcugguacggcuuccgccaccagaacuccgagggccgcggccaggccgccgaccucaaguccacccaggccgccaucgaccagaucaacggcaagcucaaccgccucaucggcaagaccaacgagaaguuccaccagaucgagaaggaguucuccgaggucgagggccgcauccaggaccucgagaaguacgucgaggacaccaagaucgaccucugguccuacaacgccgagcuccucgucgcccucgagaaccagcacaccaucgaccucaccgacuccgagaugaacaagcucuucgagaagaccaagaagcagcuccgcgagaacgccgaggacaucggcaacggcugcuucaagaucuaccacaagugcgacaacgccugcaucggcuccauccgcaacggcaccuacgaccacaacgucuaccgcgacgaggcccucaacaaccgcuuccagaucaagggcgucgagcucaaguccggcuacaaggacuggauccucuggaucuccuucgccaucuccugcuuccuccucugcgucgcccuccucggcuucaucaugugggccugccagaagggcaacauccgcugcaacaucugcaucuga

SEQ ID NO: 109586 - RNA, 1701 nt, Artificial Sequence; identical to SEQ ID NO: 108477
  derived and/or modified CDS sequence (opt2) from hemagglutinin__InfluenzaA__ALE32065

SEQ ID NO: 109587 - RNA, 1701 nt, Artificial Sequence
  derived and/or modified CDS sequence (opt2) from hemagglutinin__InfluenzaA__ALE32066
augaagaccaucaucgcccucuccuacauccucugccucgucuucgcccagaagauccccggcaacgacaacuccaccgccacccucugccucggccaccacgccguccccaacggcaccaucgucaagaccaucaccaacgaccgcaucgaggucaccaacgccaccgagcucguccagaacuccuccaucggcgagaucugcgacuccccccaccagauccucgacggcgagaacugcacccucaucgacgcccuccucggcgacccccagugcgacggcuuccagaacaagaagugggaccucuucgucgagcgcuccaaggccuacuccaacugcuaccccuacgacguccccgacuacgccucccuccgcucccucgucgccuccuccggcacccucgaguucaacaacgaguccuucaacuggaccggcgucacccagaacggcaccuccuccgccugcauccgccgcuccuccuccuccuucuucucccgccucaacuggcucacccaccucaacuacaccuaccccgcccucaacgucuccaugcccaacaacgagcaguucgacaagcucuacaucuggggcguccaccaccccggcaccgacaaggaccagaucuuccucuacgcccaguccuccggccgcaucaccgucuccaccaagcgcucccagcaggccgucauccccaacaucggcucccgcccccgcauccgcgacauccccucccgcaucuccaucuacuggaccaucgucaagcccggcgacauccuccucaucaacuccaccggcaaccucaucgccccccgcggcuacuucaagauccgcuccggcaaguccuccaucaugcgcuccgacgcccccaucggcaagugcaaguccgagugcaucacccccaacggcuccauccccaacgacaagcccuuccagaacgucaaccgcaucaccuacggcgccugcccccgcuacgucaagcacuccacccucaagcucgccaccggcaugcgcaacguccccgagaagcagacccgcggcaucuucggcgccaucgccggcuucaucgagaacggcugggagggcauggucgacggcugguacggcuuccgccaccagaacuccgagggccgcggccaggccgccgaccucaaguccacccaggccgccaucgaccagaucaacggcaagcucaaccgccucaucggcaagaccaacgagaaguuccaccagaucgagaaggaguucuccgaggucgagggccgcauccaggaccucgagaaguacgucgaggacaccaagaucgaccucugguccuacaacgccgagcuccucgucgcccucgagaaccagcacaccaucgaccucaccgacuccgagaugaacaagcucuucgagaagaccaagaagcagcuccgcgagaacgccgaggacaugggcaacggcugcuucaagaucuaccacaagugcgacaacgccugcaucggcuccauccgcaacggcaccuacgaccacaacgucuaccgcgacgaggcccucaacaaccgcuuccagaucaagggcgucgagcucaaguccggcuacaaggacuggauccucuggaucuccuucgccaucuccugcuuccuccucugcgucgcccuccucggcuucaucaugugggccugccagaagggcaacauccgcugcaacaucugcaucuga

SEQ ID NO: 109588 - RNA, 1701 nt, Artificial Sequence; identical to SEQ ID NO: 109259
  derived and/or modified CDS sequence (opt2) from hemagglutinin__InfluenzaA__ALE32067

SEQ ID NO: 109589 - RNA, 1701 nt, Artificial Sequence; identical to SEQ ID NO: 108477
  derived and/or modified CDS sequence (opt2) from hemagglutinin__InfluenzaA__ALE32068

SEQ ID NO: 109590 - RNA, 1701 nt, Artificial Sequence; identical to SEQ ID NO: 108477
  derived and/or modified CDS sequence (opt2) from hemagglutinin__InfluenzaA__ALE32069

SEQ ID NO: 109591 - RNA, 1701 nt, Artificial Sequence
  derived and/or modified CDS sequence (opt2) from hemagglutinin__InfluenzaA__ALE32070
augaagaccaucaucgcccucuccuacauccucugccucgucuucgcccagaagauccccggcaacgacaacuccaccgccacccucugccucggccaccacgccguccccaacggcaccaucgucaagaccaucaccaacgaccgcaucgaggucaccaacgccaccgagcucguccagaacuccuccaucggcgagaucugcgacuccccccaccagauccucgacggcgagaacugcacccucaucgacgcccuccucggcgacccccagugcgacggcuuccagaacaagaagugggaccucuucgucgagcgcuccaaggccuacuccaacugcuaccccuacgacguccccgacuacgccucccuccgcucccucgucgccuccuccggcacccucgaguucaacaacgaguccuucaacuggaccggcgucacccagaacggcaccuccuccgccugcauccgccgcuccuccuccuccuucuucucccgccucaacuggcucacccaccucaacuacaccuaccccgcccucaacgucaccaugcccaacaacgagcaguucgacaagcucuacaucuggggcguccaccaccccggcaccgacaaggaccagaucuuccucuacgcccaguccuccggccgcaucaccgucuccaccaagcgcucccagcaggccgucauccccaacaucggcucccgcccccgcauccgcgacauccccucccgcaucuccaucuacuggaccaucgucaagcccggcgacauccuccucaucaacuccaccggcaaccucaucgccccccgcggcuacuucaagauccgcuccggcaaguccuccaucaugcgcuccgacgcccccaucggcaagugcaaguccgagugcaucacccccaacggcuccauccccaacgacaagcccuuccagaacgucaaccgcaucaccuacggcgucugcccccgcuacgucaagcacuccacccucaagcucgccaccggcaugcgcaacguccccgagaagcagacccgcggcaucuucggcgccaucgccggcuucaucgagaacggcugggagggcauggucgacggcugguacggcuuccgccaccagaacuccgagggccgcggccaggccgccgaccucaaguccacccaggccgccaucgaccagaucaacggcaagcucaaccgccucaucggcaagaccaacgagaaguuccaccagaucgagaaggaguucuccgaggucgagggccgcauccaggaccucgagaaguacgucgaggacaccaagaucgaccucugguccuacaacgccgagcuccucgucgcccucgagaaccagcacaccaucgaccucaccgacuccgagaugaacaagcucuucgagaagaccaagaagcagcuccgcgagaacgccgaggacaugggcaacggcugcuucaagaucuaccacaagugcgacaacgccugcaucggcuccauccgcaacggcaccuacgaccacaacgucuaccgcgacgaggcccucaacaaccgcuuccagaucaagggcgucgagcucaaguccggcuacaaggacuggauccucuggaucuccuucgccaucuccugcuuccuccucugcgucgcccuccucggcuucaucaugugggccugccagaagggcaacauccgcugcaacaucugcaucuga

SEQ ID NO: 109592 - RNA, 1701 nt, Artificial Sequence; identical to SEQ ID NO: 108477
  derived and/or modified CDS sequence (opt2) from hemagglutinin__InfluenzaA__ALE32071

SEQ ID NO: 109593 - RNA, 1701 nt, Artificial Sequence; identical to SEQ ID NO: 109474
  derived and/or modified CDS sequence (opt2) from hemagglutinin__InfluenzaA__ALE32072

SEQ ID NO: 109594 - RNA, 1701 nt, Artificial Sequence
  derived and/or modified CDS sequence (opt2) from hemagglutinin__InfluenzaA__ALE32073
augaagaccaucaucgcccucuccuacauccucugccucgucuucgcccagaagauccccggcaacgacaacuccaccgccacccucugccucggccaccacgccguccccaacggcaccaucgucaagaccaucaccaacgaccgcaucgaggucaccaacgccaccgagcucguccagaacuccuccaucggcgagaucugcgacuccccccaccagauccucgacggcgagaacugcacccucaucgacgcccuccucggcgacccccagugcgacggcuuccagaacaagaagugggaccucuucgucgagcgcuccaaggccuacuccaacugcuaccccuacgacguccccgacuacgccucccuccgcucccucgucgccuccuccggcacccucgaguucaacaacgaguccuucaacuggaccggcgucacccagaacggcaccuccuccgccugcauccgcaaguccuccuccuccuucuucucccgccucaacuggcucacccaccucaacuacaccuaccccgcccucaacgucaccaugcccaacaacgagcaguucgacaagcucuacaucuggggcguccaccaccccggcaccgacaaggaccagaucuuccucuacgcccaguccuccggccgcaucaccgucuccaccaagcgcucccagcaggccgucauccccaacaucggcucccgcccccgcauccgcgacauccccucccgcaucuccaucuacuggaccaucgucaagcccggcgacauccuccucaucaacuccaccggcaaccucaucgccccccgcggcuacuucaagauccucuccggcaaguccuccaucaugcgcuccgacgcccccaucggcaagugcaaguccgagugcaucacccccaacggcuccauccccaacgacaagcccuuccagaacgucaaccgcaucaccuacggcgccugcccccgcuacgucaagcacuccacccucaagcucgccaccggcaugcgcaacguccccgagaagcagacccgcggcaucuucggcgccaucgccggcuucaucgagaacggcugggagggcauggucgacggcugguacggcuuccgccaccagaacuccgagggccgcggccaggccgccgaccucaaguccacccaggccgccaucgaccagaucaacggcaagcucaaccgccucaucggcaagaccaacgagaaguuccaccagaucgagaaggaguucuccgaggucgagggccgcauccaggaccucgagaaguacgucgaggacaccaagaucgaccucugguccuacaacgccgagcuccucgucgcccucgagaaccagcacaccaucgaccucaccgacuccgagaugaacaagcucuucgagaagaccaagaagcagcuccgcgagaacgccgaggacaugggcaacggcugcuucaagaucuaccacaagugcgacaacgccugcaucggcuccauccgcaacggcaccuacgaccacaacgucuaccgcgacgaggcccucaacaaccgcuuccagaucaagggcgucgagcucaaguccggcuacaaggacuggauccucuggaucuccuucgccaucuccugcuuccuccucugcgucgcccuccucggcuucaucaugugggccugccagaagggcaacauccgcugcaacaucugcaucuga

SEQ ID NO: 109595 - RNA, 1701 nt, Artificial Sequence
  derived and/or modified CDS sequence (opt2) from hemagglutinin__InfluenzaA__ALE32074
augaagaccaucaucgcccucuccuacauccucugccucgucuucgcccagaagauccccggcaacgacaacuccaccgccacccucugccucggccaccacgccguccccaacggcaccaucgucaagaccaucaccaacgaccgcaucgaggucaccaacgccaccgagcucguccagaacuccuccaucggcgagaucugcgacuccccccaccagauccucgacggcgagaacugcacccucaucgacgcccuccucggcgacccccagugcgacggcuuccagaacaagaagugggaccucuucgucgagcgcuccaaggccuacuccaacugcuaccccuacgacguccccgacuacgccucccuccgcucccucgucgccuccuccggcacccucgaguucaacaacgaguccuucaacuggaccggcgucacccagaacggcaccuccuccuccugcauccgccgcuccuccuccuccuucuucucccgccucaacuggcucacccaccucaacuacaccuaccccgcccucaacgucaccaugcccaacaacgagcaguucgacaagcucuacaucuggggcguccaccaccccggcaccgacaaggaccagaucuuccucuacgcccaguccuccggccgcaucaccgucuccaccaagcgcucccagcaggccgucauccccaacaucggcucccgcccccgcauccgcgacauccccucccgcaucuccaucuacuggaccaucgucaagcccggcgacauccuccucaucaacuccaccggcaaccucaucgccccccgcggcuacuucaagauccucuccggcaaguccuccaucaugcgcuccgacgcccccaucggcaagugcaaguccgagugcaucacccccaacggcuccauccccaacgacaagcccuuccagaacgucaaccgcaucaccuacggcgccugcccccgcuacgucaagcacuccacccucaagcucgccaccggcaugcgcaacguccccgagaagcagacccgcggcaucuucggcgccaucgccggcuucaucgagaacggcugggagggcauggucgacggcugguacggcuuccgccaccagaacuccgagggccgcggccaggccgccgaccucaaguccacccaggccgccaucgaccagaucaacggcaagcucaaccgccucaucggcaagaccaacgagaaguuccaccagaucgagaaggaguucuccgaggucgagggccgcauccaggaccucgagaaguacgucgaggacaccaagaucgaccucugguccuacaacgccgagcuccucgucgcccucgagaaccagcacaccaucgaccucaccgacuccgagaugaacaagcucuucgagaagaccaagaagcagcuccgcgagaacgccgaggacaugggcaacggcugcuucaagaucuaccacaagugcgacaacgccugcaucggcuccauccgcaacggcaccuacgaccacaacgucuaccgcgacgaggcccucaacaaccgcuuccagaucaagggcgucgagcucaaguccggcuacaaggacuggauccucuggaucuccuucgccaucuccugcuuccuccucugcgucgcccuccucggcuucaucaugugggccugccagaagggcaacauccgcugcaacaucugcaucuga

SEQ ID NO: 109596 - RNA, 1701 nt, Artificial Sequence
  derived and/or modified CDS sequence (opt2) from hemagglutinin__InfluenzaA__ALE32075
augaagaccaucaucgcccucuccuacauccucugccucgucuucgcccagaagcuccccgagaacgacaacuccaccgccacccucugccucggccaccacgccguccccaacggcaccaucgucaagaccaucaccuccgaccgcaucgaggucaccaacgccaccgagcucguccagaacuccuccaucggcgagaucugcgacuccccccaccagauccucgacggcaagaacugcacccucaucgacgcccuccucggcgacccccagugcgacggcuuccagaacaagaagugggaccucuucgucgagcgcuccaaggccuacuccaacugcuaccccuacgacguccccgacuacgccucccuccgcucccucgucgccuccuccggcacccucgaguucaacgacgaguccuucaacugggccggcgucacccagaacggcaccuccuccuccugcauccgcggcuccaacuccuccuucuucucccgccucaacuggcucacccacuccaacuucaaguaccccgcccucaacgucaccaugcccaacaacgagcaguucgacaagcucuacaucuggggcguccaccaccccggcaccgacaaggaccagaucuuccucuacgcccaguccuccggccgcaucaccgucuccaccaagcgcucccagcaggccgucauccccaacaucggcucccgcccccgcauccgcaacauccccucccgcaucuccaucuacuggaccaucgucaagcccggcgacauccuccucaucaacuccaccggcaaccucaucgccccccgcggcuacuucaagauccgcuccggcaaguccuccaucaugcgcuccgacgcccccaucggcaagugcaaguccgagugcaucacccccaacggcuccauccccaacgacaagcccuuccagaacgucaaccgcaucaccuacggcgccugcccccgcuacgucaagcaguccacccucaagcucgccaccggcaugcgcaacguccccgagaagcagacccgcggcaucuucggcgccaucgccggcuucaucgagaacggcugggagggcaugaaggacggcugguacggcuuccgccaccagaacuccgagggccgcggccaggccgccgaccucaaguccacccaggccgccaucgaccagaucaacggcaagcucaaccgccucaucggcaagaccaacgagaaguuccaccagaucgagaaggaguucuccgaggucgagggccgcauccaggaccucgagaaguacgucgaggacaccaagaucgaccucugguccuacaacgccgagcuccucgucgcccucgagaaccagcacaccaucgaccucaccgacuccgagaugaacaagcucuucgagaagaccaagaagcagcuccgcgagaacgccgaggacaugggcaacggcugcuucaagaucuaccacaagugcgacaacgccugcaucggcuccauccgcaacggcaccuacgaccacgacgucuaccgcgacgaggcccucaacaaccgcuuccagaucaagggcgucgagcucaaguccggcuacaaggacuggauccucuggaucuccuucgccaucuccugcuuccuccucugcgucgcccuccucggcuucaucaugugggccugccagaagggcaacauccgcugcaacaucugcaucuga

SEQ ID NO: 109597 - RNA, 1701 nt, Artificial Sequence; identical to SEQ ID NO: 109034
  derived and/or modified CDS sequence (opt2) from hemagglutinin__InfluenzaA__ALE32076

SEQ ID NO: 109598 - RNA, 1701 nt, Artificial Sequence
  derived and/or modified CDS sequence (opt2) from hemagglutinin__InfluenzaA__ALE32077
augaagaccaucaucgcccucuccuacauccucugccucgucuucgcccagaagauccccggcaacgacaacuccaccgccacccucugccucggccaccacgccguccccaacggcaccaucgucaagaccaucaccaacgaccgcaucgaggucaccaacgccaccgagcucguccagaacuccuccaucggcgagaucugcgacuccccccaccagauccucgacggcgagaacugcacccucaucgacgcccuccucggcgacccccagugcgacggcuuccagaacaagaagugggaccucuucgucgagcgcuccaaggcccacuccaacugcuaccccuacgacguccccgacuacgccucccuccgcucccucgucgccuccuccggcacccucgaguucaacaacgaguccuucaacuggaccggcgucacccagaacggcaccuccuccgccugcauccgccgcuccuccuccuccuucuucucccgccucaacuggcucacccaccucaacuacaccuaccccgcccucaacgucaccaugcccaacaacgagcaguucgacaagcucuacaucuggggcguccaccaccccggcaccgacaaggaccagaucuuccucuacgcccgcuccuccggccgcaucaccgucuccaccaagggcucccagcaggccgucauccccaacaucggcucccgcccccgcauccgcgacauccccucccgcaucuccaucuacuggaccaucgucaagcccggcgacauccuccucaucaacuccaccggcaaccucaucgccccccgcggcuacuucaagauccgcuccggcaaguccuccaucaugcgcuccgacgcccccaucggcaagugcaaguccgagugcaucacccccaacggcuccauccccaacgacaagcccuuccagaacgucaaccgcaucaccuacggcgccugcccccgcuacgucaagcacuccacccucaagcucgccaccggcaugcgcaacguccccgagaagcagacccgcggcaucuucggcgccaucgccggcuucaucgagaacggcugggagggcauggucgacggcugguacggcuuccgccaccagaacuccgagggccgcggccaggccgccgaccucaaguccacccaggccgccaucgaccagaucaacggcaagcucaaccgccucaucggcaagaccaacgagaaguuccaccagaucgagaaggaguucuccgaggucgagggccgcauccaggaccucgagaaguacgucgaggacaccaagaucgaccucugguccuacaacgccgagcuccucgucgcccucgagaaccagcacaccaucgaccucaccgacuccgagaugaacaagcucuucgagaagaccaagaagcagcuccgcgagaacgccgaggacaugggcaacggcugcuucaagaucuaccacaagugcgacaacgccugcaucggcuccauccgcaacggcaccuacgaccacaacgucuaccgcgacgaggcccucaacaaccgcuuccagaucaagggcgucgagcucaaguccggcuacaaggacuggauccucuggaucuccuucgccaucuccugcuuccuccucugcgucgcccuccucggcuucaucaugugggccugccagaagggcaacauccgcugcaacaucugcaucuga

SEQ ID NO: 109599 - RNA, 1701 nt, Artificial Sequence; identical to SEQ ID NO: 109135
  derived and/or modified CDS sequence (opt2) from hemagglutinin__InfluenzaA__ALE32078

SEQ ID NO: 109600 - RNA, 1701 nt, Artificial Sequence; identical to SEQ ID NO: 109021
  derived and/or modified CDS sequence (opt2) from hemagglutinin__InfluenzaA__ALE32079

SEQ ID NO: 109601 - RNA, 1701 nt, Artificial Sequence
  derived and/or modified CDS sequence (opt2) from hemagglutinin__InfluenzaA__ALE32080
augaagaccaucaucgcccucuccuacauccucugccucgucuucgcccagaagauccccggcaacgacaacuccaccgccacccucugccucggccaccacgccguccccaacggcaccaucgucaagaccaucaccaacgaccgcaucgaggucaccaacgccaccgagcucguccagaacuccuccaucggcgagaucugcgacuccccccaccagauccucgacggcgagaacugcacccucaucgacgcccuccucggcgacccccagugcgacggcuuccagaacaagaagugggaccucuucgucgagcgcuccaaggccuacuccaacugcuaccccuacgacguccccgacuacgccucccuccgcucccucgucgccuccuccggcacccucgaguucaacaacgaguccuucaacuggaccggcgucacccagaacggcaccuccuccuccugcauccgccgcuccuccuccuccuucuucucccgccucaacuggcucacccaccucaacuacaccuaccccgcccucaacgucaccaugcccaacaacgagcaguucgacaagcucuacaucuggggcguccaccaccccggcaccgacaaggaccagaucuuccucuacgcccaguccuccggccgcaucaccgucuccaccaagcgcucccagcaggccgucauccccaacaucggcucccgcccccgcauccgcgacauccccucccgcaucuccaucuacuggaccaucgucaagcccggcgacauccuccucaucaacuccaccggcaaccucaucgccccccgcggcuacuucaagauccgcuccggcaaguccuccaucaugcgcuccgacgcccccaucggcaagugcaaguccgagugcaucacccccaacggcuccauccccaacgacaagcccuuccagaacgucaaccgcaucaccuacggcgccugcccccgcuacgucaagcacuccacccucaagcucgccaccggcaugcgcaacguccccgagaagcagacccgcggcaucuucggcgccaucgccggcuucaucgagaacggcugggagggcauggucgacggcugguacggcuuccgccaccagaacuccgagggccgcggccaggccgccgaccucaaguccacccaggccgccaucgaccagaucaacggcaagcucaaccgccucaucggcaagaccaacgagaaguuccaccagaucgagaaggaguucuccgaggucgagggccgcauccaggaccucgagaaguacgucgaggacaccaagaucgaccucugguccuacaacgccgagcuccucgucgcccucgagaaccagcacaccaucgaccucaccgacuccgagaugaacaagcucuucgagaagaccaagaagcagcuccgcgagaacgccgaggacaugggcaacggcugcuucaagaucuaccacaagugcgacaacgccugcaucggcuccauccgcaacggcaccuacgaccacaacgucuaccgcgacgaggcccucaacaaccgcuuccagaucaagggcgucgagcucaaguccggcuacaaggacuggauccucuggaucuccuucgccaucuccugcuuccuccucugcgucgcccuccucggcuucaucaugugggccugccagaagggcaacauccgcugcaacaucugcaucuga

SEQ ID NO: 109602 - RNA, 1701 nt, Artificial Sequence; identical to SEQ ID NO: 109135
  derived and/or modified CDS sequence (opt2) from hemagglutinin__InfluenzaA__ALE32081

SEQ ID NO: 109603 - RNA, 1701 nt, Artificial Sequence; identical to SEQ ID NO: 109135
  derived and/or modified CDS sequence (opt2) from hemagglutinin__InfluenzaA__ALE32082

SEQ ID NO: 109604 - RNA, 1701 nt, Artificial Sequence
  derived and/or modified CDS sequence (opt2) from hemagglutinin__InfluenzaA__ALE32083
augaagaccaucaucgcccucuccuacauccucugccucgucuucgcccagaagauccccggcaacgacaacuccaccgccacccucugccucggccaccacgccguccccaacggcaccaucgucaagaccaucaccaacgaccgcaucgaggucaccaacgccaccgagcucguccagaacuccuccaucggcgagaucugcgacuccccccaccagauccucgacggcgagaacugcacccucaucgacgcccuccucggcgacccccagugcgacggcuuccagaacaagaagugggaccucuucgucgagcgcuccaaggccuacuccaacugcuaccccuacgacguccccgacuacgccucccuccgcucccucgucgccuccuccggcacccucgaguucaacaacgaguccuucaacuggaccggcgucacccagaacggcaccuccuccgccugcauccgccgcuccuccuccuccuucuucucccgccucaacuggcucacccaccucaacuacaaguaccccgcccucaacgucaccaugcccaacaacgagcaguucgacaagcucuacaucuggggcguccaccaccccggcaccgacaaggaccagaucuuccucuacgcccgcuccuccggccgcaucaccgucuccaccaagggcucccagcaggccgucauccccaacaucggcucccgcccccgcauccgcgacauccccucccgcaucuccaucuacuggaccaucgucaagcccggcgacauccuccucaucaacuccaccggcaaccucaucgccccccgcggcuacuucaagauccgcuccggcaaguccuccaucaugcgcuccgacgcccccaucggcaagugcaaguccgagugcaucacccccaacggcuccauccccaacgacaagcccuuccagaacgucaaccgcaucaccuacggcgccugcccccgcuacgucaagcacuccacccucaagcucgccaccggcaugcgcaacguccccgagaagcagacccgcggcaucuucggcgccaucgccggcuucaucgagaacggcugggagggcauggucgacggcugguacggcuuccgccaccagaacuccgagggccgcggccaggccgccgaccucaaguccacccaggccgccaucgaccagaucaacggcaagcucaaccgccucaucggcaagaccaacgagaaguuccaccagaucgagaaggaguucuccgaggucgagggccgcauccaggaccucgagaaguacgucgaggacaccaagaucgaccucugguccuacaacgccgagcuccucgucgcccucgagaaccagcacaccaucgaccucaccgacuccgagaugaacaagcucuucgagcgcaccaagaagcagcuccgcgagaacgccgaggacaugggcaacggcugcuucaagaucuaccacaagugcgacaacgccugcaucggcuccauccgcaacggcaccuacgaccacaacgucuaccgcgacgaggcccucaacaaccgcuuccagaucaagggcgucgagcucaaguccggcuacaaggacuggauccucuggaucuccuucgccaucuccugcuuccuccucugcgucgcccuccucggcuucaucaugugggccugccagaagggcaacauccgcugcaacaucugcaucuga

SEQ ID NO: 109605 - RNA, 1701 nt, Artificial Sequence; identical to SEQ ID NO: 109092
  derived and/or modified CDS sequence (opt2) from hemagglutinin__InfluenzaA__ALE32084

SEQ ID NO: 109606 - RNA, 1701 nt, Artificial Sequence; identical to SEQ ID NO: 109135
  derived and/or modified CDS sequence (opt2) from hemagglutinin__InfluenzaA__ALE32085

SEQ ID NO: 109607 - RNA, 1701 nt, Artificial Sequence
  derived and/or modified CDS sequence (opt2) from hemagglutinin__InfluenzaA__ALE32086
augaagaccaucaucgcccucuccuacauccucugccucgucuucgcccagaagauccccggcaacgacaacuccaccgccacccucugccucggccaccacgccguccccaacggcaccaucgucaagaccaucaccaacgaccgcaucgaggucaccaacgccaccgagcucguccagaacuccuccaucggcgagaucugcgacuccccccaccagauccucgacggcgagaacugcacccucaucgacgcccuccucggcgacccccagugcgacggcuuccagaacaagaagugggaccucuucgucgagcgcuccaaggccuacuccaacugcuaccccuacgacguccccgacuacgccucccuccgcucccucgucgccuccuccggcacccucgaguucaacaacgaguccuucaacuggaccggcgucacccagaacggcaccuccuccgccugcauccgcaaguccuccuccuccuucuucucccgccucaacuggcucacccaccucaacuacaccuaccccgcccucaacgucaccaugcccaacaacgagcaguucgacaagcucuacaucuggggcguccaccaccccggcaccgacaaggaccagaucuuccucuacgcccgcuccuccggccgcaucaccgucuccaccaagcgcucccagcaggccgucauccccaacaucggcucccgcccccgcauccgcgacauccccucccgcaucuccaucuacuggaccaucgucaagcccggcgacauccuccucaucaacuccaccggcaaccucaucgccccccgcggcuacuucaagauccgcuccggcaaguccuccaucaugcgcuccgacgcccccaucuccaagugcaaguccgagugcaucacccccaacggcuccauccccaacgacaagcccuuccagaacgucaaccgcaucaccuacggcgccugcccccgcuacgucaagcacuccacccucaagcucgccaccggcaugcgcaacguccccgagaagcagacccgcggcaucuucggcgccaucgccggcuucaucgagaacggcugggagggcauggucgacggcugguacggcuuccgccaccagaacuccgagggccgcggccaggccgccgaccucaaguccacccaggccgccaucgaccagaucaacggcaagcucaaccgccucaucggcaagaccaacgagaaguuccaccagaucgagaaggaguucuccgaggucgagggccgcauccaggaccucgagaaguacgucgaggacaccaagaucgaccucugguccuacaacgccgagcuccucgucgcccucgagaaccagcacaccaucgaccucaccgacuccgagaugaacaagcucuucgagaagaccaagaagcagcuccgcgagaacgccgaggacaugggcaacggcugcuucaagaucuaccacaagugcgacaacgccugcaucggcuccauccgcaacggcaccuacgaccacaacgucuaccgcgacgaggcccucaacaaccgcuuccagaucaagggcgucgagcucaaguccggcuacaaggacuggauccucuggaucuccuucgccaucuccugcuuccuccucugcgucgcccuccucggcuucaucaugugggccugccagaagggcaacauccgcugcaacaucugcaucuga

SEQ ID NO: 109608 - RNA, 1701 nt, Artificial Sequence
  derived and/or modified CDS sequence (opt2) from hemagglutinin__InfluenzaA__ALE32087
augaagaccaucaucgcccucuccuacauccucugccucgucuucgcccagaagauccccggcaacgacaacuccaccgccacccucugccucggccaccacgccguccccaacggcaccaucgucaagaccaucaccaacgaccgcaucgaggucaccaacgccaccgagcucguccagaacuccuccaucggcgagaucugcgacuccccccaccagauccucgacggcgagaacugcacccucaucgacgcccuccucggcgacccccagugcgacggcuuccagaacaagaagugggaccucuucgucgagcgcuccaaggccuacuccaacugcuaccccuacgacguccccgacuacgccucccuccgcucccucgucgccuccuccggcacccucgaguucaacaacgaguccuucaacuggaccggcgucacccagaacggcaccuccuccgccugcauccgcaaguccuccuccuccuucuucucccgccucaacuggcucacccaccucgacuacaccuaccccgcccucaacgucaccaugcccaacaacgagcaguucgacaagcucuacaucuggggcguccaccaccccggcaccgacaaggaccagaucuuccucuacgcccgcuccuccggccgcaucaccgucuccaccaagcgcucccagcaggccgucauccccaacaucggcucccgcccccgcauccgcgacauccccucccgcaucuccaucuacuggaccaucgucaagcccggcgacauccuccucaucaacuccaccggcaaccucaucgccccccgcggcuacuucaagauccgcuccggcaaguccuccaucaugcgcuccgacgcccccaucggcaagugcaaguccgagugcaucacccccaacggcuccauccccaacgacaagcccuuccagaacgucaaccgcaucaccuacggcgccugcccccgcuacgucaagcacuccacccucaagcucgccaccggcaugcgcaacguccccgagaagcagacccgcggcaucuucggcgccaucgccggcuucaucgagaacggcugggagggcauggucgacggcugguacggcuuccgccaccagaacuccgagggccgcggccaggccgccgaccucaaguccacccaggccgccaucgaccagaucaacggcaaccucaaccgccucaucggcaagaccaacgagaaguuccaccagaucgagaaggaguucuccgaggucgagggccgcauccaggaccucgagaaguacgucgaggacaccaagaucgaccucugguccuacaacgccgagcuccucgucgcccucgagaaccagcacaccaucgaccucaccgacuccgagaugaacaagcucuucgagaagaccaagaagcagcuccgcgagaacgccgaggacaugggcaacggcugcuucaagaucuaccacaagugcgacaacgccugcaucggcuccauccgcaacggcaccuacgaccacaacgucuaccgcgacgaggcccucaacaaccgcuuccagaucaagggcgucgagcucaaguccggcuacaaggacuggauccucuggaucuccuucgccaucuccugcuuccuccucugcgucgcccuccucggcuucaucaugugggccugccagaagggcaacauccgcugcaacaucugcaucuga

SEQ ID NO: 109609 - RNA, 1701 nt, Artificial Sequence
  derived and/or modified CDS sequence (opt2) from hemagglutinin__InfluenzaA__ALE32088
augaagaccaucaucgcccucuccuacauccucugccucgucuucgcccagaagauccccggcaacgacaacuccaccgccacccucugccucggccaccacgccguccccaacggcaccaucgucaagaccaucaccaacgaccgcaucgaggucaccaacgccaccgagcucguccagaacuccuccaucggcgagaucugcgacuccccccaccagauccucgacggcgagaacugcacccucaucgacgcccuccucggcgacccccagugcgacggcuuccagaacaagaagugggaccucuucgucgagcgcuccaaggccuacuccaacugcuaccccuacgacguccccgacuacgccucccuccgcucccucgucgccuccuccggcacccucgaguucaacaacgaguccuucaacuggaccggcgucacccagaacggcaccuccuccgccugcauccgcaaguccuccuccuccuucuucucccgccucaacuggcucacccaccucaacuacaccuaccccgcccucaacgucaccaugcccaacaacgagcaguucgacaagcucuacaucuggggcguccuccaccccggcaccgacaaggaccagaucuuccucuacgcccgcuccuccggccgcaucaccgucuccaccaagcgcucccagcaggccgucauccccaacaucggcucccgcccccgcauccgcgacauccccucccgcaucuccaucuacuggaccaucgucaagcccggcgacauccuccucaucaacuccaccggcaaccucaucgccccccgcggcuacuucaagauccgcuccggcaaguccuccaucaugcgcuccgacgcccccaucggcaagugcaaguccgagugcaucacccccaacggcuccauccccaacgacaagcccuuccagaacgucaaccgcaucaccuacggcgccugcccccgcuacgucaagcacuccacccucaagcucgccaccggcaugcgcaacguccccgagaagcagacccgcggcaucuucggcgccaucgccggcuucaucgagaacggcugggagggcauggucgacggcugguacggcuuccgccaccagaacuccgagggccgcggccaggccgccgaccucaaguccacccaggccgccaucgaccagaucaacggcaagcucaaccgccucaucggcaagaccaacgagaaguuccaccagaucgagaaggaguucuccgaggucgagggccgcauccaggaccucgagaaguacgucgaggacaccaagaucgaccucugguccuacaacgccgagcuccucgucgcccucgagaaccagcacaccgucgaccucaccgacuccgagaugaacaagcucuucgagaagaccaagaagcagcuccgcgagaacgccgaggacaugggcaacggcugcuucaagaucuaccacaagugcgacaacgccugcaucggcuccauccgcaacggcaccuacgaccacaacgucuaccgcgacgaggcccucaacaaccgcuuccagaucaagggcgucgagcucaaguccggcuacaaggacuggauccucuggaucuccuucgccaucuccugcuuccuccucugcgucgcccuccucggcuucaucaugugggccugccagaagggcaacauccgcugcaacaucugcaucuga

SEQ ID NO: 109610 - RNA, 1701 nt, Artificial Sequence; identical to SEQ ID NO: 108477
  derived and/or modified CDS sequence (opt2) from hemagglutinin__InfluenzaA__ALE32089

SEQ ID NO: 109611 - RNA, 1701 nt, Artificial Sequence; identical to SEQ ID NO: 108477
  derived and/or modified CDS sequence (opt2) from hemagglutinin__InfluenzaA__ALE32090

SEQ ID NO: 109612 - RNA, 1701 nt, Artificial Sequence; identical to SEQ ID NO: 108477
  derived and/or modified CDS sequence (opt2) from hemagglutinin__InfluenzaA__ALE32091

SEQ ID NO: 109613 - RNA, 1701 nt, Artificial Sequence
  derived and/or modified CDS sequence (opt2) from hemagglutinin__InfluenzaA__ALE32092
augaagaccaucaucgcccucuccuacauccucugccucgucuucgcccagaagauccccggcaacgacaacuccaccgccacccucugccucggccaccacgccguccccaacggcaccaucgucaagaccaucaccaacgaccgcaucgaggucaccaacgccaccgagcucguccagaacuccuccaucggcgagaucugcgacuccccccaccagauccucgacggcgagaacugcacccucaucgacgcccuccucggcgacccccagugcgacggcuuccagaacaagaagugggaccucuucgucgagcgcuccaaggccuacuccaacugcuaccccuacgacguccccgacuacgccucccuccgcucccucgucgccuccuccggcacccucgaguucaacaacgaguccuucaacuggaccggcgucacccagaacggcaccuccuccgccugcauccgccgcuccuccuccuccuucuucucccgccucaacuggcucacccaccucaacuacaccuaccccgcccucaacgucaccaugcccaacaacgagcaguucgacaagcucuacaucuggggcguccaccaccccggcaccgacaaggaccagaucuuccucuacgcccaguccuccggccgcaucaccgucuccaccaagcgcucccagcaggccgucauccccaacaucggcucccgcccccgcauccgcgacauccccucccgcaucuccaucuacuggaccaucgucaagcccggcgacauccuccucaucaacuccaccggcaaccucaucgccccccgcggcuacuucaagauccgcuccggcaaguccuccaucaugcgcuccgacgcccccaucggcaagugccgcuccgagugcaucacccccaacggcuccauccccaacgacaagcccuuccagaacgucaaccgcaucaccuacggcgccugcccccgcuacgucaagcacuccacccucaagcucgccaccggcaugcgcaacguccccgagaagcagacccgcggcaucuucggcgccaucgccggcuucaucgagaacggcugggagggcauggucgacggcugguacggcuuccgccaccagaacuccgagggccgcggccaggccgccgaccucaaguccacccaggccgccaucgaccagaucaacggcaagcucaaccgccucaucggcaagaccaacgagaaguuccaccagaucgagaaggaguucuccgaggucgagggccgcauccaggaccucgagaaguacgucgaggacaccaagaucgaccucugguccuacaacgccgagcuccucgucgcccucgagaaccagcacaccaucgaccucaccgacuccgagaugaacaagcucuucgagaagaccaagaagcagcuccgcgagaacgccgaggacaugggcaacggcugcuucaagaucuaccacaagugcgacaacgccugcaucggcuccauccgcaacggcaccuacgagcacaacgucuaccgcgacgaggcccucaacaaccgcuuccagaucaagggcgucgagcucaaguccggcuacaaggacuggauccucuggaucuccuucgccaucuccugcuuccuccucugcgucgcccuccucggcuucaucaugugggccugccagaagggcaacauccgcugcaacaucugcaucuga

SEQ ID NO: 109614 - RNA, 1701 nt, Artificial Sequence; identical to SEQ ID NO: 109083
  derived and/or modified CDS sequence (opt2) from hemagglutinin__InfluenzaA__ALE32093

SEQ ID NO: 109615 - RNA, 1701 nt, Artificial Sequence
  derived and/or modified CDS sequence (opt2) from hemagglutinin__InfluenzaA__ALE32094
augaagaccaucaucgcccucuccuacauccucugccucgucuucgcccagaagauccccggcaacgacaacuccaccgccacccucugccucggccaccacgccguccccaacggcaccaucgucaagaccaucaccaacgaccgcaucgaggucaccaacgccaccgagcucguccagaacuccuccaucggcgagaucugcgacuccccccaccagauccucgacggcgagaacugcacccucaucgacgcccuccucggcgacccccagugcgacggcuuccagaacaagaagugggaccucuucgucgagcgcuccaaggccuacuccaacugcuaccccuacgacguccccgacuacgccucccuccgcucccucgucgccuccuccggcacccucgaguucaacaacgaguccuucaacuggaccggcgucacccagaacggcaccuccuccgccugcauccgccgcuccuccuccuccuucuucucccgccucaacuggcucacccaccucaacuacaccuaccccgcccucaacgucaccaugcccaacaacgagcaguucgacaagcucuacaucuggggcguccaccaccccggcaccgacaaggaccagaucuuccucuacgcccaguccuccggccgcaucaccgucuccaccaagcgcucccagcaggccgucauccccaacaucggcucccgcccccgcauccgcgacauccccucccgcaucuccaucuacuggaccaucgucaagcccggcgacauccuccucaucaccuccaccggcaaccucaucgccccccgcggcuacuucaagauccgcuccggcaaguccuccaucaugcgcuccgacgcccccaucggcaagugcaaguccgagugcaucacccccaacggcuccauccccaacgacaagcccuuccagaacgucaaccgcaucaccuacggcgccugcccccgcuacgucaagcacuccacccucaagcucgccaccggcaugcgcaacguccccgagaagcagacccgcggcaucuucggcgccaucgccggcuucaucgagaacggcugggagggcauggucgacggcugguacggcuuccgccaccagaacuccgagggccgcggccaggccgccgaccucaaguccacccaggccgccaucgaccagaucaacggcaagcucaaccgccucaucggcaagaccaacgagaaguuccaccagaucgagaaggaguucuccgaggucgagggccgcauccaggaccucgagaaguacgucgaggacaccaagaucgaccucugguccuacaacgccgagcuccucgucgcccucgagaaccagcacaccaucgaccucaccgacuccgagaugaacaagcucuucgagaagaccaagaagcagcuccgcgagaacgccgaggacaugggcaacggcugcuucaagaucuaccacaagugcgacaacgccugcaucggcuccauccgcaacggcaccuacgaccacaacgucuaccgcgacgaggcccucaacaaccgcuuccagaucaagggcgucgagcucaaguccggcuacaaggacuggauccucuggaucuccuucgccaucuccugcuuccuccucugcgucgcccuccucggcuucaucaugugggccugccagaagggcaacauccgcugcaacaucugcaucuga

SEQ ID NO: 109616 - RNA, 1701 nt, Artificial Sequence; identical to SEQ ID NO: 108477
  derived and/or modified CDS sequence (opt2) from hemagglutinin__InfluenzaA__ALE32095

SEQ ID NO: 109617 - RNA, 1701 nt, Artificial Sequence
  derived and/or modified CDS sequence (opt2) from hemagglutinin__InfluenzaA__ALE32096
augaagaccaucaucgcccucuccuacauccucugccucgucuucgcccagaagauccccggcaacgacaacuccaccgccacccucugccucggccaccacgccguccccaacggcaccaucgucaagaccaucaccaacgaccgcaucgaggucaccaacgccaccgagcucguccagaacuccuccaucggcgagaucugcgacuccccccaccagauccucgacggcgagaacugcacccucaucgacgcccuccucggcgacccccagugcgacggcuuccagaacaagaagugggaccucuucgucgagcgcuccaaggccuacuccaacugcuaccccuacgacguccccgacuacgccucccuccgcucccucgucgccuccuccggcacccucgaguucaacaacgaguccuucaacuggaccggcgucacccagaacggcaccuccuccgccugcauccgccgcuccuccuccuccuucuucucccgccucaacuggcucacccaccucuccuacaccuaccccgcccucaacgucaccaugcccaacaacgagcaguucgacaagcucuacaucuggggcguccaccaccccggcaccgacaaggaccagaucuuccucuacgcccaguccuccggccgcaucaccgucuccaccaagcgcucccagcaggccgucauccccaacaucggcucccgcccccgcauccgcgacauccccucccgcaucuccaucuacuggaccaucgucaagcccggcgacauccuccucaucaacuccaccggcaaccucaucgccccccgcggcuacuucaagauccgcuccggcaaguccuccaucaugcgcuccgacgcccccaucggcaagugcaaguccgagugcaucacccccaacggcuccauccccaacgacaagcccuuccagaacgucaaccgcaucaccuacggcgccugcccccgcuacgucaagcacuccacccucaagcucgccaccggcaugcgcaacguccccgagaagcagacccgcggcaucuucggcgccaucgccggcuucaucgagaacggcugggagggcauggucgacggcugguacggcuuccgccaccagaacuccgagggccgcggccaggccgccgaccucaaguccacccaggccgccaucgaccagaucaacggcaagcucaaccgccucaucggcaagaccaacgagaaguuccaccagaucgagaaggaguucuccgaggucgagggccgcauccaggaccucgagaaguacgucgaggacaccaagaucgaccucugguccuacaacgccgagcuccucgucgcccucgagaaccagcacaccaucgaccucaccgacuccgagaugaacaagcucuucgagaagaccaagaagcagcuccgcgagaacgccgaggacaugggcaacggcugcuucaagaucuaccacaagugcgacaacgccugcaucggcuccauccgcaacggcaccuacgaccacaacgucuaccgcgacgaggcccucaacaaccgcuuccagaucaagggcgucgagcucaaguccggcuacaaggacuggauccucuggaucuccuucgccaucuccugcuuccuccucugcgucgcccuccucggcuucaucaugugggccugccagaagggcaacauccgcugcaacaucugcaucuga

SEQ ID NO: 109618 - RNA, 1701 nt, Artificial Sequence; identical to SEQ ID NO: 108477
  derived and/or modified CDS sequence (opt2) from hemagglutinin__InfluenzaA__ALE32097

SEQ ID NO: 109619 - RNA, 1701 nt, Artificial Sequence; identical to SEQ ID NO: 109083
  derived and/or modified CDS sequence (opt2) from hemagglutinin__InfluenzaA__ALE32099

SEQ ID NO: 109620 - RNA, 1701 nt, Artificial Sequence
  derived and/or modified CDS sequence (opt2) from hemagglutinin__InfluenzaA__ALE32100
augaagaccaucaucgcccucuccuacauccucugccucgucuucgcccagaagauccccggcaacgacaacuccaccgccacccucugccucggccaccacgccguccccaacggcaccaucgucaagaccaucaccaacgaccgcaucgaggucaccaacgccaccgagcucguccagaacuccuccaucggcgagaucugcgacuccccccaccagauccucgacggcgagaacugcacccucaucgacgcccuccucggcgacccccagugcgacggcuuccagaacaagaagugggaccucuucgucgagcgcuccaaggccuacuccaacugcuaccccuacgacguccccgacuacgccucccuccgcucccucgucgccuccuccggcacccucgaguucaacaacgaguccuucaacuggaccggcgucacccagaacggcaccuccuccgccugcauccgccgcuccuccuccuccuucuucucccgccucaacuggcucacccaccucaacuacaccuaccccgcccucaacgucaccaugcccaacaacgagcaguucgacaagcucuacaucuggggcguccaccaccccggcaccgacaaggaccagaucuuccucuacgcccaguccuccggccgcaucaccgucuccaccaagcgcucccagcaggccgucauccccaacaucggcucccgcccccgcauccgcgacauccccucccgcaucuccaucuacuggaccaucgucaagcccggcgacauccuccucaucaacuccaccggcaaccucaucgccccccgcggcuacuucaagauccgcuccggcaaguccuccaucaugcgcuccgacgcccccaucggcaagugcaaguccgagugcaucacccccaacggcuccauccccaacgacaagcccuuccagaacgucaaccgcaucaccuacggcgccugcccccgcuacgucaagcacuccacccucaagcucgccaccggcaugcgcaacguccccgagaagcagacccgcggcaucuucggcgccaucgccggcuucaucgagaacggcugggagggcauggucgacggcugguacggcuuccgccaccagaacuccgagggccgcggccaggccgccgaccucaaguccacccaggccgccaucgaccagaucaacggcaagcucaaccgccucaucggcaagaccaacgagaaguuccaccagaucgagaaggaguucuccgaggucgagggccgcauccaggaccucgagaaguacgucgaggacaccaagaucgaccucugguccuacaacgccgaccuccucgucgcccucgagaaccagcacaccaucgaccucaccgacuccgagaugaacaagcucuucgagaagaccaagaagcagcuccgcgagaacgccgaggacaugggcaacggcugcuucaagaucuaccacaagugcgacaacgccugcaucggcuccauccgcaacggcaccuacgaccacaacgucuaccgcgacgaggcccucaacaaccgcuuccagaucaagggcgucgagcucaaguccggcuacaaggacuggauccucuggaucuccuucgccaucuccugcuuccuccucugcgucgcccuccucggcuucaucaugugggccugccagaagggcaacauccgcugcaacaucugcaucuga

SEQ ID NO: 109621 - RNA, 1701 nt, Artificial Sequence
  derived and/or modified CDS sequence (opt2) from hemagglutinin__InfluenzaA__ALE32101
augaagaccaucaucgcccucuccuacauccucugccucgucuucgcccagaagauccccggcaacgacaacuccaccgccacccucugccucggccaccacgccguccccaacggcaccaucgucaagaccaucaccaacgaccgcaucgaggucaccaacgccaccgagcucguccagaacuccuccaucggcgagaucugcgacuccccccaccagauccucgacggcgagaacugcacccucaucgacgcccuccucggcgacccccagugcgacggcuuccagaacaagaagugggaccucuucgucgagcgcuccaaggccuacucccagugcuaccccuacgacguccccgacuacgccucccuccgcucccucgucgccuccuccggcacccucgaguucaacaacgaguccuucaacuggaccggcgucacccagaacggcaccuccuccgccugcauccgcaaguccuccggcuccuucuucucccgccucaacuggcucacccaccucaaguacaccuaccccgcccucaacgucaccaugcccaacaacgagcaguucgacaagcucuacaucuggggcguccaccaccccggcaccgacaaggaccagaucuuccucuacgcccgcuccuccggccgcaucaccgucuccaccaagcgcucccagcaggccgucauccccaacaucggcucccgcccccgcauccgcgacauccccucccgcaucuccaucuacuggaccaucgucaagcccggcgacauccuccucaucaacuccaccggcaaccucaucgccccccgcggcuacuucaagauccgcuccggcaaguccuccaucaugcgcuccgacgcccccaucggcaagugcaaguccgagugcaucacccccaacggcuccauccccaacgacaagcccuuccagaacgucaaccgcaucaccuacggcgccugcccccgcuacgucaagcacuccacccucaagcucgccaccggcaugcgcaacguccccgagaagcagacccgcggcaucuucggcgccaucgccggcuucaucgagaacggcugggagggcauggucgacggcugguacggcuuccgccaccagaacuccgagggccgcggccaggccgccgaccucaaguccacccaggccgccaucgaccagaucaacggcaagcucaaccgccucaucggcaagaccaacgagaaguuccaccagaucgagaaggaguucuccgaggucgagggccgcauccaggaccucgagaaguacgucgaggacaccaagaucgaccucugguccuacaacgccgagcuccucgucgcccucgagaaccagcacaccaucgaccucaccgacuccgagaugaacaagcucuucgagaagaccaagaagcagcuccgcgagaacgccgaggacaugggcaacggcugcuucaagaucuaccacaagugcgacaacgccugcaucggcuccauccgcaacggcaccuacgaccacaacgucuaccgcgacgaggcccucaacaaccgcuuccagaucaagggcgucgagcucaaguccggcuacaaggacuggauccucuggaucuccuucgccaucuccugcuuccuccucugcgucgcccuccucggcuucaucaugugggccugccagaagggcaacauccgcugcaacaucugcaucuga

SEQ ID NO: 109622 - RNA, 1701 nt, Artificial Sequence
  derived and/or modified CDS sequence (opt2) from hemagglutinin__InfluenzaA__ALE32102
augaagaccaucaucgcccucuccuacauccucugccucgucuucgcccagaagauccccggcaacgacaacuccaccgccacccucugccucggccaccacgccguccccaacggcaccaucgucaagaccaucaccaacgaccgcaucgaggucaccaacgccaccgagcucguccagaacuccuccaucggcgagaucugcgacuccccccaccagauccucgacggcgagaacugcacccucaucgacgcccuccucggcgacccccagugcgacggcuuccagaacaagaagugggaccucuucgucgagcgcuccaaggccuacuccaacugcuaccccuacgacguccccgacuacgccucccuccgcucccucgucgccuccuccggcacccucgaguucaacaacgaguccuucaacuggaccggcgucacccagaacggcaccuccuccgccugcauccgcaaguccuccuccuccuucuucucccgccucaacuggcucacccaccucaaguacaccuaccccgcccucaacgucaccaugcccaacaacgagcaguucgacaagcucuacaucuggggcguccaccaccccggcaccgacaaggaccagaucuuccucuacgcccgcuccuccggccgcaucaccgucuccaccaagcgcucccagcaggccgucauccccaacaucggcucccgcccccgcauccgcgacauccccucccgcaucuccaucuacuggaccaucgucaagcccggcgacauccuccucaucaacuccaccggcaaccucaucgccccccgcggcuacuucaagauccgcuccggcaaguccuccaucaugcgcuccgacgcccccaucggcaagugcaaguccgagugcaucacccccaacggcuccauccccaacgacaagcccuuccagaacgucaaccgcaucaccuacggcgccugcccccgcuacgucaagcacuccacccucaagcucgccaccggcaugcgcaacguccccgagaagcagacccgcggcaucuucggcgccaucgccggcuucaucgagaacggcugggagggcauggucgacggcugguacggcuuccgccaccagaacuccgagggccgcggccaggccgccgaccucaaguccacccaggccgccaucgaccagaucaacggcaagcucaaccgccucaucggcaagaccaacgagaaguuccaccagaucgagaaggaguucuccgaggucgagggccgcauccaggaccucgagaaguacgucgaggacaccaagaucgaccucugguccuacaacgccgagcuccucgucgcccucgagaaccagcacaccaucgaccucaccgacuccgagaugaacaagcucuucgagaagaccaagaagcagcuccgcgagaacgccgaggacaugggcaacggcugcuucaagaucuaccacaagugcgacaacgccugcaucggcuccauccgcaacggcaccuacgaccacaacgucuaccgcgacgaggcccucuccaaccgcuuccagaucaagggcgucgagcucaaguccggcuacaaggacuggauccucuggaucuccuucgccaucuccugcuuccuccucugcgucgcccuccucggcuucaucaugugggccugccagaagggcaacauccgcugcaacaucugcaucuga

SEQ ID NO: 109623 - RNA, 1701 nt, Artificial Sequence; identical to SEQ ID NO: 109190
  derived and/or modified CDS sequence (opt2) from hemagglutinin__InfluenzaA__ALE32103

SEQ ID NO: 109624 - RNA, 1701 nt, Artificial Sequence
  derived and/or modified CDS sequence (opt2) from hemagglutinin__InfluenzaA__ALE32104
augaagaccaucaucgcccucuccuacauccucugccucgucuucgcccagaagauccccggcaacgacaacuccaccgccacccucugccucggccaccacgccguccccaacggcaccaucgucaagaccaucaccaacgaccagaucgaggucaccaacgccaccgagcucguccagaacuccuccaucggcgagaucugcgacuccccccaccagauccucgacggcgagaacugcacccucaucgacgcccuccucggcgacccccagugcgacggcuuccagaacaagaagugggaccucuucgucgagcgcuccaaggccuacuccaacugcuaccccuacgacguccccgacuacgccucccuccgcucccucgucgccuccuccggcacccucgaguucaacaacgaguccuucaacuggaccggcgucacccagaacggcaccuccuccgccugcauccgccgcuccuccuccuccuucuucucccgccucaacuggcucacccaccucaacuacaccuaccccgcccucaacgucaccaugcccaacaacgagcaguucgacaagcucuacaucuggggcguccaccaccccggcaccgacaaggaccagaucuuccucuacgcccaguccuccggccgcaucaccgucuccaccaagcgcucccagcaggccgucauccccaacaucggcucccgcccccgcauccgcgacauccccucccgcaucuccaucuacuggaccaucgucaagcccggcgacauccuccucaucaacuccaccggcaaccucaucgccccccgcggcuacuucaagauccgcuccggcaaguccuccaucaugcgcuccgacgcccccaucggcaagugcaaguccgagugcaucacccccaacggcuccauccccaacgacaagcccuuccagaacgucaaccgcaucaccuacggcgccugcccccgcuacgucaagcacuccacccucaagcucgccaccggcaugcgcaacguccccgagaagcagacccgcggcaucuucggcgccaucgccggcuucaucgagaacggcugggagggcauggucgacggcugguacggcuuccgccaccagaacuccgagggccgcggccaggccgccgaccucaaguccacccaggccgccaucgaccagaucaacggcaagcucaaccgccucaucggcaagaccaacgagaaguuccaccagaucgagaaggaguucuccgaggucgagggccgcauccaggaccucgagaaguacgucgaggacaccaagaucgaccucugguccuacaacgccgagcuccucgucgcccucgagaaccagcacaccaucgaccucaccgacuccgagaugaacaagcucuucgagaagaccaagaagcagcuccgcgagaacgccgaggacaugggcaacggcugcuucaagaucuaccacaagugcgacaacgccugcaucggcuccauccgcaacggcaccuacgaccacaacgucuaccgcgacgaggcccucaacaaccgcuuccagaucaagggcgucgagcucaaguccggcuacaaggacuggauccucuggaucuccuucgccaucuccugcuuccuccucugcgucgcccuccucggcuucaucaugugggccugccagaagggcaacauccgcugcaacaucugcaucuga

SEQ ID NO: 109625 - RNA, 1701 nt, Artificial Sequence; identical to SEQ ID NO: 109135
  derived and/or modified CDS sequence (opt2) from hemagglutinin__InfluenzaA__ALE32105

SEQ ID NO: 109626 - RNA, 1701 nt, Artificial Sequence; identical to SEQ ID NO: 109135
  derived and/or modified CDS sequence (opt2) from hemagglutinin__InfluenzaA__ALE32106

SEQ ID NO: 109627 - RNA, 1701 nt, Artificial Sequence; identical to SEQ ID NO: 109190
  derived and/or modified CDS sequence (opt2) from hemagglutinin__InfluenzaA__ALE32107

SEQ ID NO: 109628 - RNA, 1701 nt, Artificial Sequence; identical to SEQ ID NO: 109420
  derived and/or modified CDS sequence (opt2) from hemagglutinin__InfluenzaA__ALE32108

SEQ ID NO: 109629 - RNA, 1701 nt, Artificial Sequence; identical to SEQ ID NO: 109034
  derived and/or modified CDS sequence (opt2) from hemagglutinin__InfluenzaA__ALE32109

SEQ ID NO: 109630 - RNA, 1701 nt, Artificial Sequence; identical to SEQ ID NO: 109021
  derived and/or modified CDS sequence (opt2) from hemagglutinin__InfluenzaA__ALE32110

SEQ ID NO: 109631 - RNA, 1701 nt, Artificial Sequence; identical to SEQ ID NO: 108477
  derived and/or modified CDS sequence (opt2) from hemagglutinin__InfluenzaA__ALE32111

SEQ ID NO: 109632 - RNA, 1701 nt, Artificial Sequence
  derived and/or modified CDS sequence (opt2) from hemagglutinin__InfluenzaA__ALE32112
augaagaccaucaucgcccucuccuacauccucugccucgucuucgcccagaagauccccggcaacgacaacuccaccgccacccucugccucggccaccacgccguccccaacggcaccaucgucaagaccaucaccaacgaccgcaucgaggucaccaacgccaccgagcucguccagaacuccuccaucggcgagaucugcgacuccccccaccagauccucgacggcgagaacugcacccucaucgacgcccuccucggcgacccccagugcgacggcuuccagaacaagaagugggaccucuucgucgagcgcuccaaggccuacuccaacugcuaccccuacgacguccccgacuacgccucccuccgcucccucgucgccuccuccggcacccucgaguucaacaacgaguccuucaacuggaccggcgucacccagaacggcaccuccuccgccugcauccgccgcuccuccuccuccuucuucucccgccucaacuggcucacccaccucaacuacgccuaccccgcccucaacgucaccaugcccaacaacgagcaguucgacaagcucuacaucuggggcguccaccaccccggcaccgacaaggaccagaucuuccucuacgcccaguccuccggccgcaucaccgucuccaccaagcgcucccagcaggccgucauccccaacaucggcucccgcccccgcauccgcgacauccccucccgcaucuccaucuacuggaccaucgucaagcccggcgacauccuccucaucaacuccaccggcaaccucaucgccccccgcggcuacuucaagauccgcuccggcaaguccuccaucaugcgcuccgacgcccccaucggcaagugcaaguccgagugcaucacccccaacggcuccauccccaacgacaagcccuuccagaacgucaaccgcaucaccuacggcgccugcccccgcuacgucaagcacuccacccucaagcucgccaccggcaugcgcaacguccccgagaagcagacccgcggcaucuucggcgccaucgccggcuucaucgagaacggcugggagggcauggucgacggcugguacggcuuccgccaccagaacuccgagggccgcggccaggccgccgaccucaaguccacccaggccgccaucgaccagaucaacggcaagcucaaccgccucaucggcaagaccaacgagaaguuccaccagaucgagaaggaguucuccgaggucgagggccgcauccaggaccucgagaaguacgucgaggacaccaagaucgaccucugguccuacaacgccgagcuccucgucgcccucgagaaccagcacaccaucgaccucaccgacuccgagaugaacaagcucuucgagaagaccaagaagcagcuccgcgagaacgccgaggacaugggcaacggcugcuucaagaucuaccacaagugcgacaacgccugcaucggcuccauccgcaacggcaccuacgaccacaacgucuaccgcgacgaggcccucaacaaccgcuuccagaucaagggcgucgagcucaaguccggcuacaaggacuggauccucuggaucuccuucgccaucuccugcuuccuccucugcgucgcccuccucggcuucaucaugugggccugccagaagggcaacauccgcugcaacaucugcaucuga

SEQ ID NO: 109633 - RNA, 1701 nt, Artificial Sequence
  derived and/or modified CDS sequence (opt2) from hemagglutinin__InfluenzaA__ALE32113
augaagaccaucaucgcccucuccuacauccucugccucgucuucgcccagaagauccccggcaacgacaacuccaccgccacccucugccucggccaccacgccguccccaacggcaccgucgucaagaccaucaccaacgaccgcaucgaggucaccaacgccaccgagcucguccagaacuccuccaucggcgagaucugcgacuccccccaccagauccucgacggcgagaacugcacccucaucgacgcccuccucggcgacccccagugcgacggcuuccagaacaagaagugggaccucuucgucgagcgcuccaaggccuacuccaacugcuaccccuacgacguccccgacuacgccucccuccgcucccucgucgccuccuccggcacccucgaguucaacaacgaguccuucaacuggaccggcgucacccagaacggcaccuccuccgccugcauccgcggcuccuccuccuccuucuucucccgccucaacuggcucacccaccucaacuacaccuaccccgcccucaacgucaccaugcccaacaacgagcaguucgacaagcucuacaucuggggcguccaccaccccggcaccgacaaggaccagaucuuccucuacgcccaguccuccggccgcaucaccgucuccaccaagcgcucccagcaggccgucauccccaacaucggcucccgcccccgcauccgcgacauccccucccgcaucuccaucuacuggaccaucgucaagcccggcgacauccuccucaucaacuccaccggcaaccucaucgccccccgcggcuacuucaagaugcgcuccggcaaguccuccaucaugcgcuccgacgcccccaucggcaagugcaaguccgagugcaucacccccaacggcuccauccccaacgacaagcccuuccagaacgucaaccgcaucaccuacggcgccugcccccgcuacgucaagcacuccacccucaagcucgccaccggcaugcgcaacguccccgagaagcagacccgcggcaucuucggcgccaucgccggcuucaucgagaacggcugggagggcauggucgacggcugguacggcuuccgccaccagaacuccgagggccgcggccaggccgccgaccucaaguccacccaggccgccaucgaccagaucaacggcaagcucaaccgccucaucggcaagaccaacgagaaguuccaccagaucgagaaggaguucuccgaggucgagggccgcauccaggaccucgagaaguacgucgaggacaccaagaucgaccucugguccuacaacgccgagcuccucgucgcccucgagaaccagcacaccaucgaccucaccgacuccgagaugaacaagcucuucgagaagaccaagaagcagcuccgcgagaacgccgaggacaugggcaacggcugcuucaagaucuaccacaagugcgacaacgccugcaucggcuccauccgcaacggcaccuacgaccacaacgucuaccgcgacgaggcccucaacaaccgcuuccagaucaagggcgucgagcucaaguccggcuacaaggacuggauccucuggaucuccuucgccaucuccugcuuccuccucugcgucgcccuccucggcuucaucaugugggccugccagaagggcaacauccgcugcaacaucugcaucuga

SEQ ID NO: 109634 - RNA, 1701 nt, Artificial Sequence; identical to SEQ ID NO: 109021
  derived and/or modified CDS sequence (opt2) from hemagglutinin__InfluenzaA__ALE32114

SEQ ID NO: 109635 - RNA, 1701 nt, Artificial Sequence; identical to SEQ ID NO: 109021
  derived and/or modified CDS sequence (opt2) from hemagglutinin__InfluenzaA__ALE32115

SEQ ID NO: 109636 - RNA, 1701 nt, Artificial Sequence
  derived and/or modified CDS sequence (opt2) from hemagglutinin__InfluenzaA__ALE32116
augaagaccaucaucgcccucuccuacauccucugccucgucuucgcccagaagauccccggcaacgacaacuccaccgccacccucugccucggccaccacgccguccccaacggcaccaucgucaagaccaucaccaacgaccgcaucgaggucaccaacgccaccgagcucguccagaacuccuccaucggcgagaucugcgacuccccccaccagauccucgacggcgagaacugcacccucaucgacgcccuccucggcgacccccagugcgacggcuuccagaacaagaagugggaccucuucgucgagcgcuccaaggccuacuccaacugcuaccccuacgacguccccgacuacgccucccuccgcucccucgucgccuccuccggcacccucgaguucaacaacgaguccuucaacuggaccggcgucacccagaacggcaccuccuccgccugcauccgccgcuccuccuccuccuucuucucccgccucaacuggcucacccaccucaacuacaccuaccccgcccucaacgucaccaugcccaacaacgagcaguucgacaagcucuacaucuggggcguccaccaccccggcaccgacaaggaccagaucuuccucuacgcccaguccuccggccgcaucaccgucuccaccaagcgcucccagcaggccgucauccccaacaucggcucccgcccccgcauccgcgacauccccucccgcaucuccaucuacuggaccaucgucaagcccggcgacauccuccucaucaacuccaccggcaaccucaucgccccccgcggcuacuucaagauccgcuccggcaaguccuccaucaugcgcuccgacgcccccaucggcaagugcaaguccgagugcaucacccccaacggcuccauccccaacgacaagcccuuccagaacgucaaccgcaucaccuacggcgccugcccccgcuacgucaagcacuccacccucaagcucgccaccggcaugcgcaacguccccgagaagcagacccgcggcaucuucggcgccaucgccggcuucaucgagaacggcugggagggcauggucgacggcugguacggcuuccgccaccagaacuccgagggccgcggccaggccgccgaccucaaguccacccaggccgccaucgaccagaucaacggcaagcucaaccgccucaucggcaagaccaacgagaaguuccaccagaucgagaaggaguucuccgaggucgagggccgcauccaggaccucgagaaguacgucgaggacaccaagaucgaccucugguccuacaacgccgagcuccucgucgcccucgagaaccagcacaccaucgaccucaccgacuccgagaugaacaagcucuucgagaagaccaagaagcagcuccgcgagaacgccgaggacaugggcaacggcugcuucaagaucuaccacaagugcgacaacgccugcaucggcuccauccgcaacggcaccuacgaccacaacgucuaccgcgacgaggcccucaacaaccgcuuccagaucaagggcgucgagcucaaguccggcuacaaggacuggauccucuggaucuccuucgccaucuccugcuuccuccucugcgucgcccuccucggcuucaucaugugggccugccagaagggcaacguccgcugcaacaucugcaucuga

SEQ ID NO: 109637 - RNA, 1701 nt, Artificial Sequence
  derived and/or modified CDS sequence (opt2) from hemagglutinin__InfluenzaA__ALE32117
augaagaccaucaucgcccucuccuacauccucugccucgucuucgcccagaagauccccggcaacgacaacuccaccgccacccucugccucggccaccacgccguccccaacggcaccaucgucaagaccaucaccaacgaccgcaucgaggucaccaacgccaccgagcucguccagaacuccuccaucggcgagaucugcgacuccccccaccagauccucgacggcgagaacugcacccucaucgacgcccuccucggcgacccccagugcgacggcuuccagaacaagaagugggaccucuucgucgagcgcuccaaggccuacuccaacugcuaccccuacgacguccccgacuacgccucccuccgcucccucgucgccuccuccggcacccucgaguucaacaacgaguccuucaacuggaccggcgucacccagaacggcaccuccuccgccugcauccgccgcuccuccuccuccuucuucucccgccucaacuggcucacccaccucaacuacaccuaccccgcccucaacgucaccaugcccaacaacgagcaguucgacaagcucuacaucuggggcguccaccaccccggcaccgacaaggaccagaucuuccucuacgcccaguccuccggccgcaucaccgucuccaccaagcgcucccagcaggccgucauccccaacaucggcucccgcccccgcauccgcgacauccccucccgcaucuccaucuacuggaccaucgucaagcccggcgacauccuccucaucaacuccaccggcaaccucaucgccccccgcggcuacuucaagauccgcuccggcaaguccuccaucaugcgcuccgacgcccccaucggcaagugcaaguccgagugcaucacccccaacggcuccauccccaacgacaagcccuuccagaacgucaaccgcaucaccuacggcgccugcccccgcuacgucaagcacuccacccucaagcucgccaccggcaugcgcaacguccccgagaagcagacccgcggcaucuucggcgccaucgccggcuucaucgagaacggcugggagggcauggucgacggcugguacggcuuccgccaccagaacuccgagggccgcggccaggccgccgacuucaaguccacccaggccgccaucgaccagaucaacggcaagcucaaccgccucaucggcaagaccaacgagaaguuccaccagaucgagaaggaguucuccgaggucgagggccgcauccaggaccucgagaaguacgucgaggacaccaagaucgaccucugguccuacaacgccgagcuccucgucgcccucgagaaccagcacaccaucgaccucaccgacuccgagaugaacaagcucuucgagaagaccaagaagcagcuccgcgagaacgccgaggacaugggcaacggcugcuucaagaucuaccacaagugcgacaacgccugcaucggcuccauccgcaacggcaccuacgaccacaacgucuaccgcgacgaggcccucaacaaccgcuuccagaucaagggcgucgagcucaaguccgaguacaaggacuggauccucuggaucuccuucgccaucuccugcuuccuccucugcgucgcccuccucggcuucaucaugugggccugccagaagggcaacauccgcugcaacaucugcaucuga

SEQ ID NO: 109638 - RNA, 1701 nt, Artificial Sequence; identical to SEQ ID NO: 109083
  derived and/or modified CDS sequence (opt2) from hemagglutinin__InfluenzaA__ALE32118

SEQ ID NO: 109639 - RNA, 1701 nt, Artificial Sequence; identical to SEQ ID NO: 98705
  derived and/or modified CDS sequence (opt2) from hemagglutinin__InfluenzaA__ALM06086

SEQ ID NO: 109640 - RNA, 1701 nt, Artificial Sequence; identical to SEQ ID NO: 106076
  derived and/or modified CDS sequence (opt2) from hemagglutinin__InfluenzaA__ALM06087

SEQ ID NO: 109641 - RNA, 1701 nt, Artificial Sequence
  derived and/or modified CDS sequence (opt2) from hemagglutinin__InfluenzaA__ALM06088
augaaggccauccucgucguccuccucuacaccuucgccaccgccaacgccgacacccucugcaucggcuaccacgccaacaacuccaccgacaccgucgacaccguccucgagaagaacgucaccgucacccacuccgucaaccuccucgaggacaagcacaacggcaagcucugcaagcuccgcggcgucgccccccuccaccucggcaagugcaacaucgccggcuggauccucggcaaccccgagugcgagucccucuccaccgccuccuccugguccuacaucgucgagaccuccuccuccgacaacggcaccugcuaccccggcgacuucaucaacuacgaggagcuccgcgagcagcucuccuccgucuccuccuucgagcgcuucgagaucuuccccaagaccuccuccuggcccaaccacgacuccaacaagggcgucaccgccgccugcccccacgccggcgccaaguccuucuacaagaaccucaucuggcucgucaagaagggcaacuccuaccccaagcucucccaguccuacaucaacgacaagggcaaggagguccucguccucuggggcauccaccaccccuccaccaccgccgaccagcagucccucuaccagaacgccgacgccuacgucuucgucggcaccucccgcuacuccaagaaguucaagcccgagaucgccauccgccccaagguccgcggccaggagggccgcaugaacuacuacuggacccucgucgagcccggcgacaagaucaccuucgaggccaccggcaaccucgucgucccccgcuacgccuucaccauggagcgcaacgccggcuccggcaucaucaucuccgacacccccguccacgacugcaacaccaccugccagacccccgagggcgccaucaacaccucccuccccuuccagaacauccaccccaucaccaucggcaagugccccaaguacgucaaguccaccaagcuccgccucgccaccggccuccgcaacguccccuccauccagucccgcggccucuucggcgccaucgccggcuucaucgagggcggcuggaccggcauggucgacggcugguacggcuaccaccaccagaacgagcagggcuccggcuacgccgccgaccucaaguccacccagaacgccaucgacaagaucaccaacaaggucaacuccgucaucgagaagaugaacacccaguucaccgccgucggcaaggaguucaaccaccucgagaagcgcaucgagaaccucaacaagaaggucgacgacggcuuccucgacaucuggaccuacaacgccgagcuccucguccuccucgagaacgagcgcacccucgacuaccacgacuccaacgucaagaaccucuacgagaagguccgcaaccagcucaagaacaacgccaaggagaucggcaacggcugcuucgaguucuaccacaagugcgacaacaccugcauggaguccgucaagaacggcaccuacgacuaccccaaguacuccgaggaggccaagcucaaccgcgagaagaucgacggcgucaagcucgaguccacccgcaucuaccagauccucgccaucuacuccaccgucgccuccucccucguccucgucgucucccucggcgccaucuccuucuggaugugcuccaacggcucccuccagugccgcaucugcaucuga

SEQ ID NO: 109642 - RNA, 1701 nt, Artificial Sequence; identical to SEQ ID NO: 106076
  derived and/or modified CDS sequence (opt2) from hemagglutinin__InfluenzaA__ALM06089

SEQ ID NO: 109643 - RNA, 1701 nt, Artificial Sequence
  derived and/or modified CDS sequence (opt2) from hemagglutinin__InfluenzaA__ALN39661
augaagaccaucaucgcccucuccuacauccucugccucgucuucgcccagaagauccccggcaacgacaacuccaccgccacccucugccucggccaccacgccguccccaacggcaccaucgucaagaccaucaccaacgaccgcaucgaggucaccaacgccaccgagcucguccagaacuccuccaucggcgagaucugcgacuccccccaccagauccucgacggcgagaacugcacccucaucgacgcccuccucggcgacccccagugcgacggcuuccagaacaagaagugggaccucuucgucgagcgcuccaaggccuacuccaacugcuaccccuacgacguccccgacuacgccucccuccgcucccucgucgccuccuccggcacccucgaguucaacaacgaguccuucaacuggaccggcgucacccagaacggcaccuccuccgccugcauccgccgcuccuccuccuccuucuucucccgccucaacuggcucacccaccucaacuacaccuaccccgcccucaacgucaccaugcccaacaacgagcaguucgacaagcucuacaucuggggcguccaccaccccggcaccgacaaggaccagaucuuccucuacgcccaguccuccggccgcaucaccgucuccaccaagcgcucccagcaggccgucauccccaacaucggcucccgcccccgcauccgcgacauccccucccgcaucuccaucuacuggaccaucgucaagcccggcgacauccuccucaucaacuccaccggcaaccucaucgccccccgcggcuacuucaagauccgcuccggcaaguccuccaucaugcgcuccgacgcccccaucggcaagugcaaguccgagugcaucacccccaacggcuccauccccaacgacaagcccuuccagaacgucaaccgcaucaccuacggcgccugcccccgcuacgucaagcacuccacccucaagcucgccaccggcaugcgcaacguccccgagaagcagacccgcggcaucuucggcgccaucgccggcuucaucgagaacggcugggagggcauggucgacggcugguacggcuuccgccaccagaacuccgagggccgcggccaggccgccgaccucaaguccacccaggccgccaucgaccagaucaacggcaagcucaaccgccucaucggcaagaccaacgagaaguuccaccagaucgagaaggaguucuccgaggucgagggccgcauccaggaccucgagaaguacgucgaggacaccaagaucgaccucugguccuacaacgccgagcuccucgucgcccucgagaaccagcacaccaucgaccucaccgacuccgagaugaacaagcucuucgagaagaccaagaagcagcuccgcgagaacgccgaggacaugggcaacggcugcuucaagaucuaccacaagugcgacaacgccugcaucggcuccauccgcaacggcaccuacgaccacaacgucuaccgcgacgaggcccucaacaaccgcuuccagaucaagggcgucgagcucaaguccggcuacaaggacuggauccucuggaucuccuucgccaucuccugcuuccuccucugcaucgcccuccucggcuucaucaugugggccugccagaagggcaacauccgcugcaacaucugcaucuga

SEQ ID NO: 109644 - RNA, 1701 nt, Artificial Sequence; identical to SEQ ID NO: 109010
  derived and/or modified CDS sequence (opt2) from hemagglutinin__InfluenzaA__ALN39662

SEQ ID NO: 109645 - RNA, 1701 nt, Artificial Sequence; identical to SEQ ID NO: 108477
  derived and/or modified CDS sequence (opt2) from hemagglutinin__InfluenzaA__ALN39663

SEQ ID NO: 109646 - RNA, 1701 nt, Artificial Sequence
  derived and/or modified CDS sequence (opt2) from hemagglutinin__InfluenzaA__ALN39664
augaagaccaucaucgcccucuccuacauccucugccucgucuucgcccagaagcuccccggcaacgacaacuccaccgccacccucugccucggccaccacgccguccccaacggcaccaucgucaagaccaucaccaacgaccgcaucgaggucaccaacgccaccgagcucguccagaacuccuccaucggcgagaucugcgacuccccccaccagauccucgacggcgagaacugcacccucaucgacgcccuccucggcgacccccagugcgacggcuuccagaacaagaagugggaccucuucgucgagcgcuccaaggccuacuccaacugcuaccccuacgacguccccgacuacgccucccuccgcucccucgucgccuccuccggcacccucgaguucaacaacgaguccuucaacugggccggcgucacccagaacggcaccuccuccuccugcauccgcggcuccaacuccuccuucuucucccgccucaacuggcucacccaccucaacuccaaguaccccgcccucaacgucaccaugcccaacaacgagcaguucgacaagcucuacaucuggggcguccaccaccccggcaccgacaaggaccagaucuuccucuacgcccagcccuccggccgcgucaccgucuccaccaagcgcucccagcaggccgucauccccaacaucggcucccgcccccgcauccgcgacauccccucccgcaucuccaucuacuggaccaucgucaagcccggcgacauccuccucaucaacuccaccggcaaccucaucgccccccgcggcuacuucaagauccgcuccggcaaguccuccaucaugcgcuccgacgcccccaucggcaagugcaaguccgagugcaucacccccaacggcuccauccccaacgacaagcccuuccagaacgucaaccgcaucaccuacggcgccugcccccgcuacgucaagcaguccacccucaagcucgccaccggcaugcgcaacguccccgagcgccagacccgcggcaucuucggcgccaucgccggcuucaucgagaacggcugggagggcauggucgacggcugguacggcuuccgccaccagaacuccgagggccgcggccaggccgccgaccucaaguccacccaggccgccaucgaccagaucaacggcaagcucaaccgccucaucggcaagaccaacgagaaguuccaccagaucgagaaggaguucuccgaggucgagggccgcauccaggaccucgagaaguacgucgaggacaccaagaucgaccucugguccuacaacgccgagcuccucgucgcccucgagaaccagcacaccaucgaccucaccgacuccgagaugaacaagcucuucgagaagaccaagaagcagcuccgcgagaacgccgaggacaugggcaacggcugcuucaagaucuaccacaagugcgacaacgccugcaucggcuccauccgcaacggcaccuacgaccacgacgucuaccgcgacgaggcccucaacaaccgcuuccagaucaagggcgucgagcucaaguccggcuacaaggacuggauccucuggaucuccuucgccaucuccugcuuccuccucugcgucgcccuccucggcuucaucaugugggccugccagaagggcaacauccgcugcaacaucugcaucuga

SEQ ID NO: 109647 - RNA, 1701 nt, Artificial Sequence; identical to SEQ ID NO: 108477
  derived and/or modified CDS sequence (opt2) from hemagglutinin__InfluenzaA__ALN39665

SEQ ID NO: 109648 - RNA, 1701 nt, Artificial Sequence; identical to SEQ ID NO: 109083
  derived and/or modified CDS sequence (opt2) from hemagglutinin__InfluenzaA__ALN39666

SEQ ID NO: 109649 - RNA, 1701 nt, Artificial Sequence
  derived and/or modified CDS sequence (opt2) from hemagglutinin__InfluenzaA__ALN39667
augaagaccaucaucgcccucuccuacauccucugccucgucuucgcccagaagcuccccggcaacgacaacuccaccgccacccucugccucggccaccacgccguccccaacggcaccaucgucaagaccaucaccaacgaccgcaucgaggucaccaacgccaccgagcucguccagaacuccuccaucggcgagaucugcaacuccccccaccagauccucgacggcgagaacugcacccucaucgacgcccuccucggcgacccccagugcgacggcuuccagaacaagaagugggaccucuucgucgagcgcuccaaggccuacuccaacugcuaccccuacgacguccccgacuacgccucccuccgcucccucgucgccuccuccggcacccucgaguucaacaacgaguccuucaacugggccggcgucacccagaacggcaccuccuccgccugcauccgcggcuccaacuccuccuucuucucccgccucaacuggcucacccacuccaacuucaaguaccccgcccucaacgucaccaugcccaacaacgagcaguucgacaagcucuacaucuggggcguccaccaccccggcaccgacaaggaccagaucuuccucuacgcccaguccuccggccgcaucaccgucuccaccaagcgcucccagcaggccgucacccccaacaucggcucccgcccccgcauccgcaacauccccucccgcaucuccaucuacuggaccaucgucaagcccggcgacauccuccucaucaacuccaccggcaaccucaucgccccccgcggcuacuucaagauccgcuccggcaaguccuccaucaugcgcuccgacgcccccaucggcaagugcaaguccgagugcaucacccccaacggcuccauccccaacgacaagcccuuccagaacgucaaccgcaucaccuacggcgccugcccccgcuacgucaagcaguccacccucaagcucgccaccggcaugcgcaacguccccgagaagcagacccgcggcaucuucggcgccaucgccggcuucaucgagaacggcugggagggcaugaaggacggcugguacggcuuccgccaccagaacuccgagggccgcggccaggccgccgaccucaaguccacccaggccgccaucgaccagaucaacggcaagcucaaccgccucaucggcaagaccaacgagaaguuccaccagaucgagaaggaguucuccgaggucgagggccgcauccaggaccucgagaaguacgucgaggacaccaagaucgaccucugguccuacaacgccgagcuccucgucgcccucgagaaccagcacaccaucgaccucaccgacuccgagaugaacaagcucuucgagaagaccaagaagcagcuccgcgagaacgccgaggacaugggcaacggcugcuucaagaucuaccacaagugcgacaacgccugcaucggcuccauccgcaacggcaccuacgaccacgacgucuaccgcaacgaggcccucaacaaccgcuuccagaucaagggcgucgagcucaaguccggcuacaaggacuggauccucuggaucuccuucgccaucuccugcuuccuccucugcgucgcccuccucggcuucaucaugugggccugccagaagggcaacauccgcugcaacaucugcaucuga

SEQ ID NO: 109650 - RNA, 1701 nt, Artificial Sequence; identical to SEQ ID NO: 109552
  derived and/or modified CDS sequence (opt2) from hemagglutinin__InfluenzaA__ALN39668

SEQ ID NO: 109651 - RNA, 1701 nt, Artificial Sequence
  derived and/or modified CDS sequence (opt2) from hemagglutinin__InfluenzaA__ALN39669
augaagaccaucaucgcccucuccuacauccucugccucgucuucgcccagaagauccccggcaacgacaacuccaccgccacccucugccucggccaccacgccguccccaacggcaccaucgucaagaccaucaccaacgaccgcaucgaggucaccaacgccaccgagcucguccagaacuccuccaucggcgagaucugcgacuccccccaccagauccucgacggcgagaacugcacccucaucgacgcccuccucggcgacccccagugcgacggcuuccagaacaagaagugggaccucuucgucgagcgcuccaaggccuacuccaacugcuaccccuacgacguccccgacuacgccucccuccgcucccucgucgccuccuccggcacccucgaguucaacaacgaguccuucaacuggaccggcgucacccagaacggcaccuccuccgccugcauccgccgcuccuccuccuccuucuucucccgccucaacuggcucacccaccucaacuacaccuaccccgcccucaacgucaccaugcccaacaacgagcaguucgacaagcucuacaucuggggcguccaccaccccggcaccgacaaggaccagaucuuccucuacgcccagcucuccggccgcaucaccgucuccaccaagcgcucccagcaggccgucauccccaacaucggcucccgcccccgcauccgcgacauccccucccgcaucuccaucuacuggaccaucgucaagcccggcgacauccuccucaucaacuccaccggcaaccucaucgccccccgcggcuacuucaagauccgcuccggcaaguccuccaucaugcgcuccgacgcccccaucggcaagugcaaguccgagugcaucacccccaacggcuccauccccaacgacaagcccuuccagaacgucaaccgcaucaccuacggcgccugcccccgcuacgucaagcacuccacccucaagcucgccaccggcaugcgcaacguccccgagaagcagacccgcggcaucuucggcgccaucgccggcuucaucgagaacggcugggagggcauggucgacggcugguacggcuuccgccaccagaacuccgagggccgcggccaggccgccgaccucaaguccacccaggccgccaucgaccagaucaacggcaagcucaaccgccucaucggcaagaccaacgagaaguuccaccagaucgagaaggaguucuccgaggucgagggccgcauccaggaccucgagaaguacgucgaggacaccaagaucgaccucugguccuacaacgccgagcuccucgucgcccucgagaaccagcacaccaucgaccucaccgacuccgagaugaacaagcucuucgagaagaccaagaagcagcuccgcgagaacgccgaggacaugggcaacggcugcuucaagaucuaccacaagugcgacaacgccugcaucggcuccauccgcaacggcaccuacgaccacaacgucuaccgcgacgaggcccucaacaaccgcuuccagaucaagggcgucgagcucaaguccggcuacaaggacuggauccucuggaucuccuucgccaucuccugcuuccuccucugcgucgcccuccucggcuucaucaugugggccugccagaagggcaacauccgcugcaacaucugcaucuga

SEQ ID NO: 109652 - RNA, 1701 nt, Artificial Sequence; identical to SEQ ID NO: 108477
  derived and/or modified CDS sequence (opt2) from hemagglutinin__InfluenzaA__ALN39670

SEQ ID NO: 109653 - RNA, 1701 nt, Artificial Sequence
  derived and/or modified CDS sequence (opt2) from hemagglutinin__InfluenzaA__ALN39671
augaagaccaucaucgcccucuccuacauccucugccucgucuucgcccagaagauccccggcaacgacaacuccaccgccacccucugccucggccaccacgccguccccaacggcaccaucgucaagaccaucaccaacgaccgcaucgaggucaccaacgccaccgagcucguccagaacuccuccaucggcgagaucugcgacuccccccaccagauccucgacggcgagaacugcacccucaucgacgcccuccucggcgacccccagugcgacggcuuccagaacaagaagugggaccucuucgucgagcgcuccaaggccuacuccaacugcuaccccuacgacguccccgacuacgccucccuccgcucccucgucgccuccuccggcacccucgaguucaacaacgaguccuucaacuggaccggcgucacccagaacggcaccuccuccgccugcauccgccgcuccuccuccuccuucuucucccgccucaacuggcucacccaccucaacuacaccuaccccgcccucaacgucaccaugcccaacaacgagcaguucgacaagcucuacaucuggggcguccaccaccccggcaccgacaaggaccagaucuuccucuacgcccaguccuccggccgcaucaccgucuccaccaagcgcucccagcaggccgucauccccaacaucggcucccgcccccgcauccgcgacauccccucccgcaucuccaucuacuggaccaucgucaagcccggcgacauccuccucaucaacuccaccggcaaccucaucgccccccgcggcuacuucaagauccgcuccggcaaguccuccaucaugcgcuccgacgcccccaucggcaagugcaaguccgagugcaucacccccaacggcuccauccccaacgacaagcccuuccagaacgucaaccgcaucaccuacggcgccugcccccgcuacgucaagcacuccacccucaagcucgccaccggcaugcgcaacguccccgagaagcagacccgcggcaucuucggcgccaucgccggcuucaucgagaacggcugggagggcauggucgacggcugguacggcuuccgccaccagaacuccgagggccgcggccaggccgccgaccucaaguccacccaggccgccaucgaccagaucaacggcaagcucaaccgccucaucggcaagaccaacgagaaguuccaccagaucgagaaggaguucuccgaggucgagggccgcauccaggaccucgagaaguacgucgaggacaccaagaucgaccucugguccuacaacgccgagcuccucgucgcccucgagaaccagcacaccaucgaccucaccgacuccgagaugaacaagcucuucgagaagacccgcaagcagcuccgcgagaacgccgaggacaugggcaacggcugcuucaagaucuaccacaagugcgacaacgccugcaucggcuccauccgcaacggcaccuacgaccacaacgucuaccgcgacgaggcccucaacaaccgcuuccagaucaagggcgucgagcucaaguccggcuacaaggacuggauccucuggaucuccuucgccaucuccugcuuccuccucugcgucgcccuccucggcuucaucaugugggccugccagaagggcaacauccgcugcaacaucugcaucuga

SEQ ID NO: 109654 - RNA, 1701 nt, Artificial Sequence; identical to SEQ ID NO: 108477
  derived and/or modified CDS sequence (opt2) from hemagglutinin__InfluenzaA__ALN39672

SEQ ID NO: 109655 - RNA, 1701 nt, Artificial Sequence
  derived and/or modified CDS sequence (opt2) from hemagglutinin__InfluenzaA__ALN39673
augaagaccaucaucgcccucuccuacauccucugccucgucuucgcccagaagauccccggcaacgacaacuccaccgccacccucugccucggccaccacgccguccccaacggcaccaucgucaagaccaucaccaacgaccgcaucgaggucaccaacgccaccgagcucguccagaacuccuccaucggcgagaucugcgacuccccccaccagauccucgacggcgagaacugcacccucaucgacgcccuccucggcgacccccagugcgacggcuuccagaacaagaagugggaccucuucgucgagcgcuccaaggccuacuccaacugcuaccccuacgacguccccgacuacgccucccuccgcucccucgucgccuccuccggcacccucgaguucaacaacgaguccuucaacuggaccggcgucacccagaacggcaccuccuccgccugcauccgccgcuccuccuccuccuucuucucccgccucaacuggcucacccaccucaacuacaccuaccccgcccucaacgucaccaugcccaacaacgagcaguucgacaagcucuacaucuggggcguccaccaccccggcaccgacaaggaccagaucuuccucuacgcccaguccuccggccgcaucaccgucuccaccaagcgcucccagcaggccgucauccccgacaucggcucccgcccccgcauccgcgacauccccucccgcaucuccaucuacuggaccaucgucaagcccggcgacauccuccucaucaacuccaccggcaaccucaucgccccccgcggcuacuucaagauccgcuccggcaaguccuccaucaugcgcuccgacgcccccaucggcaagugcaaguccgagugcaucacccccaacggcuccauccccaacgacaagcccuuccagaacgucaaccgcaucaccuacggcgccugcccccgcuacgucaagcacuccacccucaagcucgccaccggcaugcgcaacguccccgagaagcagacccgcggcaucuucggcgccaucgccggcuucaucgagaacggcugggagggcauggucgacggcugguacggcuuccgccaccagaacuccgagggccgcggccaggccgccgaccucaaguccacccaggccgccaucgaccagaucaacggcaagcucaaccgccucaucggcaagaccaacgagaaguuccaccagaucgagaaggaguucuccgaggucgagggccgcauccaggaccucgagaaguacgucgaggacaccaagaucgaccucugguccuacaacgccgagcuccucgucgcccucgagaaccagcacaccaucgaccucaccgacuccgagaugaacaagcucuucgagaagaccaagaagcagcuccgcgagaacgccgaggacaugggcaacggcugcuucaagaucuaccacaagugcgacaacgccugcaucggcuccauccgcaacggcaccuacgaccacaacgucuaccgcgacgaggcccucaacaaccgcuuccagaucaagggcgucgagcucaaguccggcuacaaggacuggauccucuggaucuccuucgccaucuccugcuuccuccucugcgucgcccuccucggcuucaucaugugggccugccagaagggcaacauccgcugcaacaucugcaucuga

SEQ ID NO: 109656 - RNA, 1701 nt, Artificial Sequence; identical to SEQ ID NO: 109017
  derived and/or modified CDS sequence (opt2) from hemagglutinin__InfluenzaA__ALN39674

SEQ ID NO: 109657 - RNA, 1701 nt, Artificial Sequence; identical to SEQ ID NO: 108477
  derived and/or modified CDS sequence (opt2) from hemagglutinin__InfluenzaA__ALN39675

SEQ ID NO: 109658 - RNA, 1701 nt, Artificial Sequence
  derived and/or modified CDS sequence (opt2) from hemagglutinin__InfluenzaA__ALN39676
augaagaccaucaucgcccucuccugcauccucugccucgucuucgcccagaagcuccccggcaacgacaacuccaccgccacccucugccucggccaccacgccguccccaacggcaccaucgucaagaccaucaccaacgaccgcaucgaggucaccaacgccaccgagcucguccagaacuccuccaucggcgagaucugcgacuccccccaccagauccucgacggcgagaacugcacccucaucgacgcccuccucggcgacccccagugcgacggcuuccagaacaagaagugggaccucuucgucgagcgcuccaaggccuacuccaacugcuaccccuacgacguccccgacuacgccucccuccgcucccucgucgccuccuccggcacccucgaguucaacaacgagaacuucaacugggccggcgucacccagaacggcaccuccuccuccugcauccgcggcuccaacuccuccuucuucucccgccucaacuggcucacccaccucaacuccaaguaccccgcccucaacgucaccaugcccaacaacgagcaguucgacaagcucuacaucuggggcguccaccaccccggcaccgacaaggaccagaucuuccucuacgcccaguccuccggccgcaucaccgucuccaccaagcgcucccagcaggccgucauccccaacaucggcucccgcccccgcauccgcgacauccccucccgcaucuccaucuacuggaccaucgucaagcccggcgacauccuccucaucaacuccaccggcaaccucaucgccccccgcggcuacuuccgcauccgcuccggcaaguccuccaucaugcgcuccgacgcccccaucggcaagugcaaguccgagugcaucacccccaacggcuccauccccaacgacaagcccuuccagaacgucaaccgcaucaccuacggcgccugcccccgcuacgucaagcagaacacccucaagcucgccaccggcaugcgcaacguccccgagcgccagacccgcggcaucuucggcgccaucgccggcuucaucgagaacggcugggagggcauggucgacggcugguacggcuuccgccaccagaacuccgagggccgcggccaggccgccgaccucaaguccacccaguccgccaucgaccagaucaacggcaagcucaaccgccucaucggcaagaccaacgagaaguuccaccagaucgagaaggaguucuccgaggucgagggccgcauccaggaccucgagaaguacgucgaggacaccaagaucgaccucugguccuacaacgccgagcuccucgucgcccucgagaaccagcacaccaucgaccucaccgacuccgagaugaacaagcucuucgagaagaccaagaagcagcuccgcgagaacgccgaggacaugggcaacggcugcuucaagaucuaccacaagugcgacaacgccugcaucggcuccauccgcaacggcaccuacgaccacgacgucuaccgcgacgaggcccucaacaaccgcuuccagaucaagggcgucgagcucaaguccggcuacaaggacuggauccucuggaucuccuucgccaucuccugcuuccuccucugcgucgcccuccucggcuucaucaugugggccugccagaagggcaacauccgcugcaacaucugcaucuga

SEQ ID NO: 109659 - RNA, 1701 nt, Artificial Sequence
  derived and/or modified CDS sequence (opt2) from hemagglutinin__InfluenzaA__ALN39677
augaagaccaucaucgcccucggcuacauccucugccucgucuucgcccagaagauccccggcaacgacaacuccaccgccacccucugccucggccaccacgccguccccaacggcaccaucgucaagaccaucaccaacgaccgcaucgaggucaccaacgccaccgagcucguccagaacuccuccaucggcgagaucugcgacuccccccacaagauccucgacggcgagaacugcacccucaucgacgcccuccucggcgacccccagugcgacggcuuccagaacaagaagugggaccucuucgucgagcgcuccaaggccuacuccaacugcuaccccuacgacguccccgacuacgccucccuccgcucccucgucgccuccuccggcacccucgaguucaacaacgaguccuucaacuggaccggcgucacccagaacggcaccuccuccgccugcauccgccgcuccuccuccuccuucuucucccgccucaacuggcucacccaccucaacuacgccuaccccgcccucaacgucaccaugcccaacaacgagcaguucgacaagcucuacaucuggggcguccaccaccccggcaccgacaaggaccagaucuuccucuacgcccaguccuccggccgcaucaccgucuccaccaagcgcucccagcaggccgucauccccaacaucggcucccgcccccgcauccgcgacauccccucccgcaucuccaucuacuggaccaucgucaagcccggcgacauccuccucaucaacuccaccggcaaccucaucgccccccgcggcuacuucaagauccgcuccggcaaguccuccaucaugcgcuccgacgcccccaucggcaagugcaaguccgagugcaucacccccaacggcuccauccccaacgacaagcccuuccagaacgucaaccgcaucaccuacggcgccugcccccgcuacgucaagcacuccacccucaagcucgccaccggcaugcgcaacguccccgagaagcagacccgcggcaucuucggcgccaucgccggcuucaucgagaacggcugggagggcauggucgacggcugguacggcuuccgccaccagaacuccgagggccgcggccaggccgccgaccucaaguccacccaggccgccaucgaccagaucaacggcaagcucaaccgccucaucggcaagaccaacgagaaguuccaccagaucgagaaggaguucuccgaggucgagggccgcauccaggaccucgagaaguacgucgaggacaccaagaucgaccucugguccuacaacgccgagcuccucgucgcccucgagaaccagcacaccaucgaccucaccgacuccgagaugaacaagcucuucgagaagaccaagaagcagcuccgcgagaacgccgaggacaugggcaacggcugcuucaagaucuaccacaagugcgacaacgccugcaucggcuccauccgcaacggcaccuacgaccacaacgucuaccgcgacgaggcccucaacaaccgcuuccagaucaagggcgucgagcucaaguccggcuacaaggacuggauccucuggaucuccuucgccaucuccugcuuccuccucugcgucgcccuccucggcuucaucaugugggccugccagaagggcaacauccgcugcaacaucugcaucuga

SEQ ID NO: 109660 - RNA, 1701 nt, Artificial Sequence; identical to SEQ ID NO: 109364
  derived and/or modified CDS sequence (opt2) from hemagglutinin__InfluenzaA__ALN39678

SEQ ID NO: 109661 - RNA, 1701 nt, Artificial Sequence
  derived and/or modified CDS sequence (opt2) from hemagglutinin__InfluenzaA__ALN39679
augaagaccaucaucgcccucggcuacauccucugccucgucuucgcccagaagauccccggcaacgacaacuccaccgccacccucugccucggccaccacgccguccccaacggcaccgucgucaagaccaucaccaacgaccgcaucgaggucaccaacgccaccgagcucguccagaacuccuccaucggcgagaucugcgacuccccccacaagauccucgacggcgagaacugcacccucaucgacgcccuccucggcgacccccagugcgacggcuuccagaacaagaagugggaccucuucgucgagcgcuccaaggccuacuccaacugcuaccccuacgacguccccgacuacgccucccuccgcucccucgucgccuccuccggcacccucgaguucaacaacgaguccuucaacuggaccggcgucacccagaacggcaccuccuccgccugcauccgccgcuccuccuccuccuucuucucccgccucaacuggcucacccaccucaacuacaccuaccccgcccucaacgucaccaugcccaacaacgagcaguucgacaagcucuacaucuggggcguccaccaccccggcaccgacaaggaccagaucuuccucuacgcccaguccuccggccgcaucaccgucuccaccaagcgcucccagcaggccgucauccccaacaucggcucccgcccccgcauccgcgacauccccucccgcaucuccaucuacuggaccaucgucaagcccggcgacauccuccucaucaacuccaccggcaaccucaucgccccccgcggcuacuucaagauccgcuccggcaaguccuccaucaugcgcuccgacgcccccaucggcaagugcaaguccgagugcaucacccccaacggcuccauccccaacgacaagcccuuccagaacgucaaccgcaucaccuacggcgccugcccccgcuacgucaagcacuccacccucaagcucgccaccggcaugcgcaacguccccgagaagcagacccgcggcaucuucggcgccaucgccggcuucaucgagaacggcugggagggcauggucgacggcugguacggcuuccgccaccagaacuccgagggccgcggccaggccgccgaccucaaguccacccaggccgccaucgaccagaucaacggcaagcucaaccgccucaucggcaagaccaacgagaaguuccaccagaucgagaaggaguucuccgaggucgagggccgcauccaggaccucgagaaguacgucgaggacaccaagaucgaccucugguccuacaacgccgagcuccucgucgcccucgagaaccagcacaccaucgaccucaccgacuccgagaugaacaagcucuucgagaagaccaagaagcagcuccgcgagaacgccgaggacaugggcaacggcugcuucaagaucuaccacaagugcgacaacgccugcaucggcuccauccgcaacggcaccuacgaccacaacgucuaccgcgacgaggcccucaacaaccgcuuccagaucaagggcgucgagcucaaguccggcuacaaggacuggauccucuggaucuccuucgccaucuccugcuuccuccucugcgucgcccuccucggcuucaucaugugggccugccagaagggcaacauccgcugcaacaucugcaucuga

SEQ ID NO: 109662 - RNA, 1701 nt, Artificial Sequence; identical to SEQ ID NO: 109364
  derived and/or modified CDS sequence (opt2) from hemagglutinin__InfluenzaA__ALN39680

SEQ ID NO: 109663 - RNA, 1701 nt, Artificial Sequence; identical to SEQ ID NO: 109364
  derived and/or modified CDS sequence (opt2) from hemagglutinin__InfluenzaA__ALN39681

SEQ ID NO: 109664 - RNA, 1701 nt, Artificial Sequence; identical to SEQ ID NO: 109364
  derived and/or modified CDS sequence (opt2) from hemagglutinin__InfluenzaA__ALN39682

SEQ ID NO: 109665 - RNA, 1701 nt, Artificial Sequence; identical to SEQ ID NO: 109364
  derived and/or modified CDS sequence (opt2) from hemagglutinin__InfluenzaA__ALN39683

SEQ ID NO: 109666 - RNA, 1701 nt, Artificial Sequence; identical to SEQ ID NO: 109364
  derived and/or modified CDS sequence (opt2) from hemagglutinin__InfluenzaA__ALN39684

SEQ ID NO: 109667 - RNA, 1701 nt, Artificial Sequence; identical to SEQ ID NO: 109364
  derived and/or modified CDS sequence (opt2) from hemagglutinin__InfluenzaA__ALN39685

SEQ ID NO: 109668 - RNA, 1701 nt, Artificial Sequence
  derived and/or modified CDS sequence (opt2) from hemagglutinin__InfluenzaA__ALN39686
augaagaccaucaucgcccucggcuacauccucugccucgccuucgcccagaagauccccggcaacgacaacuccaccgccacccucugccucggccaccacgccguccccaacggcaccaucgucaagaccaucaccaacgaccgcaucgaggucaccaacgccaccgagcucguccagaacuccuccaucggcgagaucugcgacuccccccacaagauccucgacggcgagaacugcacccucaucgacgcccuccucggcgacccccagugcgacggcuuccagaacaagaagugggaccucuucgucgagcgcuccaaggccuacuccaacugcuaccccuacgacguccccgacuacaccucccuccgcucccucgucgccuccuccggcacccucgaguucaacaacgaguccuucaacuggaccggcgucacccagaacggcaccuccuccgccugcauccgccgcuccuccuccuccuucuucucccgccucaacuggcucacccaccucaacuacaccuaccccgcccucaacgucaccaugcccaacaacgagcaguucgacaagcucuacaucuggggcguccaccaccccggcaccgacaaggaccagaucuuccucuacgcccaguccuccggccgcaucaccgucuccaccaagcgcucccagcaggccgucauccccaacaucggcucccgcccccgcauccgcgacauccccucccgcaucuccaucuacuggaccaucgucaagcccggcgacauccuccucaucaacuccaccggcaaccucaucgccccccgcggcuacuucaagauccgcuccggcaaguccuccaucaugcgcuccgacgcccccaucggcaagugcaaguccgagugcaucacccccaacggcuccauccccaacgacaagcccuuccagaacgucaaccgcaucaccuacggcgccugcccccgcuacgucaagcacuccacccucaagcucgccaccggcaugcgcaacguccccgagaagcagacccgcggcaucuucggcgccaucgccggcuucaucgagaacggcugggagggcauggucgacggcugguacggcuuccgccaccagaacuccgagggccgcggccaggccgccgaccucaaguccacccaggccgccaucgaccagaucaacggcaagcucaaccgccucaucggcaagaccaacgagaaguuccaccagaucgagaaggaguucuccgaggucgagggccgcauccaggaccucgagaaguacgucgaggacaccaagaucgaccucugguccuacaacgccgagcuccucgucgcccucgagaaccagcacaccaucgaccucaccgacuccgagaugaacaagcucuucgagaagaccaagaagcagcuccgcgagaacgccgaggacaugggcaacggcugcuucaagaucuaccacaagugcgacaacgccugcaucggcuccauccgcaacggcaccuacgaccacaacgucuaccgcgacgaggcccucaacaaccgcuuccagaucaagggcgucgagcucaaguccggcuacaaggacuggauccucuggaucuccuucgccaucuccugcuuccuccucugcgucgcccuccucggcuucaucaugugggccugccagaagggcaacauccgcugcaacaucugcaucuga

SEQ ID NO: 109669 - RNA, 1701 nt, Artificial Sequence; identical to SEQ ID NO: 109364
  derived and/or modified CDS sequence (opt2) from hemagglutinin__InfluenzaA__ALN39687

SEQ ID NO: 109670 - RNA, 1701 nt, Artificial Sequence
  derived and/or modified CDS sequence (opt2) from hemagglutinin__InfluenzaA__ALN39688
augaagaccaucaucgcccucggcuacauccucugccucgucuucgcccagaagauccccggcaacgacaacuccaccgccacccucugccucggccaccacgccguccccaacggcaccaucgucaagaccaucaccaacgaccgcaucgaggucaccaacgccaccgagcucguccagaacuccuccaucggcgagaucugcgacuccccccacaagauccucgacggcgagaacugcacccucaucgacgcccuccucggcgacccccagugcgacggcuuccagaacaagaagugggaccucuucgucgagcgcuccaaggccuacuccaacugcuaccccuacgacguccccgacuacgccucccuccgcucccucgucgccuccuccggcacccucgaguucaacaacgaguccuucaacuggaccggcgucacccagaacggcaccuccuccgccugcauccgccgcuccuccuccuccuucuucucccgccucaacuggcucacccaccucaacuacaucuaccccgcccucaacgucaccaugcccaacaacgagcaguucgacaagcucuacaucuggggcguccaccaccccggcaccgacaaggaccagaucuuccucuacgcccaguccuccggccgcaucaccgucuccaccaagcgcucccagcaggccgucauccccaacaucggcucccgcccccgcauccgcgacauccccucccgcaucuccaucuacuggaccaucgucaagcccggcgacauccuccucaucaacuccaccggcaaccucaucgccccccgcggcuacuucaagauccgcuccggcaaguccuccaucaugcgcuccgacgcccccaucggcaagugcaaguccgagugcaucacccccaacggcuccauccccaacgacaagcccuuccagaacgucaaccgcaucaccuacggcgccugcccccgcuacgucaagcacuccacccucaagcucgccaccggcaugcgcaacguccccgagaagcagacccgcggcaucuucggcgccaucgccggcuucaucgagaacggcugggagggcauggucgacggcugguacggcuuccgccaccagaacuccgagggccgcggccaggccgccgaccucaaguccacccaggccgccaucgaccagaucaacggcaagcucaaccgccucaucggcaagaccaacgagaaguuccaccagaucgagaaggaguucuccgaggucgagggccgcauccaggaccucgagaaguacgucgaggacaccaagaucgaccucugguccuacaacgccgagcuccucgucgcccucgagaaccagcacaccaucgaccucaccgacuccgagaugaacaagcucuucgagaagaccaagaagcagcuccgcgagaacgccgaggacaugggcaacggcugcuucaagaucuaccacaagugcgacaacgccugcaucggcuccauccgcaacggcaccuacgaccacaacgucuaccgcgacgaggcccucaacaaccgcuuccagaucaagggcgucgagcucaaguccggcuacaaggacuggauccucuggaucuccuucgccaucuccugcuuccuccucugcgucgcccuccucggcuucaucaugugggccugccagaagggcaacauccgcugcaacaucugcaucuga

SEQ ID NO: 109671 - RNA, 1701 nt, Artificial Sequence
  derived and/or modified CDS sequence (opt2) from hemagglutinin__InfluenzaA__ALN39689
augaagaccaucaucgcccucggcuacauccucugccucgucuucgcccagaagauccccggcaacgacaacuccaccgccacccucugccucggccaccacgccguccccaacggcaccaucgucaagaccaucaccaacgaccgcaucgaggucaccaacgccaccgagcucguccagaacuccuccaucggcgagaucugcgacuccccccacaagauccucgacggcgagaacugcacccucaucgacgcccuccucggcgacccccagugcgacggcuuccagaacaagaagugggaccucuucgucgagcgcuccaaggccuacuccaacugcuaccccuacgacguccccgacuacgccucccuccgcucccucgucgccuccuccggcacccucgaguucaacaacgaguccuucaacuggaccggcgucacccagaacggcaccuccuccgccugcauccgccgcuccuccuccuccuucuucucccgccucaacuggcucacccaccucaacuacaccuaccccgcccucaacgucaccaugcccaacaacgagcaguucgacaagcucuacaucuggggcguccaccaccccggcaccgacaaggaccagaucuuccucuacgcccaguccuccggccgcaucaccgucuccaccaagcgcucccagcaggccgucauccccaacaucggcucccgcccccgcauccgcgacauccccucccgcaucuccaucuacuggaccaucgucaagcccggcgacauccuccucauccacuccaccggcaaccucaucgccccccgcggcuacuucaagauccgcuccggcaaguccuccaucaugcgcuccgacgcccccaucggcaagugcaaguccgagugcaucacccccaacggcuccauccccaacgacaagcccuuccagaacgucaaccgcaucaccuacggcgccugcccccgcuacgucaagcacuccacccucaagcucgccaccggcaugcgcaacguccccgagaagcagacccgcggcaucuucggcgccaucgccggcuucaucgagaacggcugggagggcauggucgacggcugguacggcuuccgccaccagaacuccgagggccgcggccaggccgccgaccucaaguccacccaggccgccaucgaccagaucaacggcaagcucaaccgccucaucggcaagaccaacgagaaguuccaccagaucgagaaggaguucuccgaggucgagggccgcauccaggaccucgagaaguacgucgaggacaccaagaucgaccucugguccuacaacgccgagcuccucgucgcccucgagaaccagcacaccaucgaccucaccgacuccgagaugaacaagcucuucgagaagaccaagaagcagcuccgcgagaacgccgaggacaugggcaacggcugcuucaagaucuaccacaagugcgacaacgccugcaucggcuccauccgcaacggcaccuacgaccacaacgucuaccgcgacgaggcccucaacaaccgcuuccagaucaagggcgucgagcucaaguccggcuacaaggacuggauccucuggaucuccuucgccaucuccugcuuccuccucugcgucgcccuccucggcuucaucaugugggccugccagaagggcaacauccgcugcaacaucugcaucuga

SEQ ID NO: 109672 - RNA, 1701 nt, Artificial Sequence
  derived and/or modified CDS sequence (opt2) from hemagglutinin__InfluenzaA__ALN39690
augaagaccaucaucgcccucuccuacauccucugccucgucuucgcccagaagcuccccggcaacgacaacuccaccgccacccucugccucggccaccacgccguccccaacggcaccaucgucaagaccaucaccaacgaccgcaucgaggucaccaacgccaccgagcucguccagaacuccuccaucggcgagaucugcgacuccccccaccagauccucgacggcaagaacugcacccucaucgacgcccuccucggcgacccccagugcgacggcuuccagaacaagaagugggaccucuucgucgagcgcuccaaggcccacuccaacugcuaccccuacgacguccccgacuacgccucccuccgcucccucgucgccuccuccggcacccucgaguucaacaacgaguccuucaacugggccggcgucacccagaacggcaccuccuccuccugcauccgcggcuccaacuccuccuucuucucccgccucaacuggcucacccaccucaacuccaucuaccccgcccucaacgucaccaugcccaacaacgagcaguucgacaagcucuacaucuggggcguccaccaccccggcaccgacaaggaccagaucuuccucuacgcccaguccuccggccgcaucaccgucuccaccaagcgcucccagcaggccgucauccccaacaucggcucccgcccccgcauccgcgacauccccucccgcaucuccaucuacuggaccaucgucaagcccggcgacauccuccucaucaacuccaccggcaaccucaucgccccccgcggcuacuucaagauccgcuccggcaaguccuccaucaugcgcuccgacgcccccaucggcaagugcaaguccgagugcaucacccccaacggcuccauccccaacgacaagcccuuccagaacgucaaccgcaucaccuacggcgccugcccccgcuacgucaagcaguccacccucaagcucgccaccggcaugcgcaacguccccgagcgccagacccgcggcaucuucggcgccaucgccggcuucaucgagaacggcugggagggcauggucgacggcugguacggcuuccgccaccagaacuccgagggccgcggccaggccgccgaccucaaguccacccaggccgccaucgaccagaucaacggcaagcucaaccgccucaucggcaagaccaacgagaaguuccaccagaucgagaaggaguucuccgaggucgagggccgcauccaggaccucgagaaguacgucgaggacaccaagaucgaccucugguccuacaacgccgagcuccucgucgcccucgagaaccagcacaccaucgaccucaccgacuccgagaugaacaagcucuucgagaagaccaagaagcagcuccgcgagaacgccgaggacaugggcaacggcugcuucaagaucuaccacaagugcgacaacgccugcaucggcuccauccgcaacggcaccuacgaccacaacgucuaccgcgacgaggcccucaacaaccgcuuccagaucaagggcgucgagcucaaguccggcuacaaggacuggauccucuggaucuccuucgccaucuccugcuuccuccucugcgucgcccuccucggcuucaucaugugggccugccagaagggcaacauccgcugcaacaucugcaucuga

SEQ ID NO: 109673 - RNA, 1701 nt, Artificial Sequence
  derived and/or modified CDS sequence (opt2) from hemagglutinin__InfluenzaA__ALN39691
augaagaccaucaucgcccucuccuacauccucugccucgucuucgcccagaagcuccccggcaacgacaacuccaccgccacccucugccucggccaccacgccguccccaacggcaccaucgucaagaccaucaccaacgaccgcaucgaggucaccaacgccaccgagcucguccagaacuccuccaucggcgagaucugcgacuccccccaccagauccucgacggcaagaacugcacccucaucgacgcccuccucggcgacccccagugcgacggcuuccagaacaagaagugggaccucuucgucgagcgcuccaaggcccacuccaacugcuaccccuacgacguccccgacuacgccucccuccgcucccucgucgccuccuccggcacccucgaguucaacaacgaguccuucaacugggccggcgucacccagaacggcaccuccuccuccugcauccgcggcuccaacuccuccuucuucucccgccucaacuggcucacccaccucaacuccaaguaccccgcccucaacgucaccaugcccaacaacgagcaguucgacaagcucuacaucuggggcguccaccaccccggcaccgacaaggaccagaucuuccucuacgcccagcccuccggccgcaucaccgucuccaccaagcgcucccagcaggccgucauccccaacaucggcucccgcccccgcauccgcgacauccccucccgcaucuccaucuacuggaccaucgucaagcccggcgacauccuccucaucaacuccaccggcaaccucaucgccccccgcggcuacuucaagauccgcuccggcaaguccuccaucaugcgcuccgacgcccccaucggcaagugcaaguccgagugcaucacccccaacggcuccauccccaacgacaagcccuuccagaacgucaaccgcaucaccuacggcgccugcccccgcuacgucaagcaguccacccucaagcucgccaccggcaugcgcaacguccccgagaagcagacccgcggcaucuucggcgccaucgccggcuucaucgagaacggcugggagggcaugaaggacggcugguacggcuuccgccaccagaacuccgagggccgcggccaggccgccgaccucaaguccacccaggccgccaucgaccagaucaacggcaagcucaaccgccucaucggcaagaccaacgagaaguuccaccagaucgagaaggaguucuccgaggucgagggccgcauccaggaccucgagaaguacgucgaggacaccaagaucgaccucugguccuacaacgccgagcuccucgucgcccucgagaaccagcacaccaucgaccucaccgacuccgagaugaacaagcucuucgagaagaccaagaagcagcuccgcgagaacgccgaggacaugggcaacggcugcuucaagaucuaccacaagugcgacaacgccugcaucggcuccauccgcaacggcaccuacgaccacgacgucuaccgcgacgaggcccucaacaaccgcuuccagaucaagggcgucgagcucaaguccggcuacaaggacuggauccucuggaucuccuucgccaucuccugcuuccuccucugcgucgcccuccucggcuucaucaugugggccugccagaagggcaacauccgcugcaacaucugcaucuga

SEQ ID NO: 109674 - RNA, 1701 nt, Artificial Sequence; identical to SEQ ID NO: 109364
  derived and/or modified CDS sequence (opt2) from hemagglutinin__InfluenzaA__ALN39692

SEQ ID NO: 109675 - RNA, 1701 nt, Artificial Sequence; identical to SEQ ID NO: 109364
  derived and/or modified CDS sequence (opt2) from hemagglutinin__InfluenzaA__ALN39693

SEQ ID NO: 109676 - RNA, 1701 nt, Artificial Sequence; identical to SEQ ID NO: 109364
  derived and/or modified CDS sequence (opt2) from hemagglutinin__InfluenzaA__ALN39694

SEQ ID NO: 109677 - RNA, 1701 nt, Artificial Sequence; identical to SEQ ID NO: 109364
  derived and/or modified CDS sequence (opt2) from hemagglutinin__InfluenzaA__ALN39695

SEQ ID NO: 109678 - RNA, 1701 nt, Artificial Sequence; identical to SEQ ID NO: 109364
  derived and/or modified CDS sequence (opt2) from hemagglutinin__InfluenzaA__ALN39696

SEQ ID NO: 109679 - RNA, 1701 nt, Artificial Sequence; identical to SEQ ID NO: 109034
  derived and/or modified CDS sequence (opt2) from hemagglutinin__InfluenzaA__ALN39697

SEQ ID NO: 109680 - RNA, 1701 nt, Artificial Sequence
  derived and/or modified CDS sequence (opt2) from hemagglutinin__InfluenzaA__ALN39698
augaagaccaucaucgcccucucccacauccucugccucgucuucgcccagaagauccccggcaacgacaacuccaccgccacccucugccucggccaccacgccguccccaacggcaccaucgucaagaccaucaccaacgaccgcaucgaggucaccaacgccaccgagcucguccagaacuccuccaucggcgagaucugcgacuccccccaccagauccucgacggcgagaacugcacccucaucgacgcccuccucggcgacccccagugcgacggcuuccagaacaagaagugggaccucuucgucgagcgcuccaaggccuacuccaacugcuaccccuacgacguccccgacuacgccucccuccgcucccucgucgccuccuccggcacccucgaguucaacaacgaguccuucaacuggaccggcgucacccagaacggcaccuccuccgccugcauccgccgcuccuccuccuccuucuucucccgccucaacuggcucacccaccucaacuacaccuaccccgcccucaacgucaccaugcccaacaacgagcaguucgacaagcucuacaucuggggcguccaccaccccggcaccgacaaggaccagaucuuccucuacgcccaguccuccggccgcaucaccgucuccaccaagcgcucccagcaggccgucauccccaacaucggcucccgcccccgcauccgcgacauccccucccgcaucuccaucuacuggaccaucgucaagcccggcgacauccuccucaucaacuccaccggcaaccucaucgccccccgcggcuacuucaagauccgcuccggcaaguccuccaucaugcgcuccgacgcccccaucggcaagugcaaguccgagugcaucacccccaacggcuccauccccaacgacaagcccuuccagaacgucaaccgcaucaccuacggcgccugcccccgcuacgucaagcacuccacccucaagcucgccaccggcaugcgcaacguccccgagaagcagacccgcggcaucuucggcgccaucgccggcuucaucgagaacggcugggagggcaugauggacggcugguacggcuuccgccaccagaacuccgagggccgcggccaggccgccgaccucaaguccacccaggccgccaucgaccagaucaacggcaagcucaaccgccucaucggcaagaccaacgagaaguuccaccagaucgagaaggaguucuccgaggucgagggccgcauccaggaccucgagaaguacgucgaggacaccaagaucgaccucugguccuacaacgccgagcuccucgucgcccucgagaaccagcacaccaucgaccucaccgacuccgagaugaacaagcucuucgagaagaccaagaagcagcuccgcgagaacgccgaggacaugggcaacggcugcuucaagaucuaccacaagugcgacaacgccugcaugggcuccauccgcaacggcaccuacgaccacaacgucuaccgcaacgaggcccucaacaaccgcuuccagaucaagggcgucgagcucaaguccggcuacaaggacuggauccucuggaucuccuucgccaucuccugcuuccuccucugcgucgcccuccucggcuucaucaugugggccugccagaagggcaacauccgcugcaacaucugcaucuga

SEQ ID NO: 109681 - RNA, 1701 nt, Artificial Sequence
  derived and/or modified CDS sequence (opt2) from hemagglutinin__InfluenzaA__ALN39700
augaagaccaucaucgcccucuccuacauccucugccucgucuucgcccagaagauccccggcaacgacaacuccaccgccacccucugccucggccaccacgccguccccaacggcaccaucgucaagaccaucaccaacgaccgcaucgaggucaccaacgccaccgagcucguccagaacuccuccaucggcgagaucugcgacuccccccaccagauccucgacggcgagaacugcacccucaucgacgcccuccucggcgacccccagugcgacggcuuccagaacaagaagugggaccucuucgucgagcgcuccaaggccuacuccaacugcuaccccuacgacguccccgacuacgccucccuccgcucccucgucgccuccuccggcacccucgaguucaacaacgaguccuucaacuggaccggcgucacccagaacggcaccuccuccgccugcauccgccgcuccuccuccuccuucuucucccgccucaacuggcucacccaccucaacuacaccuaccccgcccucaacgucaccaugcccaacaacgagcaguucgacaagcucuacaucuggggcguccaccaccccggcaccgacaaggaccagaucuuccucuacgcccaguccuccggccgcaucaccgucuccaccaagcgcucccagcaggccgucauccccaacaucggcucccgcccccgcauccgcgacauccccucccgcaucuccaucuacuggaccaucgucaagcccggcgacauccuccucaucaacuccaccggcaaccucaucgccccccgcggcuacuucaagauccgcuccggcaaguccuccaucaugcgcuccgacgcccccaucggcaagugcaaguccgagugcaucacccccaacggcuccauccccaacgacaagcccuuccagaacgucaaccgcaucaccuacggcgccugcccccgcuacgucaagcacuccacccucaagcucgccaccggcaugcgcaacguccccgagaagcagacccgcggcaucuucggcgccaucgccggcuucaucgagaacggcugggagggcauggucgacggcugguacggcuuccgccaccagaacuccgagggccgcggccaggccgccgaccucaaguccacccaggccgccaucgaccagaucaacggcaagcucaaccgccucaucggcaagaccaacgagaaguuccaccagaucgagaaggaguucuccgaggucgagggccgcauccaggaccucgagaaguacgucgaggacaccaagaucgaccucugguccuacaacgccgagcuccucgucgcccucgagaaccagcacaccaucgaccucaccgacuccgagaugaacaagcucuucgagaagaccaagaagcagcuccgcgagaacgccgaggacaugggcaacggcugcuucaagaucuaccacaagugcgacaacgccugcaucggcuccauccgcaacggcaccuacgaccacaacgucuaccgcgacgaggcccucaacaaccgcuuccagaucaagggcgucgagcucaaguccggcuacaaggacuggauccucuggaucuccuucgccaucuccugcuuccuccucugcgucgcccuccucggcuucaucaugugggccugccagaagggcaacaucaagugcaacaucugcaucuga

SEQ ID NO: 109682 - RNA, 1701 nt, Artificial Sequence; identical to SEQ ID NO: 109083
  derived and/or modified CDS sequence (opt2) from hemagglutinin__InfluenzaA__ALN39701

SEQ ID NO: 109683 - RNA, 1701 nt, Artificial Sequence
  derived and/or modified CDS sequence (opt2) from hemagglutinin__InfluenzaA__ALN39702
augaagaccaucaucgcccucuccuacauccucugccucgucuucgcccagaagauccccggcaacgacaacuccaccgccacccucugccucggccaccacgccguccccaacggcaccaucgucaagaccaucaccaacgaccgcaucgaggucaccaacgccaccgagcucguccagaacuccuccaucggcgagaucugcgacuccccccaccagauccucgacggcgagaacugcacccucaucgacgcccuccucggcgacccccagugcgacggcuuccagaacaagaagugggaccucuucgucgagcgcuccaaggccuacuccaacugcuaccccuacgacguccccgacuacgccucccuccgcucccucgucgccuccuccggcacccucgaguucaacaacgaguccuucaacuggaccggcgucacccagaacggcaccuccuccgccugcauccgcaaguccuccuccuccuucuucucccgccucaacuggcucacccaccucaacuacaccuaccccgcccucaacgucaccaugcccaacaacgagcaguucgacaagcucuacaucuggggcguccaccaccccggcaccgacaaggaccagaucuuccucuacgcccgcuccuccggccgcaucaccgucuccaccaagcgcucccagcaggccgucauccccaacaucggcucccgcccccgcauccgcgacauccccucccgcaucuccaucuacuggaccaucgucaagcccggcgacauccuccucaucaacuccaccggcaaccucaucgccccccgcggcuacuucaagauccgcuccggcaaguccuccaucaugcgcuccgacgcccccaucggcaagugcaaguccgagugcaucacccccaacggcuccauccccaacgacaagcccuuccagaacgucaaccgcaucaccuacggcgccugcccccgcuacgucaagcacuccacccucaagcucgccaccggcaugcgcaacguccccgagaagcagacccgcggcaucuucggcgccaucgccggcuucaucgagaacggcugggagggcauggucgacggcugguacggcuuccgccaccagaacuccgagggccgcggccaggccgccgaccucaaguccacccaggccgccaucgaccagaucaacggcaagcucaaccgccucaucggcaagaccaacgagaaguuccaccagaucgagaaggaguucuccgaggucgagggccgcauccaggaccucgagaaguacgucgaggacaccaagaucgaccucugguccuacaacgccgagcuccucgucgcccucgagaaccagcacaccaucgaccucaccgacuccgagaugaacaagcucuucgagaagaccaagaagcagcuccgcgagaacgccgaggacaugggcaacggcugcuucaagaucuaccacaagugcgacaacgccugcaucggcuccauccgcaacggcaccuacgaccacaacgucuaccgcgacgaggcccucaacaaccgcuuccagaucaagggcgucgagcucaaguccggcuacaaggacuggauccucuggaucuccuucgccaucuccugcuuccuccucugcgucgcccuccucggcuucaucaugugggccugccagaagggcaacauccgcugcuccaucugcaucuga

SEQ ID NO: 109684 - RNA, 1701 nt, Artificial Sequence
  derived and/or modified CDS sequence (opt2) from hemagglutinin__InfluenzaA__ALN39703
augaagaccaucaucgcccucuccuacauccucugccucgucuucgcccagaagauccccggcaacgacgacuccaccgccacccucugccucggccaccacgccguccccaacggcaccaucgucaagaccaucaccaacgaccgcaucgaggucaccaacgccaccgagcucguccagaacuccuccaucggcgagaucugcgacuccccccaccagauccucgacggcgagaacugcacccucaucgacgcccuccucggcgacccccagugcgacggcuuccagaacaagaagugggaccucuucgucgagcgcuccaaggccuacuccaacugcuaccccuacgacguccccgacuacgccucccuccgcucccucgucgccuccuccggcacccucgaguucaacaacgaguccuucaacuggaccggcgucacccagaacggcaccuccuccgccugcauccgccgcuccuccuccuccuucuucucccgccucaacuggcucacccaccucaacuacaccuaccccgcccucaacgucaccaugcccaacaacgagcaguucgacaagcucuacaucuggggcguccaccaccccggcaccgacaaggaccagaucuuccucuacgcccaguccuccggccgcaucaccgucuccaccaagcgcucccagcaggccgucauccccaacaucggcucccgcccccgcauccgcgacauccccucccgcaucuccaucuacuggaccaucgucaagcccggcgacauccuccucaucaacuccaccggcaaccucaucgccccccgcggcuacuucaagauccgcuccggcaaguccuccaucaugcgcuccgacgcccccaucggcaagugcaaguccgagugcaucacccccaacggcuccauccccaacgacaagcccuuccagaacgucaaccgcaucaccuacggcgccugcccccgcuacgucaagcacuccacccucaagcucgccaccggcaugcgcaacguccccgagaagcagacccgcggcaucuucggcgccaucgccggcuucaucgagaacggcugggagggcauggucgacggcugguacggcuuccgccaccagaacuccgagggccgcggccaggccgccgaccucaaguccacccaggccgccaucgaccagaucaacggcaagcucaaccgccucaucggcaagaccaacgagaaguuccaccagaucgagaaggaguucuccgaggucgagggccgcauccaggaccucgagaaguacgucgaggacaccaagaucgaccucugguccuacaacgccgagcuccucgucgcccucgagaaccagcacaccaucgaccucaccgacuccgagaugaacaagcucuucgagaagaccaagaagcagcuccgcgagaacgccgaggacaugggcaacggcugcuucaagaucuaccacaagugcgacaacgccugcaucggcuccauccgcaacggcaccuacgaccacaacgucuaccgcgacgaggcccucaacaaccgcuuccagaucaagggcgucgagcucaaguccggcuacaaggacuggauccucuggaucuccuucgccaucuccugcuuccuccucugcgucgcccuccucggcuucaucaugugggccugccagaagggcaacauccgcugcaacaucugcaucuga

SEQ ID NO: 109685 - RNA, 1701 nt, Artificial Sequence; identical to SEQ ID NO: 109083
  derived and/or modified CDS sequence (opt2) from hemagglutinin__InfluenzaA__ALN39704

SEQ ID NO: 109686 - RNA, 1701 nt, Artificial Sequence; identical to SEQ ID NO: 108477
  derived and/or modified CDS sequence (opt2) from hemagglutinin__InfluenzaA__ALN39705

SEQ ID NO: 109687 - RNA, 1701 nt, Artificial Sequence
  derived and/or modified CDS sequence (opt2) from hemagglutinin__InfluenzaA__ALN39706
augaagaccaucaucgcccucuccuacauccucugccucgucuucgcccagaagcuccccggcaacgacaacuccaccgccacccucugccucggccaccacgccguccccaacggcaugaucgucaagaccaucaccaacgaccgcaucgaggucaccaacgccaccgagcucguccagaacuccuccaucggcgagaucugcgacuccccccaccagauccucgacggcaagaacugcacccucaucgacgcccuccucggcgacccccagugcgacgacuuccagaacaagcgcugggaccucuucgucgagcgcuccaaggccuacuccaacugcuaccccuacgacguccccgacuacgccucccuccgcucccucgucgccuccuccggcacccucgaguucaacgacgaguccuucaacugggccggcgucacccagaacggcaccuccuccgccugcauccgcggcuccaacuccuccuucuucucccgccucaacuggcucacccacuccaacuucaaguaccccgcccucaacgucaccaugcccaacaacgagcaguucgacaagcucuacaucuggggcguccaccaccccggcaccgacaaggaccagaucuuccucuacgcccaguccuccggccgcaucaccgucuccaccaagcgcucccagcaggccgucauccccaacaucggcucccgcccccgcauccgcaacauccccucccgcaucuccaucuacuggaccaucgucaagcccggcgacauccuccucaucaacuccaccggcaaccucaucgccccccgcggcuacuucaagauccaguccggcaaguccuccaucaugcgcuccgacgcccccaucggcaagugcaaguccgagugcaucacccccaacggcuccauccccaacgacaagcccuuccagaacgucaaccgcaucaccuacggcgccugcccccgcuacgucaagcaguccacccucaagcucgccaccggcaugcgcaacguccccgagaagcagacccgcggcaucuucggcgccaucgccggcuucaucgagaacggcugggagggcaugaaggacggcugguacggcuuccgccaccagaacuccgagggccgcggccaggccgccgaccucaaguccacccaggccgccaucgaccagaucaacggcaagcucaaccgccucaucggcaagaccaacgagaaguuccaccagaucgagaaggaguucuccgaggucgagggccgcauccaggaccucgagaaguacgucgaggacaccaagaucgaccucugguccuacaacgccgagcuccucgucgcccucgagaaccagcacaccaucgaccucaccgacuccgagaugaacaagcucuucgagaagaccaagaagcagcuccgcgagaacgccgaggacaugggcaacggcugcuucaagaucuaccacaagugcgacaacgccugcaucggcuccauccgcaacggcaccuacgaccacgacgucuaccgcgacgaggcccucaacaaccgcuuccagaucaagggcgucgagcucaaguccggcuacaaggacuggauccucuggaucuccuucgccaucuccugcuuccuccucugcgucgcccuccucggcuucaucaugugggccugccagaagggcaacauccgcugcaacaucugcaucuga

SEQ ID NO: 109688 - RNA, 1701 nt, Artificial Sequence; identical to SEQ ID NO: 108477
  derived and/or modified CDS sequence (opt2) from hemagglutinin__InfluenzaA__ALN39707

SEQ ID NO: 109689 - RNA, 1701 nt, Artificial Sequence; identical to SEQ ID NO: 109083
  derived and/or modified CDS sequence (opt2) from hemagglutinin__InfluenzaA__ALN39708

SEQ ID NO: 109690 - RNA, 1701 nt, Artificial Sequence
  derived and/or modified CDS sequence (opt2) from hemagglutinin__InfluenzaA__ALN39709
augaagaccaucaucgcccucuccuacauccucugccucgucuucgcccagaagcuccccggcaacgacaacuccaccgccacccucugccucggccaccacgccguccccaacggcaccaucgucaagaccaucaccaacgaccgcaucgaggucaccaacgccaccgagcucguccagaacuccuccaucggcgagaucugcgacuccccccaccagauccucgacggcgagaacugcacccucaucgacgcccuccucggcgacccccagugcgacggcuuccagaacaagaagugggaccucuucgucgagcgcuccaaggccuacuccaacugcuaccccuacgacguccccgacuacgccucccuccgcucccucgucgccuccuccggcacccucgaguucaacaacgaguccuucaacugggccggcgucacccagaacggcaccuccuccuccugcaugcgcggcuccaacuccuccuucuucucccgccucaacuggcucacccaccucaacuccaaguaccccgcccucaacgucaccaugcccaacaacgagcaguucgacaagcucuacaucuggggcguccaccaccccggcaccgacaaggaccagaucuuccucuacgcccaguccuccggccgcaucaccgucuccaccaagcgcucccagcaggccgucacccccaacaucggcucccgcccccgcauccgcgacauccccucccgcaucuccaucuacuggaccaucgucaagcccggcgacauccuccucaucaacuccaccggcaaccucaucgccccccgcggcuacuucaagauccgcuccggcaaguccuccaucaugcgcuccgacgcccccaucggcaagugcaaguccgagugcaucacccccaacggcuccauccccaacgacaagcccuuccagaacgucaaccgcaucaccuacggcgccugcccccgcuacgucaagcaguccacccucaagcucgccaccggcaugcgcaacguccccgagcgccagacccgcggcaucuucggcgccaucgccggcuucaucgagaacggcugggagggcauggucgacggcugguacggcuuccgccaccagaacuccgagggccgcggccaggccgccgaccucaaguccacccaggccgccaucgaccagaucaacggcaagcucaaccgccucaucggcaagaccaacgagaaguuccaccagaucgagaaggaguucuccgaggucgagggccgcauccaggaccucgagaaguacgucgaggacaccaagaucgaccucugguccuacaacgccgagcuccucgucgcccucgagaaccagcacaccaucgaccucaccgacuccgagaugaacaagcucuucgagaagaccaagaagcagcuccgcgagaacgccgaggacaugggcaacggcugcuucaagaucuaccacaagugcgacaacgccugcaucggcuccauccgcaacggcaccuacgaccacgacgucuaccgcgacgaggcccucaacaaccgcuuccagaucaagggcgucgagcucaaguccggcuacaaggacuggauccucuggaucuccuucgccaucuccugcuuccuccucugcgucgcccuccucggcuucaucaugugggccugccagaagggcaacauccgcugcaacaucugcaucuga

SEQ ID NO: 109691 - RNA, 1701 nt, Artificial Sequence; identical to SEQ ID NO: 109407
  derived and/or modified CDS sequence (opt2) from hemagglutinin__InfluenzaA__ALN39710

SEQ ID NO: 109692 - RNA, 1701 nt, Artificial Sequence; identical to SEQ ID NO: 109083
  derived and/or modified CDS sequence (opt2) from hemagglutinin__InfluenzaA__ALN39711

SEQ ID NO: 109693 - RNA, 1701 nt, Artificial Sequence; identical to SEQ ID NO: 108477
  derived and/or modified CDS sequence (opt2) from hemagglutinin__InfluenzaA__ALN39712
